United States Patent Application Publication US 2025/0297208 A1 - sequence listing, part 4

SEQ ID NO: 493 - DNA, 60950 bp, Xanthophyllomyces dendrorhous
catgttgaggaccatatgagccggcaaggagacttgttttacctggaacaaggagagggagtaggaaaaaaaaacctccccccgaattaggccgctgttgtgttttctatctcaactccatccatcggttggtcctgcccaccactgataccgctgacgacctcctctttgaccgcagtgatgttcccttctttcgcctttctcttttcctccaacttgatattcaacattctgacctcttcctcaaccttgtcaacggcccgtttcatctccactagtcccatcgctgctgccattagtccatccatcttctcctgactacctctagtgggcatcgtcagtttaccaggtaatggaacaggaggtctcaggtcgttcaacagagcaaaaataggctctgcgagatttggtttggcaggaataggaagtcgggtagagcgaagatagaccggctgatgaccggtcgggttagatgtatggccagatttggaaccaggaccggtaggaccaggagggtttgttccagggataggcgggggaactcgatagatgcagtgaagcaagtctggcgttttattgatttagaagacaacaaagtcgattcacagcatcggtcagatgggttacagaggggaaggcgagagaaggaagataacaaacctgcttttgcgagtttatcggctttcttattagcggctgaagaggtcgaagcagctgatggtccgtctaagccaagtacatcctttcgcttctattcattgccgttcgattaatgtcaacgatgttcttccgcctgcataaggatcgggagcaatcgaagagtgatagaatactgactttatcaccaccggcgcctgtttcgcccgatctcccaggtaagccaacaagaccgctctcgaaacccccaagcattctcatcagatcatccctctctgatttgaattttcgttcttgttgctccattcgtttacattccaagtagagagcctcttcttcggcgatctgctgagcagatagctggaagagcgagttggcatatgttttccttgctacctctcgttctgtttgcgaatgaaaaagagagagtcaagtcgtcagaaatagaaactttctttttcattccgcctcagacccattcttaagaacaaacctttgtcaaatgcgtaactctgcaagagcatgagctttccgttttcatcccctgtgggtcgacttctgaccaacctcctgcaaattgagtagtaccgactcttgatatcctcgatgctttgtttctttcccccgccaggtagattgatatactcatcggcttcgcccgggtaggcgtatcgatcggctacaacaacaaaccgtaggtcgtatgtccgaaggagggcaaacaagtacagcgtttctgaatgcgaccagttgtcgtctgttgttaaaatagaggtgtagaggatgtaaggggtcgctttgagtcagttctgatgtataatagcaatgcaaatgaggaaggtgcaagcgcatacctctaagatgatcatcatattcagcttgtgagaaatccataacgggagtagctgtgttgtactttgcgaaagcatcttctgggttcaccattgaatcgtagttttcaagagaacgagtggaataataagggtgttaatcgacgggtcttatgagatatacaatagcatggatataacgtcgctctggatcaagagactcactttctggtgaactttcgtccgtcgcccggacccaatgggataagaacaagccgtcttcctctcgtttggtgggtgtgaacgatttccattccctatgatggtcgcagtagcaagtcaccatatatgattgcacatcgaaaaggatgagaaacatgatcccgcaaacgcgtccgagagaccaatcgattggatctcgagagaacacccaaaagatcaaccgggagaagagaaaggaatcattcagactgaccatctagagcctttcttgcgagctttcggtctttctttaaggttaatcttggagggaccgatattggaggcctgtatacttggtgcgctatccccgatgagcgcgaagacttctctcgaaggaccttctatccgtgacctggatgagctagccgaaagcaacgatgatgggtgagatggtgccatcatcggtttcctgtacgcgttgttcgaggcagctcctggctgaggttgagcctgagtctgagccatggtttcaacagttgactgatggatgaatggatggatggatgaatggtcggcggtcggatgatggatgatgaacggagttgttgatatcatatagaaaactggatatttccttattacgttttctaacgaccgactacaaaaaattctcttttacacaaataccattcaccaccaccctcggtaacatcaagagcatcgattatcatggctcctccgtcatcatcatctgccgcttccaggaaaggaaaaggaaaaggaaagccagatgcaggttattcatcaagaccccaaactcagaaccaaccaccaaagaaacgcgggtttcaggttggtccaaagaacgctccgaaggacgcatacctcgggaaaggttcgtcctccatcgagttctctctttattctttttgtttcgtgcaaagactgctctatatccgagacgaatacgatattgatacaaacgtgcgataacaaaaacagctcaaaagattaaggcaaacttgattgcgaacgcgaagacgaagcgactctatgccaagacacttaaacaggaaggccttgaatctgagcgactcaatagacggcccagacgtgaaggacgactcgctgatggcaccgccgacgatatggttcctgacgataaagaggaggtcgagttcgatgcggctcccgtttcagatgaagaagcggacgatgctcaagagacagccaagaaagtgggagacgtcccgcctccactcggattctccacgcccgatatcattctacccccatcctctttgtcgtcgtcgtcgtcacgccagaagaacggatatgtccccaatactcgtcgtcctcaacaaatgtcctcagactcattcccttcaaggccagcaccgtcatcgactgccactgttggacaggcgcaaacgagagaggataggaggagagccagccgaccggcgccggatgcaaagggcaagcagcgacagcctcggatgggtgacaaaatggattctctactaggaaagattaggaagggaatgtcatgaacagtttgagatcctcagttctagctgcatggtgctgtatgcgtgagaggcggcaacatagcctcttctgatgacacgacatgacgagaacaagattcgaaacaaccacattacccaaatccacttctctgaaaacctttctaattagagaaaacatttttataaactgttctctctcccaaccaggctcactgcctcactcgcagctctagcgacctcctgaacctcagcttccttcatgatctcttttgccgacttttgtcttgcctcttgtttcttctttttctctccaccctcagcattgttacccttgtcagctctagcagcggccttcttggcctttttgtcctttttgttggagggtttggactcgccttgctcgacagcctggatagattcttcaacaccgacttcaacgtctgcgtacagagctgagatcgctttgctgttgataccattaacgtcgtcagataagaatcgaaagcgaatggaatcatgttcagatgcccataacgtatgaaattagatataaaaaagggaaaaagaaagagaggacaaacttgtagtgactgagtttccacatcgacccgataggaattgagatcatatctaatgcgagcccaacgttttgagatttgtggaatgtttcttctatgactgatgctccttcccgagagggcggcatggtcaatctttggagtttcacgatgatcattatcgttccagagtgcagagccaagagataatggtcagatatgagggttgtattttgaaaagtagaagagacatacttgatatccttggggtatcgttgagagaaatgggtgagcagaatattctgcgccctcattctagtcgaacaacaccaaaccgacatccatcagtcattttctacgatcaaactaggaagaaagcagaacaggaccagaaagaaagaaggagacatactgtcttccaatattgatcgcctgggcaaacgtactatgccccttagatttcgccacctccgcccagatcttttcattcggtgagggcaagccgttctcctctgcaaactttctagctttcatgatccgctcgacctctcccggctcatcatcgcatatggtagcttcatggatgagtagcgtagcatcatggccggctatggcaaagtctcgacacggttttgtatcacctgaatagctgtatcctcaacaagaatgacacaagaaaggaggtaaaagagaacttattagagaaaccaaccttcaagaaagatcaaaggggaagagaagagctatgaggagaccaacgcaattttccatccgtctcgatgagtgatgacaattccatagcagtttgtgcctgcatgttcgaccttgacggtattgaccttcttcaagccaagggcttcttcaagttgggccatgtttgaattagacgcatgttcacgttgtctatgatcacacagtttatcaaacagtacgaggaatcaggactcgattgaaaaaaatcgtggttgttgttgtctgatattatcatcagttaagaggcgagaactcacgactctttccataaggcaatctttcggttatcgataaacttgacattctgcaggccaagttcttcaaagtactgaagctctttcaattgaaactgaattctatctggacagacgatgaacaacggtggcggcttgggatatatctgttttggggttgtcaagtatcacgttagtcatgcgaggccgtttcgctgtcttcaactcgacagaaggtgtttagaaaaacatacttgtgttcggaacctcagtagtctagctaaaccaaggtggtggtcggcgtgcaaatgactaataaagatcatcctcaactctctcattacctttacgattcttggcaagtctatatcttcgtcttcaatctctttttgctcaggtcgatcgtttcccgaaagtttctcgcgagcaggagaggggggagatgtttgatccgtgttgatgtcttcatcgggaacaaacgcatccccaaaaagacgagagagttggccgagcgtgccctcacctgtgtcgaggaggatgccaccataaccggggatatggatatgggtggagctcactacggtttgcgcacgaccaacgtacatatgaacagaccacgaaccagaacaccgccaaaggaggtacaacaacaaaaactgattagataccggccaggaacgaacgtaaagaacaggtagagcaagaaagaacataccgtttcgatactttgaaggcatactacttcctgtacccaggggtgaaaccactacgtcgtctcccggcttgccccttttgactgcctttcctttcccactgttcgaattctcctcctctttgtttccgtcccttccgatagactctacccaaatctcttcttttgcctgtttcacctctttaatgaactcgggattttcctttcctactctatcctcgagtcgctcaggagtgagcgcattgagtctctctgcttcggctgagggaaggcttattcggccaggtggctcacggggggtgatcgagatcgtttgacctggaatcatcggatgatgattatgaggtacttttggagcaaagcaaagaagacagaagaggcagcgatcatagaatcagtaatctttggttgaagcaattcagatctaatgtaaccaaagtaaaggatgagagtgatcgatacacacaagccggccatttcttccttgaagcagagacctgtctcttgtatatttgtggatcgagcaaggaaagcgctgctgacgaggtagctgctgaatagtagttgaggtggttaccgacaatggaaggatcccctgtgatatgctacattggcagatgtgttacttggattagctttgaccgttcggacgagaagggaagaagaaagacgaagggaaacagacaaggaggaagagaaacaaagtgacgtacatgaacgtgaggaccaaacttcttcatccactcctgatatttctcattctctggccaggttccctccctgtgccagattacatgaaccggccagattccatcatctggatgaggagattgatacctcatccaaaacaggttgtccaccaggccatcgatgtattcctccgatggacagtcgatgatcaacgtggcctgtgaggcggcgtcatttttgataagaaacaaatgaagagacaaatagagttaatgacatgtagaagaaagagcgaatgattgacagagaaacacggatggagcagaaaggaaaacgcacactactcctgatatcagggccgagacattggtcgctcgtcactctccttccgtccacttcgacctgaccctcgttgatcagcactgcccgtttgagtatcggaactcctagtgcatctgctttgttcacatcaaactttcctctcttgctcggtcctagaatgacatagctcacgcgcgctccatgactctcgacaggtggcagtttctgataaaattgctgaggatctgacgctttccgagcgtgcccttctgccaagggggtttcggcgggggggccaggaatggtatttgaaggaaacattcgattgatgatgttcttttggacggcgtaggtatacataagtccgactggtgagaacgggtcggagagatgttgaagtctcgaccaacgctccttgtgttttcgaggtgcatcagaaagaacctctttgcttttagactccgtggacgactgagattgggatcgcttgcgtttcgatcgggtagaggaagataaattgtagggctcgctgggaacaaattcttcggcaaagttgggaacaaaatgttgccagtctggattgagactctgtttaaaggattccgaccaaggcgaggttgaagcggtgttgttgccagaggcagaagcagacagatcgagaggtggtggagacggagcatcatcatcagagccgtcgctcgtcgctggcgacatcggcggagccgaaggtgccttgctgggcacgttcaccggaatggcatacgcagagatcagaccatcctggtagattggagatcgatgggcagacggcgcggtgatcgaggtctcaatcacggtcagtttgaggtccggtctacaaggcgatcacgaaaagattagtccggatcgtaaatgaagtgtgtcaagcaaggagaaaggaaccgaccgattgaagaatcccctcatactggctacatagtacgtcaggttccgcggaccaactagggtgatgtccttcactcctcgttcgaccacggtgaagagcatacctgaatcgggcaaagcatgagggcaacggcaatgaaacaagacaagagtctcagttggcatactcgacatatttacacaagagaaagcgaatcaagggcacacctggtaaacctcctatggcatcgattgtaagactggtgacaaagataactttcgtgttccgaagaccgatgttaagctgattggtgagtctctgggtaccttctggcacattgaacaagtactttgatgacggaaactggatcaacgccgacggttcggaatccgccgtgagagaagcgatcgtctgaaagttgtaggccatcgagcttgacgtgccaggatacgaatgagttgacttttgagaagcagagatctgaccggtagcggccagggagcgtgtttcgcttttcgatcgaccttggactgtactaggcctgttatcgatgacgacctggatgggctttaactgaactttcgtagacttgtctatattacggaggatgcctttgatcttcttgtcggactgtttcctctcagatgacaccgatttcaatgatctctgtccaagcactagcctagcaaggggggtcggccgatagaatgagaagagtaaggacctaatggccggcaaagaatgctttgtggaaggactcgtcaaggagagtgtgagggttgatacctctgggtgttggacgggatggtggcgaaaaaatatcaggacgcctgatcgaagcgactacggagatttctattgcttgaggaaaaagcattagggaaatcgtcaacaagtttttgtattcggtctcaggaatgtactacaaaactccctattatagatttgtagtcttcctgaaagctgtactttctgcctttctttcctaatggcccattaggaaattgtgagaaattttctaatacattcttttcgcctcatttgcttcttcttttcttccttccctcttgcaagctctcttctctctttcaaccacatacatccctcgatcttcccagtttcttatgagcactcccatcaccagcagcaaagtggacggtgagtttgagtttttcgtcttcctggcttgttgtcttgtgtcgagccctcttggtttccttctttgtgggatacctggcctcttttttttttcccttctcttctgtttgcctggtcctgttgtttctttcatggacaatttcctttttgtatagcagcatcctatgcttctctgcacgctcggtgcaaatacacttctctttggaacatagcagctcaatcatcctttatgttcttcttcatctcataatcatcagacaccatcaaaaaatccgcaaaggcggctacggcagacaagaaggcgcctagtgcgcccaaggtctcaacccctttgaatctcgccagcaaaggtaaggccatttgtgaagctgtttttcagctcgttttcagtcaagccggcagagttgagcttacagtgttgttccgtctgtttctcttgccttccttctctatgatcccttatgttccttattcaaaaagatcctttcgacgatgatttcgacgatgagactgagaaggtgaccaacgatgctcccggtggcaacaaggtccacattcgttagtgctctccttctttctgctttcgcaactctttttcctggggatagcacttgttttgacaagtgaaatcctcctctgtctcgttactatcaacaggaattcaacagcgaaacggtcgaaagaccttgacaactcttcagggactcgacaaaaagttcgaccccaagaagatccttaaggccttcaagaaggtcagactttcccatatcatctcaacttcatatcatttcccttatcagacaagacactgaccttgtttcgatctatctttcgcgttcaccatcgaactcgcaggagtttgcctgcaacggaactgtggtcgaggatgaggaagccggtcaggtcatccagctccagggagaccagcgactcaagattcgacagttccttgtcgagtctgagctcttcaccgagaaagaggccaaggcgcagatccagatccacggtcactaaactctcagcgtgtttgtctgtgcagatgtaatgatgagagggtagatgtgcatgcggcggggaggaggtctgagagtcactttgtatagcagaacgtttgacggatgagactggttgtagcataggcctttgtctttttctcgtcgtgttctcttctatattgtgtgtgcgtatctcggtttgtgcgtgtgtgtcagaggggttgagtgtgcatagttgtgtggatggtagtgttctgtttgttttcatgtctatcgatttaatctctatctcatttccattcgagaacgctccgccagctacacatcctcttctctctgatttgagcatcacctaagcctatgctgcctctctggataaaacaagaatactgatacgatggatgcccaacacggaagaccggatctgaacaggttggggagtatttgggaaatctgccgaatccattagagatttcaaacaagaatttgtagtgtcaaactccagcgttctttttgcccccatctcattttcatttgttcccaccccctttcgtctatcaaccatcatctatctctttcgttctctccattggatcttgttcatccatccatccatccgtacatacatccccactgcacaatcagtatagtctgaatcatgtccatccctttggcagtggctcggacgaatatgatcgtcgtcgggacaaactcgactcgattctttagctcgtccagctctcaacaggcacctcctcgagctaaacccagaacaagtcctttcgtctttggcaagaagccttcgagctctccttcctcttcctctactgcatttaaatcagctggaaaacctgggtcagcctcaagcggtcctcctccgatgatgaccaaggctggaggctacaccgccaagatcattaccagggaatcccttcctgctatcgccgcaaagaatagggcttccaccgcagaaaaagttccgatgtcaaaggctccagcgaaaaagtcttctagaccgagctccaagccggttgcctcaacctcgtatatttctcctcaggctatcgctcaatcaggtgccggaggcttcggcttggcaggttctactccttcagccgatggtgcagacgaacacagaaagacccggcaggagatcgacaatttcttcaagaccatgcacggctttactcctaattccgtcaactatcgacttccggccagttgtctccgagtgaccaaccttggagtcaaggtcagcggtgagggcatcaaagacgcgttcggaacgtacggttcggtcgaacaaatcaggtttccaccgacgttgaccgacgcgtacgtgatgttcacgtccgagaaggacgccatcggttcgctcaaagcactcaacgacaagaccaccgaacttgccagatctctctctgagcgtctgcccaggatcgatcctaatgacccgccgcctgcacccaggtatcatccggatggaactccaaagaaggtgttcaatggacccaggatggccagagccgagatcggaaattttgagcgagaactctctgggttcaagaagatcaatatcgtcaaagagtttcagaggactaagaaacgaataatggtcgttcacgtgggcgatcactgggccgtcagacacaagagtgagatgctcgatatgttcggagagtacggtgaagtccaggcagttcagcctgctgtcaatggcaggcgagcctcggtgagtcctgagctccatagcattatctttctcttcaactgcattcgacaccgagcggactctgatctcatcatctgtctgtttcttcttttttcccctcgaatatattgaaaacacctttgcaaacaacgttaggttatcttcgcaaatgccgatgatgccgaggcctgcatcactgatctagacggaaaggccgtttcaggagaacatcatggcccactctgcgtcaaggcgtgcgctcctttcaattctgatcgttactttcatgtttagagaccatatttgctgacatcctttgtgggcgaacatgtctttgaatagctcctctgaggaacttgaagatgcccttgccaagaaggcactgacggcagagcagagaggttaccttgagcttgattcgttccaccacattcttgatctgaggagccccctccctatctcggaattggtagcgatcagaagtgcgatcaagacgttggaagagaatggctgtcctgaaaacgtggccgatgatatcttcaagcacactgataaagcccgatggggagagttctgcagagattgttcgtttctttttctcttcttcgtcattcctctattctggctaactgatgttctggttcttatcgatcagttgttggcaaccggatgatgtcctatcttctacgacgagtatcccagccaaggcaggctgagctcgtctcgttcatgcttgcggatttcctccctctgtcaactcatgactctgccaatcatgtcatccaggctttggtcaaggttttggttagaggggatgaaggaagggcagtagttagggagtacatcaataacaacatggcggagctgctgtcgaacaggaacggaaactacctgggttcgcttatctcttgctgtgtattctctttggtaaatttgctgctagaaggatacatctgacacacgtttacatactttctttcttacaaagtctctttggctggtattcactttgaggacaaccgtgagcatcgtttgcctattcttcgattcgactttacgagtcgatcatcatcttgtgttcgagtatattcatagggctgaacggtttcttgttcatgttttctcattcttcctgcccgatgatagacttcgttcttgacactttggtcaaagcgccaagcgaggggtaagatttcatctttatctggtttcactgtccttgactcttaggaaacaacgtcttcctttgactaacttgtttcctctggaaaaatctacatcgtcacaaagatacacgcctggagtgattgctcggctgttggtggatgatcatgttaaccatgaaacaaaggtctgttttcggtcttatgtgtcgataacattcacaaggacattcgctcattcaatgtttgtttgcgtatcagaccatgttgattgatcttgtattggatactgcaaaagacttggtgcacaaccaccccaaaacggcaccccttggcttgacttgggtccttgtacgttgcgcttccctctttcggtatgctcttcctacgtgagatccgtcaacctaatcaaattacccttaaacagaataacaacacaacttcttacgacctcagcctgaaggccaaagtcaacgctgtcgcctcaatttataagggccatttggaggacttgttgctgaacggaaactttgagcacatgagagttctttgggcacttttgcatcaaagagtttcagtcgacgtcgtccggcagatccagaccgagctcttggaggagggtgttttgcgacggctccttcaagacaagactggtcaaaacttccttcgaggttacttcgcctccgatggtcttcagtcgaccgagaaagtcgctctgatgaaagctacccagacggctttggagatggttggagaggatacccgatcagacgctgcgttccatcacatctactacgctatggacaacatcgaggctgatcttttgaggaggggcttgtagacggctagatcctccagctttctttgtttctagaccttcgactttccgttgtgtatctcgatttggtccagcgtgtttgacgtgaatttatccggctttccgcctatctctcctctttctttattttcaaccttgtcttctcttctgtttggtatttgatatcttgtgaatcaatacgtctcgcttctatagataagagaatggagagaacaggctacaccttccctcttccatgttttttttcttcttgaaaatttttcttattctttttgggttttgtttgcgatttcttttgtttctcctagtctcttggttccagttccaggtggatatgcaatgatcgtgcttcaaaagaacatgattcgggtcagagacacaactgggaagacagaagaatgaagagagacgcgccggtaaacgccgctgatttccttgatttttgtgatttgtctcttcgtttcgttcttcctagaccatctctttctctccgtcatcacatcatcgacatattcaataccttacagacatcccggtctctctttcgacagggattagaacatctctccagacggcaaatttcgaatccctttgaaggaaacttggcgtattgagttcagaataatcaagtagggatcgagtatcgagaagtacacgacatcttttagcccataggcgaccgaactacaacaagtcatcgacctcaagatttgatcaccgcccactgtatctacttgataggtggagcacaagagagaaagaaaagaagatcagagtaatcatgcagactcaagatatagcaattctaggactgatctatctgatctatccgaatccgaaccttcctaggcagagcatgcctttcaccgaccatcctctccccggcccgggttccggttttagttctgattttggatacggatctgacaaacacgggaaagggaaagaggatgagaatggaaagtcaggaactgggttggtcgggaaggtcggactagtaatcttgagagagtgcttggacgtatgtctttcttcgtttcatccgtttgtacgcgtgtgtgctcacttttgacgattcatttcggcgcttttggtatcatgattcctgactgtcattctgtacgatatacggggtcgtgaagccatcagaagatctgatgctttcagagcttgaggaagagatcatgtcgtttcagccatttgaagaatctgccaggttatgccggaacttgaaagatgtcgttcgttagcattactcaaatccaccgttccttctctgatggttgacctgatcgaaagttaacctcgaaatccttttgggggggggagggggtttagattgatgttttgcagaacccttggcatatcgaagagtttttcaagaacatgaacagcttgttgaatcgaaaggatgatgaagtaagtgttctcttcaccttcccccacaagccttcgtctgatcatgattgatctgctactttctggaaaccgaaaaagcacacgatcgtatcctcattcgtgatcgagcgaaaatcacctataggccaattcattcgtcgctgttgtctttcgttctcgaaattaacgttcgaaggtgtcagcaaacttcaatggcaaattgctcgatggcaagctcaagggatgggttccagctgggaaacggacgagaacattgcacaagcttgtgagcctatgctatcttccattgttttgacggtgagatagaaactgatattcattgagttctctggggggtcatacctgatcatagcctcatttgaggttaaatctctagacgatacactagaagcccgaaccaaagcctttgccaggtacagccagcatctatttttactgcctttcttcgcttcaaggatccttctcacgccgagcacgaagggttttcctcttgttcaaaatgtttcagttatcaatcatcaatagcctcgggagattacacaaaggctttgaacgcactcaacacgttcttcggtcatcagtttccgagacaaaacaggtcagtttcttgtcgttgtagatgttctttgcccttcgcaactgaactaattgccttccatctgtatgtatactggacccatctggggtattcgtgaatcgctagaggtcttcatcagcacgtcttgttgaacttggcaagctttcattcgagcgcagaggaatatcctgctgctagacgggtaaatgcgtcctttcttttgcattttcttgatttgcctgtcagcaacatctcttaatgatgcctatatttctcgctcgctcggttttcagtatttagaagagagtatcaagatctctcgttccgcaggggataaaagttgtttggccagctgcatgtcgtccgttcagatctcagccgttctctaaaccaccagaagactcgattgttcgttatctaattctggtctctatctaaatctcgatctagcctactacgcaagttgaatgtctcgcaatcgacgcttgagctaggtcaaataccacagatccaacttgagccagaggatttcgaaaagttgtctgcaatggatcagctatgggaattgagatatcacatctcgctagtgagtcatcttttttcaatccagtactcggaacgaaaactcgagttctccgagatgacgctgacttttgcgttttgacgttttgcaaaaacacaagggcgaacctgtgaccgagatctatcataaactatatcgttccaaagctcgatcaatcgtcgaaactcatccgagcacttctacttctacttccaacccgatatcgactgattcaaccgatccgaactcatcctcttccaatatcaatggcgatgactcatctagcgtgatcccggcgctcgtcgatctatacacgtgggactcgactgaacgtctactatggtctctcttgggtgaagaaacattgagtgtgctccgggaagatctcgttcttcaagatccatcaggcggtagatcagtagatgatcgcttgagctgtatatgcagtcgagccatcaggatagccagagcaggtcaaaccgattgtagtctctcttggttatttgacggaaagagatcaatacccagtgcgatggccacgttagagacgtataaggtttgggcgaggacagtgtttgaggtgttagatttggaagcgacaagaaaaggccaagagagagtgagaaggctcatcagtaagatggcgggcggcgaccgaagtgattcgaaaaaagtagaaggagataccaatttgggtgtaggcatggagggtaataacaaatggggatgggtagaagagcgactcgccatagggagcggaggagaacggatcgagaggctcgtcaaacaagctagggagatgaaggtttgtcttcccatattttgttgaccttgtctcttaagcatacattacattccgagattttgaatctgaagctaacaaacctgacatccggtctctacgtacgaatcgaaacagacgacatgtcagccaacctcgacgctacctccgttgctacaagcacttgagattgcccgttctcaaaacttgcacggtttacatcgcttactcattgttcttctagccgatgtacacattgatttggatgaaccccgacggggactcgagctgattgacgaggtctttccgaaagtcagtcttcgtcttttgccgttcaatcttcaaccggtcaaccttactcattttgtttctgctttctgtcaccccctctgcgtccgattgcttgttactctacagatcttgatcacttcggacaaagagcttcaagcatatgctttcctgacaagggctcgctgtctgatcacatcttatttcctgcctgtttcctctccctctcgctcacttgcttgtaagtctattccttcacgttgaaatctctggtcttgtgctttccttcgcagacttcttcctcatcaaacactcccgcttctctttctctctctcttacaaataattttttcttccaaaccgcagcgccgagtccagatattctggaccatctgagttcagctagccagatctatcaaactatcaacgcctattcttttgccctcgagacccttcaacttcaggcggtatttctggaccggttaggtcaagagattgagcgagatgaggttagcgaaagcttttgtcgagtcaaggccgagtgggagtctttcagggaaggagaaggactcgagagagatttgaaaagggtaaagaaggtagcagctgcagtgggtcaggtgagtgttgcgattgctggaaggagcggtcgttgaggattaggaagtttggggggaaaggaaaagaatagcatcgggtaggaagcagacagtaggctagatgtcaaatcagatatatgtggttcatttactcgattggtctaaaaagtcgcgaagactatgagtgagttcctttaagaccggatactgttccagtccattgtgagaacgaatattcattacatctggggaccgagaggaagagaagaagtggtgagagtagtagttttctttgatggaattctcttctacggtaacggtatgttggcccgcctcttgagttttgcaagttgaagaagatgatagttgatgtttctagatcgatccgagttgtacgatgcaagcagatatacgcatacgtatacaggatggaagcatcaaaagcagattcgttagaaccagttaagacatcaatcgacgccatccgcgggcattcaatagatagttagcgaggtagaaagagagaacgcacgattttggtgctttactcattttaggctacgatcagtcatgacaatcaagaatatatcagtaagtacgctttattatctcctccgtttattcttgagaacaaagatcaacagaatacatacagcagtcttgagacattccacaagcgctttcgaactctgtgcacactctgcttgacttctcagatctcccttggcagcccagcatgagagcatggtagcaaactgaacagcacatgctccgtgaaaatcggctgcaggtcagaaatcagcaatcgggatgtgtacaggttggttcgtgaggccaggatgagtcggtgggtgcgggtgattcgtgaaagagagtattgaagttacgtaggtatcagcttgatatgtatgaattggacttaaaaaaatggcataaaaggaagctcaaagagccaaacgaaccggcctttgccctgactcgaagagtcttgatcttgctgttagacgacatctctgagagctctgaggatctattgaagacagacaacggaggatgcgagacagatgagagaaaggtgagagaaggtgagaaggtagagaagcccacgacatggctttggttacgggtatcacaaaacgcacgcgtaaccacttttattttgatattttggcctccctccgagaagaaaaaagaaagtgagagaaaaccaaacccctcttttttttttctctcctgctccttttttcttgttctcttcataactttcagctctcttatccatccaaaccccatcaggcgccaggtcgttttcgttaggtaagccttggtgtttcccaccgtcgtacatatcgtcagaatgcctggcgcacgagcgcaagtgctcgcaagaccaggctttcgagctgaacatggttttctagactgatacgaaaccctcaattctcaacataattttcagaagtacaacctttcactaatttggaattcaagatggccaagaagaagacgtccaacaacaaacacaagaacaagatggccaaggtcgccggcgctactgccgctgtcgatgctactgccactactaccgacgaaaccagtgccgttgtcgaggactcggtcgttgaggagtccgaggtcattgctgaggcccagcctgagaccattgaaaccgttcaggttgagaccgttcagtctactgaggagggtgtgtatttgacaaactctttcttgccagatatcctttatcattcttcaaagctaacaggctttctgtggtctcctgttctctcttctgttatggctgttttcatttagttgtttctcaaccggcagctgtcgagtctgtccccgaagtcatcgctgtggaagaacctcttggtgcccctatcgagtctacacctactgctgaggagcttgagtctatcatcgatgaacacaagcaggcttcctccgtccaggtgtctgaggtccaacccgaggtcccgaccgagcctgttgtcgttcaggagagcgctgttgtcatggaggctattcctgttgacgcttccctcgctcgagagctcgaagccatcgttgatgaccacaaggtcggttctgcctcggtttctgtctcagacgttgttccagagacagaaagctcggctgttacctctgaggagcctgtcgaggagtctgttgctttcgcattgaactctgttgttgacgaccacaaagagaagtctgcttctgttgtctccgtcaacgaagtctcgaaccaagatcaggaggagacctcaattgccgctgttgatgaggagcccgttgaggagtctgtcgctcttgcattgaactcgatcgtcgacgaccacaagggcaagtcttcctctatcgtttccgtcaacgaggttgccgtcgatgaccgagaggagagctcagccgtcgtcaatgaggagcctgttgatgcctctgttgccctcgcgctcaacactgttgttgatgatcacaaaggaaaagccccgtctgtcgtgtctgtcactgaggtttccaacgaagagcctgaacaggacaccgctgctgtcgacccttctaccgcgctcgcattgaacaccattgttgatgatcacaagcagaagaacgttgcgtctaccgtgtccgtcaacgaggttccggctgaggaagagcagcagcagagggagaatgagaccaccgagcctctagacgtttcggtcgccctcgcgctcaacactgtcgttgatgatcacaagggaaaggctacttctactgttgctgtcgaggaagtttcgaatgaagagcaggaagagacctcgactgttgctcccgaagagcctgtcgaggagtctgttgccctcgcgttgaactctgttgtcgatgatcacaaggaaaagtccgcctctgtcgtgtctgttaacgaagtcgtcgagacggaggagacaaaggaagttgttgagacaccggttgagcctgttttcgcccaagaattagaggccattgttgactctcacaaggaagcttccactgtgtctgttgctgaggtcgccgccgagattgttgccgaggtcgtcgcggagaagaagcaggacgaggtcgttgctcctgtctccgctcgggaggttgtccacgatgagcctatcactactgccgctgttgccgagcctgttgacgcagcccccgccgccgaggacatctctttcgaagaggtcaaggccgaggatgtgaacgaggctgagagtgacatgaagaaggattgggtcgaccttgctctgaacagagaactcgaggcgatcgtcgacagcgagaaggagaacaaggcggacgtccaagtccaagaagtcgctccggaggagcagagtggtatgtgtattctctgtattctctttgcttctaaggttctcatgcacctcgactgactggttgaaacaccatctgtacgtttacccagctcccatccctgtgatcaccaacaaccttgccagcgttgaggcagagaacgtcaaccggtcgattgaagagtctgaggtggctacccccgtggtttcggaaaccgttatcaaccaggtatgttgccgataattctttgctctttgattctctatctttctttctttccatatcgccatctgcccccttgtgtgtccaactggattgcatccttgagtcccacaatgattcttctctccacattcacttgaatgtatcaaatccccatcgacaaacataatgaaagacaaagaggctgatgaaaacatacattccccctgcggatggatggtcgtaccaatgaaaggtcgcgaccgaggaggaagctttcgtggctgcacccaccgccactgctgcggacgaggaggaggcggtgaaggtgacttcctcggacaccgtcaagaacgatgagctcgtcaacccggctgaaggtgtcatggacgggaaggtgaccgaaagccaagaggaagatgttgtcgtctctaaaaagaacaaggtgctctccggttctcttctcgccgtcgctgttgctaccatccttctgccgtacctcttctagaacacaaagaacacaaactgcatcccgtttccttcttcttcgtcgttgtctcttcatctttctttcttctctaaacaaatcacaacacaacccgcgcacacacacatctctcatttcctcggactcaatcaatctagttaacgcatctccttttttttcttcgttctaccctcttgtccttgtcgtttggttccgtgtttccatccaatcttcatcccgtccttgcattcccatctattcatccaccttcatcatccgtttacacgctgtccgtaatgtcattcgaacagatcaatgctaccaacagagatactcacgtgccgcttgattgtgagagagtctctcgtctctcttctgttggtatctgacctcaaccatgggaaactgacccggctgctttctcttctgtctttttctttttttccaatcttaccttcttagtgggactcggagctcctatcgaacatggtaggctcctctgtctctggcttctcgtcctctgtctctacttgaatactcacctcagtcaagctaacaaacatgctaaccaacgttttgctgatctgtcctcactgctgtctttgataaatgacaaagcatctcaaatctccaagcctccgtctgttgtgactaaccatgaatggaacctcaagaacctctcatggcctgatcccagagtccgaggaatccgacgagatgtcaagatcatctgtcaagttcgtaaccctgtctttccaagcctgactgatcccaccttaccttgtagttttctttcttcgtttactcatatccgattcacatcatccacacattagaacatcaacgggccttgctcgttaatctcgttgtgcaacgtgttgatccttagaggatctatccacatcgatccttccaagtcaaccgtcgactagtgagtctcttatagagatttgaagacagtcagcgctctttcgacacattctgatctatagactggttttttacattaaaaaaacagcgattacttatcctcgttgagtaagtctgtggttctccaactttttccgcatttcgtttttttctagccgataagaagagacttcgatctgacggcagatgatggttgaatcttgatcacagttggggacttcttggtcgagaggccccagagctcttctaccctcagcctcgagtctgctctctcgatcttgcctacaactgtccatggtctttctggtaagaagattgatttgtttccattcatgggaggctacgcatgcagttacaacgactcacttatcctccctgacttttcgccattcctatctgtcatatccgaattgcacagtcaacccttcgttcaaggcggtcggctcattctctcgagagaacgacgctggagaactcgccttgttcgagctctgcggtgttcggttgacccacggttgggtagtcgacccggagaacgctcgagagattgagattctcggacaggttgacacttacgatgccgctcaaacccttttggtcgagggatcaattgctcagtccgagttgagccaaggtggaaagaactctgaggagctggagaagaagattcaggaaggtgcgtccataccctcactttctgttactatcgtattgatagttgattgtaaatttgacaagattatctgtgcactttatcattaaaaagctgcggtcgttaaagagttcttgaataacacgcagacccagttgacagtttctggtctctttggcttgtctgagtctctttcatcgggggagatcgtcgctgtaagtttcatgttacggttgtgtatgaagtggaatcatcaatctgacatagtctgctcgttctcactctcggttttattctacttcacttcacagcttttccgaaactcgcacctctctgtgctttacaagcgacctgcctcggctactgatcccaacgagcctttgctgtactctctcgtcaccgatgactccttcaagaatgagcccgaggtagacactttccgatcacgtccttgcttctgatagctcgtttcaacgttgaaaccgaataaacgctcacctcaattaaaccctctctgctttttctcgcacagatcgtctgggagtccctcgaggacgtccagggaacgtccactggatacgtcaattccgagttccgcccgtcgtccgctgctggaggagatgttgctggtctatctgccgaggctgcttacagaattaaccagggacaggaggatggaactgacgagtgagtcattgatctctccttcaagtcccttcttcactttctcctcttgcccccgagctaatgatctcttgttgaatcttgcctcacagttacgaccaacagctcgctcgacagctccaatcggaggaggacgaagcctcggctcgacaattcattgaccgaccttcctccaaccaagcctctgccgttgctcttgacactactcgtgcacctgcccctactactgctcctgaggtcggtgaggcgcccacggtggaagcctctcagaaagcgtcgtcaggaaaggagaagaaggacaaggaaaagccgaagggaaagaagtgcatcatcatgtgaacgacatgacgatgcgcacctctcctctttctttcttccttctttcttcttgatcttttctccctcttcctctggctctttggttcttgctttcatcaggttcatctccttcgattttttcttccttcctagaacctagatctctacatccaccttactatctttgtcttctcttgcccgtccctccataagtaacgtattcatgatgtcctcttcctctgtttagttcgtatgtctccttgtctgtctctcaacttttctcaaagacactcctggtgttgtcgtgtcttcactgagttctcatgtttagcgtcaggcaaggagaacaatgaagttaaagaaaaacaaatacgctttcatgcttattatttggaatgctcggaaaaaggacatccagaggtacaaatatgaactaatgaaagaagtaggaaaccaaactgacacacacacacacatacatacgcgcagggagggaattgttcgaaactagaaacctcaaaaaatcaccttctcactccgtcttgaacaactctccgatctcctccggctcaacgcccggctgatcccagaacgattgtccgataggtttacccagtcccgtggattctccataggcagaagtatgggacgagccgccgatcgtggtcgtgggggtggatcgaacgtggccgctgctcttaaggaagtttgctcggacggtcttctgggttgctcgaacagatcgttgtcttttttatttgtttgttcgtttgtttgtttgttttcccatcgatggaggaaaagaaaggatcagtaaaagcgcaaggataatgtggaaacatgggcagcatggaatgatgacagaggtaatcaaagacatactgctgagagccttcccaaaagatctgatttaacaggtacctgaccacagtcctagtgaacaagaacagatgactcgctccaaaggccaccaagatcaaaggaaacactgtacccgagatcgaggggttttggaccttatctgtcggcgaatatgctgggttaaggtatcccagagcatcagtcgtgaaagacctgaacctagacccagggttgaagagtaaagcaagagtagaattggtgaacgatgacatccaagcaatgaacgtcaacgcctcgagccatggtccgacggatgaaactctgtaagacgagccaaatagatgtcgagagttgatattctgattgaaagaagatccgaatcgtgaataagatcgagtacgtaccgagacggaataggtctcttgacgtttaagcagatcttgagagcatctgaacgaagttcaaagtagttgttgactaatgaggccatgctgataatgatcgtttcgtttccgaggtcaatttcaaaaaaggttcatgttcagaactcatcacgcccaagagagtcgaaaacacttcgaagaacttacctggcaagaggccaacagatggaccaaaggcaaacgtatccgaattgggttacaagctcggaataatcggctgccaaagcgtggtatgtgatcagccagaactcaatatatatatataccgtgcgataatcaatcgaagaaaacgacatactgaatgtcgtgtattcgggcagagcagcctctttttcaatcttttgcaacaatttagcctcttcaggatcggcagcaaaggcggaggtcttttcagaagcggatccagccggttgcttctccccactcttccattcggcgtactttctcagaaggatgggcaagcctagttctgtgaaagcattgatcactatttgatcaagacgtatatgttgacagaagagatgaacaaggcgatgagtgtctgagcgctcaatcagaacgaatcaggtgaggagcagaagaagcagcaccttggttcgttaccgtaaaggcaaacatttgatcttgcagtctcgacagattgatcactcccctaccagatcgctggtgtccctggatttgtggtgttccgccttctttaaagccgtcaaccgccttctcaaccagagtagcgttctggggagtggcgaaaagggcataatcgacggtatccattactctatctccaaacggaatataacagtaagcgctaaggaaaagacccatgaaggcgacgatgctgttgagtgcactgatggatgtttttcgagaggtggtaaacgttgttaggaagacatgtcaagtatattgttccttagaagtcttcttctgtacatgtaactttgcttacaaggtctttgtcgtcagtgcgttctcgtattcttcctcggtcgcgtaatcctcccatagagtgagtttctcggcaatcgtcctgtagacagccaggatccggggtacgatgagactgaatagaatggtaggaaccataccctttttgttgatgaaccaggagaaaatacaatcgctgttagaagcaaagactgaaagaccctcgatacatgatgggaaaaaggaggaagcgcacaatgtactgcttgaacggcccgttgtacaaagatgcaatgaacgcctcaaagatgaaaagtgcagtcagaacagactgtaagccgagcaagtggatgatcagtaagggaggccatcgggaacaacatttgaagctgattagaacacaaaccaccaagaagatagcacagagccccagggccggccagctgaccgcaagaagctttccatctctcttccaccatttctcttccggggccgaggctgtgctaatcgctcggagtctaggcctcctctggatatcatgagtaccataggaataactgagcgtccgttcttcaattcgccagaattcaacaaagaacaatccccaaagggaagcgatggacccgtagatggaagaatatgggcccctgatgaagaaagtcggtatggaaagcgcagcgagaggaatgagccaccgagtgtatatcttgagaaaggtgaaatacagagcgatttgctgtccatgctataaaagtgacggtcgtagggaggacatgtaaatttcgatagctagcttggcatcccatacaagtttaggtattaaaatggccttacgttgtctagaaccaagtcggtctcagagtcttcgatggtcaatccgaccttccagtctttcttgacccaagcatccttccattgttggtcgaccatatcgtcgtgaagcgcaaagatagagaccacatgaggccaagggtacgtattggccgtctggattagaaacatgcatgtagttcagtatatggccggacatgaaaagtggtttgatcaacgaccgataagatctgagaatgaacgaacgatagccaagccgccttgctcgattgcaccggtgacaagctcatgaatcaggcgtaatctctctgcaggcttgatgggaacagtgatagaagctggttgggtggtgacgccctgaaggaagtcttgctctctgaggagaacaatgacgacgacaggaagaggccagtgagcaattgacgagaaacgatttgtcctgaagaacaacagaccaacctctcaacctctctaagctcttgaacgagatcatccttggctctaacaaggacaaacacgtctgcctcttttctgtccttttcctgtttgggcctggccctccggctcgtcacttgaagccctttggaccggagccggtcgattagcgagcgatattctgatttggaagcatctcgctgggaagaaggcgattggagtgtactctgtataggcttaggaatagaggcttgggacagaggtctcgatggagagaactggatgaccagatcaataggagggatggtcatcggtgtgattcaaagttgtcggtcgttatcaaagatgatgggatggagatggatgaaaagttggcaaagaggaaagaaacaccgcttgatctcatcacctacagcggatgacgcgtttgatcttttgcctttgcctcgtctgtctacactcaggaattgttcttatacatgtctggccatcagagactgatgaattctaatatgagatgccattttccatcttgccaccatgataaagagcctgctgagacaacggacagagagcaaaccaggagcaagacccagaggacgagcggtgagcgagtgggcgctgtcgtcatcggcggctcgacatctcgcctgcagtcttccctccactttccgttctgaccacacactcaacccatcgttcccttcgactcgtttctttgatcaagaaaccgcatgcttcttcctcggatcgctcaagcagtctctatctcttcccttactcttgcccggctcactcaagcaaccactcacaacgcccgatccgttgccggtcaccccgtttctaaagcacttttctccaccaccgctgccttcacgatgtctcgtcagttctttcttaatttatatttactggaatgtgtgttcagactgagagttaggacttcttgtttccttatgggggctaactactcttctccttgaatacatgtgcacagagcctgagcctggaagcaaaaataagcccgactctgagtggcaaatgcagctcaacaaggagcagttccgaattctgagaaacaaaggttctgctcgatcgtgatcttcctcttttctttctttctttcataagaaactgacccatcctgttcttgtgatgtgtggcttattaaaggaacggagatgcctggaagtggagagtacgacaagttctacccgtccgatggagtgtttgcctgtgcgggctgtggaactcctctctacaaggccgatcacaagttcaaatctggttgtggtcagtcccttttctttcaatccgatctacctgaggcgaagttagatcaagaagactgaacggtctcatcgatgaacacgtaggatggccttcgttttatgatgcgttccccggagcgatcacccgaacagaggaccgatcgatgttttctactcgaacagagatcacttgcaccgcttggtaagccatgccttttcgctcccccgcttctttccatctcaaggatcatgtcgtcctgaccggagttttgtgtgttgttctcgcccttgaatggaccaccgcagtggaggtcatatcggtcatgtcttcaaaggagaagggttcgatactccgactgatgaggttcgtctgtccatcatttgcgggttctgcttgtttctaattcagaagagccttcttctaaatcattcaccaatcttccacctgttcctccactctcttttcttttctttgcctttcttgaacaacttttctgaaacggcctgggttggttcttggacgaaaacagagacattgcgcgaactctgtctcgctcaagttccacaacgagaaataagagaaagcataagagtcatcggaactcctcttttcttccgctctttttttttgcttttttgtagtagccagctgggttgaagagagagaaaggaagacagagagagagagagagagaggaacggagagaaccgtgctgtatcgatatgatctgtcatacatcttggagtatgagcgcaagaagaatggaaatcgtcagatacagagcattgtctttgctcactgaccaaccgatagacggtaccagaactagaacattcaagaaacagaagcggacattatatatatactgaaaaatagcgaatcaaacacacacagagagaaaaggaaaggaagagatctggagagtcgagcacagaacaccgagtcctgtgtcatgcgtcctaccgccgaccaatcaaccgcttcatcgtcgtcgttcctacagaccctacatcgctcgccctgtcactcaacatcaacatctcctggtttttccacctatctatccgcttcttgccgaaagcggcgtaacctgtcagccaggccaggatgaggataaggaaggcgagcgcgagggtgactgatgctccgatcgctcctgtattacacagggtgaatgtacacgaacacgcgagaaagacagaagaccggtcggtaaggaaggaaattgaagggaatgagcaaaagatttcgaaaccaaagatgatgtcaagtaaagagtgaagagagaaaagaagatgaagaagaagcctctcttcaggaagacgtaccggaagctacactagatatactacagttccctcggttcgtgccgcacacaccatatgttggagttgccgaactagaagtagaggcggtagaggttccgttcgccgtggtcttggtcgaggtgacgatgttcgcacaagtgtagtctggttttgtgtatgcttctacggaaatcaacgtcaggtccgcgcactaaccgacgagaacctcggcaagatcgaaggagtcagtcagtcagtctccagggttctattcgatcaagaagaatgacaacaagatcaaggaaaaagaaatatcacctcatgataccgagtgtctgtaggaccagagtggaattctgctttaatggtgatgttatcaccgactgataatcctaaagatgttaagtcctgtttcgtgtacccagagcccgatgagagaacaggaccagcaagattcaacaaggacgaaagagaggggttcagcttccgggataagcccaagacaggaccgttggaaggagagacaaatttaaaaatacatcgaagagacatacgggagcgttccaacaagacgttccagaatacaagatcgtcgtattatccattaacggcttgaaatcgctgacgagctggggatcgtccgtggtggagtatgcccattggaaatcattggcgtctctgttctgggcggtggatagttgaccaccagaaatcggataagggatccgtcctcccggggagtatcctccgcatctaagggtggagattgtggcgcgttgagcgaggttagtgctgtatgctgacaaaagacgagtaaacaaaatcagatgtatatacgcacgggccaatggtagcagtggccagattcagtcctctcgagggctgtcagatggtgcaaaaagaagagagcgcagaaggaaagtgttatgagaacatcgattcagcttgttttcgctcaatctctgcctttgaatggaagacaatactagtgaacgttatgcgtacaggatagttcatctcaactgtcggccgtagcgccacaaaatgagacaagtaaggaaagggaaagaaaccccaaaggagaatgaacaagcaagataagtataagatcatcctgatgagcgactggcgagaggcgcccaaagaagagaaggtgcagcagaggaagaaaaagaggaactgacgaataggaacggttagggcggctcggtcgtaaagattgagcttcataccatgagccacggtcgctccgatgggaagcgctatcgacatccgtttattgaagagcatctcgatcagagaggtgtgtgtatgaccagaaaagtagaagcgtcgaggaagaacgataaaaagtctgatcaagaatgagaaacagaaacagaaacagagggacaagggagaaaacgatcgtatgcaaccgttggttgaacgggactggatgggtttttatccgaaggagcaagaaaatggagctcagcaatatctatactttttctgaaagaaccatgtcatctgtgtcataaggtacgtgaggagaggagtaaagcgacctatggggtcccttgattggtgttagcgagcaggacgtccagtcagcgatgaccatacatgaatgtaaagtagaagataccctatcgggtggtcgcagcaagcgatcgtttctgagaggttagccaagccaagcttcaaaatgagggtatcgagggagggagggaaagagaatcaagaacagatagataagacaaggagagtcgtgagtcgagccaagccgagacgagactgtgtgtatggatagatcaaactcaaaccgtcctatcaccagacttgacgcgcaaggatgaccgtccgatttctttccatattgggataggctcaaaggcaagacccaagaacgattcacgcgatggctgatgagttgggaagatgttccgggatctttgaatgatttatttgtacgaatagagtgagaagaaagcatgttgtatttcctcagcgaatcaacgacgagcaacgttaactttcggcttggcaaggtgaatacatttaccggttccaagacggacggcaggaagtcaaagaagaagaagaagaaaagaacagaagcctatagagacaaagatccacggacacgacggaacagaaagatagacacaacatcatacatatgtgagggcggtgccgagacggaaggtagctatgaggtctctccagagtgcggctgccaagcggacgaacaggtcgacgagtttatgtcgaccgaccgagcctagagaaggctttttcttgagataccagacaactagatagagaatggccgttggaggtagggcggagaggatgagaagccaactaggtctcttccggtttggtctcgacggtcctggtgagtccgaccgggtgggctgggaggtcagagaggcatgcgagggggatggcgatgccaacggggatggcagtaaggatgtcatggctgacggatggtatagcggggatttagtgtctgctgccgatgaccaaggagaaagaggtgagaaatcgaaatcatcggttctttcttcagactgtggctcatgaaccgatggagagggaggtgtgggcgcgcttagtttagatcggataatctatgttaagaatatagaaagatggacatgacaaaagtatatgaacacgtcccttaatctggacgcgaaggacgaaagaacagagaaaaactaacatccttggcaaacagattcaggcgatcatcccattctaataacctcgatgcctctgctctgccaccgataccatcgggcgcgagaatgttgagcaggtagagttgaatgaggctctgatagcctttgactgcctctgccttccaccatgtctcatctgagggttgggcgagtgtgagagcaggatcgggagcggaggcgaggctaggttgggcaagggttgtgagtatggtagggttatcgagtcggtcgaggtacggttcaacgagtgatctgatgaaggggagtggcacgtccatcgacagacctgccagagacacggtctctatcaccgatggcggcgggatcgagatggtcatacctgtgggcaaggacggggaataattatcgagaacttgatcgttcagagttcttaggaacgtcgacgcgtcggacggagtgtctcgagcgggagtatctatcatctcatccgacacggtcttttgtgggctggtctcattccacctcaaagcggaagcggtgacaaagagggacacggctcttgctctctgtctttctatgatcctctctttggagcctagttcgatggcccaggtgagtgaccgaggagtagccaactgggcgagtgtctgttggatgtactcgattgctttttgatagtctcttttgaggaagctagtttctgctcttttcagaagtgtttttggcgaggtgttcgatgatgtgggcgttggattgaggccaggagtgggagtggacgtgaacgtggacataatcataggcatgagtgctatcgtgagggcatagacaagagcgagtcaggaacggacgagctttgccggttggagatcgaaccagagatggtttgggttgtcgagattgaccggatgaaaggacattgtcacgtgaccgagacgagcgcagttgatgatcagcaggaagcagcacaaacactcgatcaacgttctagaccacgggccgagcagaacgattatcaaggttatcctccgtatcatgtgaagatgcccatgatgatgctggaggtagtgccctgtgacgtggctcaatgttttcctgcgccctgccccacaaacgcctaatcgctggtcgctgtttacggaggcttctgttttctatcggtagaattcctttcttgctcttgctcttgctcttgcccttgctcttgctcttgctcttgctcttgctctcgctctcgctctcgctctcgctctcgctctcactctcacccactcgttttcggtataatccgccgtggatggtaaggaggaaacttgcaggaatctggcccctctgttcgggccctttctttctttgctctaagtttgtccttgtttgccttcaacagccgtctcgcctaccgtccgctggctttctgttggccctctgtgggcgtgttgacgatttgctgacggccggttctttcaatgcctccccctgattttttcctttgtgtctttgtgtcttcgtgcctttgtgccctggatcttcccttgcagctgctgactgaccagatgcctgctctctgctggcccacggacgatcactgtatgctgatcgggccgggcgaaaaagaaaggaacggatttttattaatctatttattcatttctcgcttcccttgcccgtcgcctttctgttgtgccctcgatcttttctcactccctcttgttttcactctgtactcttgtctgggttcatccagttcttgacttgtctggaggaggaaaaaaccaggagagagatcaggattgtagcatacacatactctcctactctcacattcacactcaaactcacattcatactcatactcatactcacactcatactcatactcacatcatcaacagggagagagagagattgattgtcaaggaatagaaagaagaagagcgagatcacttctttcacagggtctcaaacacacacacacatacacacgcactcaaaatcgaaactcctctcgttcctcctccttctttcttaagaaacgcgattggttggtatcgatttcatcttgaccgagtggctttgctcgagcgatcttggtcttcccttccttccttctcgttctttccacccgatctgtttctttgatccttcttttcattcatttttttcttgtttggttatctgttctttggcctgacccattcttcgtcggtctcgctacattttacacctcatttgccgacctgctcgctttccctctctctctttgttctctttctccgttctcttcctctttcgtctccttgggctcttcggttttctttttctgctctgcctcgattgtactcctcacttaatccagctctaacctgcccttgaccttgaatcgatcacctttgctctctgcatagtgcgacgctctcaacacccacacccacccacttccacgctcacacacacgcacaccctccctctttcccgatggatcgcttctactctcatcccggatacctggcctctgggacaatatccagtccatatactccttatcccgccttggtatgttcaccttccaccatgctttcttcaacacaatcatcttgctatctgttctttcctccttcgaagcgaacaaagatacgcctgaatttgaaaaaaaatcccgaagagaggagcaaccatgggctgaatgaataacgttttgcatttctgatcctcggtatctttaatcccctgtccttcttctctgcctctctcctttggctctctctttgacatacatcctacgctcacctcacagaatgaccttcagcgagtctcgtcggtgaatcccaagcatggatccgaagatcaatcgaccttgttcacagtcagagtcgataatctttcccgtcaaggtgagtatctgcccgaatttgaccgcgcgccctctgtctctatctctatctcattctttgtccaatcatctttctcactcttctttactcttctgcacctcccaatgataccttcctccttgaaagcgagcgacgtgtaccttcacaacttattttcctctatcggtcagtccccagaatcttggctatctcttgtctcttgtcgtcgtcatcgtcctgtacctcattgtctcttctatccttctcttgcttcaacactcgattcctatcctctctcaaccaaacaggcgtagtcgttgctaccgaactttattttccagcgctacctatcccgacaggtcacgccaaagtttcgttcgctacacaggaagaagctttgtatgttctagtccttatttccttacactctatctctctcgctctttcctgcaatctctcttctgacagctcgttcgctctctataggcatgctcttgcgatgaatggctggaacgcaggtggaatcaacatgtatgtttccaacacgtctcacacaactcaattctcattctctctgtcctctccgggtttttttcccttcagctcgatcactgcttgggacgacgatcagcttgatcaagcctcgatcccctcaacaaatcagaggctgaccgagccggaaagaaaaaatctgtaagctctgtttgtctcatgttctcgacagtgacgtgtggactgacccgaaggattccttgatttctgttttccgacctcgatcatcaagctatgtcctcaaccttcctcttggtaagtattggatctgaattttaaacgtcgaactgcgcttcaaactaatgcttctcgctcatgcttaaaatctacgagtagatacaacaaacgatgagctcgttcggctattttcaccatacggtaatgtctcgcatacttggtgagaacactttgtcttttctgtctctctctttccatttcacggtccttcgtctgagactcgatcgtaccgtacgctgtcctcaatagcatcttggccatcctggattcctgcgctcgtcgaaggtttgttctcttctctgtccatcctgtggcatcatctttgcactgactgacaacgcacgacatcttctgtagaggttttattttgatgggttctggagaagaagctactcggtaaaccgaccatccgttttcgctgctcttcttttgatcactatcatctgactggtcactccctccttctcacagagccatgaaaagcctgcatggaaagatgtaccgggatcattatctagatgtcagttactccgtcgtccagaaaacagctcagcaaggcaagccctacttcttccttctccttccgacgcgccgtctggtttttttcccctttcgatcgcgaagagttgttgatcagatattcttctccaggttatcgaacgtctgaagactcctccgcccgacatagcaaggctgcccctcggaccagaccgactggcttgcagtatgatgctctccgaacgttcgtctctgggagttcagtcagttctggaacgagcagaccaaaacaatcgattgccagcgacaatgctggctattggcatcaaatcagacaaccagacgcgaccatgggttcgactggccaaagacgagagtcgagggatcttggcttcacccaactcggtcagagtcagataagacccgacgaggtgtgtctctcgtgtgatggaagtcgtttcactttctatccgcgctctttggctgactgaaacgttttcttgcatgtgttgtctattgacaaagggcccgatgctggttgttgagaatcttgtgagtctgttcacataaatgaaactgtgatcgcagttttctctttcctcatccttccctcttgtcctgactgtatgtgtatatctttctgtctttcttagactccaacgatattcgcaacatcggaagacattgcgcccgtatttcagttgtttggcgagttgatcggactcgaattgtatcctgccatgacatcaggaggctctaatgcggcgatcgtcaagtatagatttcccaacgatgcggaccaggctaccagagcgttaaacggacagttttacggagaccgagaggtgagtgggttcgatccattctctttttcttctccattccacatgataagcaagcgcacccaactattagaaacactaactcttttctcgtgtgcatatacaagatccgaatcactttaattgactcgccgaagagtccagagtcagaattttctctgtccggctcgattcgtcctcgggagtccagtctgggccaggacgaagctccggtgattcgagatgtatctcagtttcaaccggcccctggtcggatttcctctcagtcccaatcggcaaatgtcccactcgcaccagccagaagtctgcctttgacgagctcatttgatccgttcaagttcaacacccaaccgtttgagatccctcctatctccagaccttccactggatcgacttcatcaagaatcccgaacagggtaaacaagtccatcccgttgtcccaccctgggttcatccatttgccatcgccttcattcccaccaccgccacacactttcgccgatacgttgaccccgcgggaacattactcgacctcgcctctgattcagcaaagtgtgtttggcacccggccaaagcaaagacagtcctccaagacggatcaatcgagcgaatcttctggtgtgtccgaaccaaagagtttcatcggcgcggacgaaacggaactcgagttgccgttgacgatcgcccttgccgccgttggaggagagtcgaataacggtagatggattcctagaagggcttctcttggtggaaccggttcatcatcgggcgaacaatccgagctgaccggtgtgctcggcggaatcggaggagagagaagaaaggacaaacaagtcaggatccaacacccattcccgatcgcatcaacagagttcgaggacggcagtccggtcgattcgctcagggtgacgtttgagagaacggcgctcaaggatcagacggtttgttcttctgtcgaggtagcagcgtgataggtcgagactgacggtcgggtcttttctttcttttccatttcttttcggctggcaacaaacagatcacaccgactatcgagacctctactagcaactcgacggagggcaacgctacgaactgaacgatcatccacgcaaaaaggtaaataacgaagatccaaccgattcccaatgaggaagatagagcaggcaacgctggacgtaaattatctcccagagggaacgaaactgaatgaaccgaacgaaaaatgaaattgtaatataacgataaccctatgatcatatccacgcccttttcttgttcttgttctgtagatgtttcatactgttctatatcatcgtcaaggtttggtcctagctagtctagaccaaagattctacaaacctacatctgctcccggtcttttttccccttcgtttttcgtctcttatctctcactctccttctctttgtttcattctgcgcatgcccctccactgtttgtccgagatgcttctctctatatcttccttcatcccacataacctcgttttatattgatcggttctaccgatcttgctctgctctttccttccatgtttcgttctttccggcctttcaactttctgtcccgttctgtggttctctatcgttcttgatacatccgctgtcctctctgctcctattcttaggctgcatcgtttttttttcttctaatcgtctatcatctattgtttgtcatttgctgtctatcatctgtcaactatcgtctgttcttcaacctcctctttcctttctcttcctttttttcttctgcctttttcttctctctctctccctgttttaattcgttagatggttggacgatcgacaggaagtggagaaggagggcgaaagagttttgactggtttattttctttccccaaacttcttatactacgttatgccacgccatgctatgctatgcatttatctctcatctgtgtctgtcatggtacgctctatctctaccacacgtctcccaagcaactcgtggttccatcctttctgttctcttcttcgttctcacgtgtcgccgacttcgttcagtgtccctacctaggttcatcctccagacagaacacctccatgagcgttctatcgtcggctgacatcaaaccacaggaaagaccaagcccttcctggctatcgtccatcgcgatatacacagctgacatcgttctacttgcgcgcgcgagagaacgagctggcgcgtccaagggtcgtgtctggggtaaatggattctgtgcacgccggacccccctctgtcattccctttctctgctttccgcggggcctattcgtcaagatgacttttcttcttttctttttccctaagaatatccaacaagacgtcgggaaggacgtcaagaagtagattgagcaggagccgaaagagaaagaaaagaaaaaaaattgggaggaggaaagaaagaagcaaagaggagagaaaacggatggacaggatgaaggaaatcgtgagaacgattaaagggaagaacaaaaaggaatatggaacaaagaggagaggggaaaggaaagaaagagtgcccaaatgaaagatcaagaattatgagtgatagataagaaggagaagaacgacagacgatcggaaaaaggaccaaagtacggaaaggagcaagagcggacaagaaacgagatttggaagagaagaacagagaagaggtgcggtgaggaaaaatccgaaaaacatgaacaagacataaataaaataaaagaccggtgatgaaaagaaggggattttttattttaatcagaatcttcttcatccatccctgccttgagcctaaaagaaccatcatgactccaagttagcccaaacaggtcctataacgaaacttgataagtgaaggaagaacacgaacatttctagaagctcatggcactcagatagatgagctactaaaatcgcttgaccttccggaatagacctatcatttccggcatacacaatcacatgacatcaacagacgatccttatcatgcaactttcttctcaagaacaccaaagagaaaatgtgaacactgacccgtcttgagccatgaactttccatctttcctcatcgagtccaattgatgcaatgccagatgatactaaatacccgagcataccatacggatggacggacgatatggggtttccacgaagagcagaactcagaatgatgttcctgtaatttatatgagcgagaaaaggtgcgaaggcactcaccgggtagagatctcgtgccgagaatggacctccgtacttaaggacttcgtttaagcacttcttaatcgtcgacagcttgtttgcctacattggtcatccaagatagagcgccatcagcaaacagttcattcaaaaggaagaagagagacggacgcactataggcataagttcttccgagataggttcagatgaagacatgagtttataaatcaaaccgtgacatctcctcagcagatacagcaaaccctacaagagcgaaggaacagaacaagacccatatggaaccaccaacgatcaataagactctcgatcatgctctcgtgtagagacacactcacatattgaccctcgggcggcatctctccctcggcgtccacaaactttccatccacccgcatcgagtcgatttcctggagagccattgagtaactaagaaagaaaggatggaacactcaaaaagagttggctcgtctatcgacgcgtggaacgacccagcaaaggtgcgcggacagtcacttacttgtacaagtctgtctctcgaagagtccatcgatgggtaagctgtaatctttccagttttgctctaagctcgctcagtcggtcgaagatctattctcccatcaaccgtacccagcagggacgaacaggcgtcagcgtgttgctatgaacaagggcttgaacctcaaacctgatgcatggttttcacataccggcttcaatggcgtcggaacctcatcctcatgcagcgcacgcaagtcctgagcgatctcgaaacactcctctagtagtcccgatagaattctactcgattgcaagccagcgagatggatttgataaagacaagcaagaaacgtcagcggtgaccggtattcgagcatggaagcatgtgaacgtacgcttgacctgtgggcacagaagatcctcccggtcccaaaaattttccatccacacgtttactacattaaatggtgcggaaccccgattgagaaagtcagaaagtctcaagcaagacaagaggaatcgaatttttaggatggagagggacctgcctatcaatctttctcagttcttccagaagcgccttgacttcctgcttcggtggcttttccaatgcggccaaactggaaagctgtctcctcatctgaacgatccgttgatgtatcggtacaagttcgaccgaaagaaccgaaagtgatttgaacaggttgttcagcaatcgttctaaaaggagagtacgtgtttttgtttttgtttgcggttaaggtcagtggggtttacatgaggggagagatgtcgcgcagacgatgaccaagaaagcacatccagcgccggatagaaaacaattgattatcagccatgtaaatattatcgcacgaaaaatgctacttatgagcaaggagataacgagataaggcaaggagacaaaccggaatcttcccattttcgcgtcaagagcttttccatcgcctcgggtagttgcttgctctcggtctcagcctggatgacctgtttaagttgctccagacgtgttctaaacggttggagatccgtctcagtgtacactccggattcattcatatgttgtagtagttgctgtgttgtatcaatcggtggagtagataagaaaggatgagacgtgcgtgatattgatttgcacaggatgaagacaaagacaaaatagataaaaacacttacacgcatgctagccaattgacagaatccagcgacggatgttcgggatttaccgatctacacaaacgagaagaacaagcattaggtctacaagaatctgggagtggacagagggatggcggatgcgtagaagaggcatgatataagggtagccagtatagagggaacgtcggaatacgctggatgtggaaattcggccacccgatagggtgctggttgttcgccgaatcttgtttgatgacgaaatggaacatgaggaactagagagatgaacaagggctcttaccgtcaagaagaacagagacacgagcgagaagacatccgacaaggtttgatcgaccctattcggttgagtgacctcaacttctgtggacgacggtgcgtttgtctggtcctctgatgagttttcgtctcggacatcatttaacttggtcactatggatgcagaagcgggagtagatctgtccttgatcagaacggaattatgtatagggacaaactcgggaagaagaaaagaaacgaaccttgcttgaggacagcgtgatagatcgattcgacatctgtgtgagaagtattggcaaccggtcgaatgccaagaacaagaacgtatgtgtgcattagaccatgttgagcgggacaccaacgcacggcaacgctagaaccatagaaagaagtcgaggaagaaagacaagggagagacgaaccttgaggtctgatgtactctgtcgcactagctttcttgagagcttgaagtctagattaacaatgtggtgtagaccccagagattggtcgtcagcattgatccgataggggataagcttgggtatggaacgcaccttgttcggatgctgtcgaagaaaacagatcaagttcggaaagcatatacggaacgaagagataacagagaggaagaaagaaagatagaagaagaagagaatcgacgagtcatggcggttagtttgaacacaggagaataggaaacaacgtggcaaagaggaccgacttgattagggattcaaggatcgagagttcttcctgtggcaccatggctactcgatgtctgtatgtctacctgtgtgtgtgtgtgtgtgtgtgtgtgtgagagagagagagattgtgtgagtgtgtgagcgtggatatgagtctgtatgtgaatgagcgagtgtgtatgcaagagagcaaggaaggtcaacaaggctcgtctggatgatggcagtcgagtggaaagagatggcggcatgatcaagggctgaacggcctgggctggggtggtgattacgtaaatcaattggttacaaccagggttacaagattagatagattagatagagcgaccagacgtgtggcctgcgttgcttccttctggcctccgtacactctgcagctcaatcggccacgacgcttccggaaggatgggtttgtgtaaggtactggaggtgtttgtcgggatctgcgagatttctgaatgaaagtctaagcgagtaagggaacgcgacaaaggcgagcacactcagaggcgtcagagagcgacggctgatggaaggacaaacccacaacagatatggtctcaatacagtctcgcatgctttgaacggtgtcatggactgtcgtacacccacccgacatgtccagagtcttctttctgttcgatgaccatcaaacgggacgcctaatgtgtgcgcgcacggtgtgggtagatggttggcgtaaccctaacagtctgatcaccaagttcaccactctcttaactgttccatacactgaaacgctggttgtcgtcgtcatatgcagcaccagcatacatccatacaaccatcacccgtaccaacgacgttatgaacaatcgtacgtatagaaaccttgtttggagttggatctgtcgagagtcaactgacagacgattcctttctttcagcatcggcacctccaccggcttattccatccaaaggcccatccaagcgctggcagacactagaaatggatccgtcagagtacgtacggtcactttccttgctgccgttcttctttccgctcgcagtccagtcgatagtttacctttatctgatgcacctgttgctgatccctatgcgtttcttcgaaactttcgttgaccacacagatcgttgtcgtcattgctgcgatcgcgggggcgatttggtcaatcatcgcagccgtcagatcactcagatacctgtcgtcctccaccgagacctcgaggatgaggatcacggatatcatcagtgcagtcctctatttgatcatcggagctatcgagatccttggtttggccgcttgcttcaaggtttgctcttctctctctctctctcgcgtactctgtctcaattcaagagggcttatattgtcttccacagcaatcccgaagagccgtcaaaatgtattcggccggagccctcattgtaattctgctagcattcatcgccggggttgtcaacattgttgccgaaattgccttcaaggtgcgtccgtttgctctgctccatgttgaaagttgtatcatccgtgctctgaacacgtcatctatcccttcttgactcaacatctggatccacagagcgacttgaaggcagcctgtgtcactgccgctacgacaacaggtgtatcttctagctggtggggatccagttcgaccgtgcttggttcggaggatgctcaggattattgtgcaagcaggtggagcaggaccatctggtcagatgtcatctggctatgcgctactaccatcatcgccgtcagttaaccttcctttccttctcgtgcctttctctgctacctctatcttgactgcctctgatcctcgtgctagcatattcaaaggccgtcattgcaatgtttgcagttggctatgctcgacaactcgctcaggcagctgtgttcagccaggccaatgaggtccacgagaacgatccttcgttgggagttcctctgaccgcttaccaaggtcgagttccggaatacgctcctcccaccgcacctccttatcgttcgttcctttctctttttccttcgctgcttgaccatattcagctgactatagattcctttgcctatccgaatcaaccctcatgctcctatagccggcccacccgcctctggatcatcgcacgacatagactcgaaacaatcctttgtggcagcttctgcggaggatgaagcatggaaccagtcactcgccgaatccgaacgaagagaatggcaacaacatcaagagaatcaagaggccgaacgtgcctatatgatcgctcacggaggcgcagctcatgcgaatgaggaggaggacgaggcatgggagagatcccggaggcaggccgggttcggcgagagtggaagaagcacgaggacgaacgaagaccagggaggagtagtctgaagagacaatcaaaaggcgtccttgttgtcccctttgtctttctcctcctttctatcgttctgtcaacacttgagttcctctgatttatcatcggactatttaccctacccagactgcttttccttcttcctgtctctgctttttcccttttcttcccttgacaatgtgatcatcggcacgaactgttctgccctctgtctaatcttctgaagcatatcgataataatctctagtgtctcccggcttatctcttgttctatcttgatttgatcaacatgtggatgtgaacgagctcgatataagcatgctcctcctttctcgcacctcaatttgtgtctcgtcgttagtttctcttttccgtcgtctttccctttcgaccttctcgaacccaaatcatccaaacgagaccgagtcttgaaatcgtgaaagaagagtttcatgaatcaacgcgcaaaactagagaacaaaaagaaatcagcactcgaaaggatccagccgagccctgtcgagtagttctacataatggtcctcgacagtgttgaacgtctctcgaagtttttctattcgttctgattgatcaatttgactcaattggtcctgcattcaggccggccccagtttcagcggttgaagatagagaaagagagaaggaatgctgtcagaccgaaggaaagagaaagatacagaggaaaaaagaaaaagagacaaacataattgaaccggtagagtcgttctttgacaaacaacctgtatgctttgtttgctatcctatctttaggatcgagcacatgaagcagaaggatctcgtatagtctttggaattggcgctatcagaggtacaaaaaaaaggaagcaagattggttagatgtgtatcaaattgttttggttcttagggatgataaggagaaggttgaattaagaggaacccctcagacttactttggctagtttcaactccttcctctttgcttccagccaggctttgtccacaccgacatgtcgatccaacttgagctttccatcgaactctccttttttgaccaatcgctcgagcatccttaaatcgcaaatgtctcgcagatcatcgacgatctcggaaggatcttcgatcgtcaattctgctattgaagatatcgtgagggtatatgcatatacagccgagtatagcgcggctttattttcgaggataggtagaggaggggaagggggtgttaagaaaggacaatctttaaaaagcagggtaacacaaccatgaggcttatacagagaagatacttacagccatgacctctgaaatgacaaaagacattcaacatacgagccaaatcaaacgtcaactttatttttttcgcaaaaagcctgaaactcgaagaacatgtacgaactgtccatgataagcaggtaagacgataaattggctgctcgaacaaatataacggaaaccttgatcaactttcatgtgctttatgaaaagtttaaatcgctgagaatataccttagtctgagtctaatcatgtccggataatggaagaacggatagagactcgtatacccaacgaaatggtaagtccatgcttcttccttctctgatctgtctatggtctctatctttggcgagtctgaggacgaaagtcccgctgtctttttagacgtcgtcggtgttgggcgccgccttttttcatacctttcaataaggagtagagaagcataaagtcaagctgagactcaacgcaattcagaaattgaggagtggacatacgagataataaactcccaccggtcatcgtcctcctggttgatcgttagagagcgcggttagccttgatggttagtagggttgtgtgggaaggaagatacctacctcaacgtattgtcctccttctatgtacaaagggactagaatttgcattcttcggtgatattttctgaaatccgggtcagataagctcgtctacgatcccatcaatcgagcaaggatatttttgagtttcagcaggtgtttgtttgtaaagcaagtatcaccatagaacaggtacacaccttccaaagttcatagacgacaacttctgaatcactctctccctgatctacagccccatcttcttcgtcaggatccacaaattttcgtttccttcccttttccgccttctttctctccaatgcctctcctgtaggtctcgagtattctccgatctttgtcccgaacggcttgaaggaaagtgcgtccgcctttagacgcgcgtcaaactcagcagaagaggtcgtgtggtctaaatgcatagagacatcagtgacgattgaacgtcgtcaaaccaaatcagataccttttccaagtttgatcgaagtggcttaggaacggcttcggctcaccaggagctaggaaatcagctagcttgagcgagatatcgtccgccggggtagcgctcgacccaatcttggcatcgtatgtcaccgaaagaaattggtaaaggcttccggaggtaaggtttagctggtaagagtgtagacaagaccaacagacgtcaggttaggtcggtttgttgtttatgagtgataccaaacaggacgcgtcgagggcgaacggaatgcgtctgttctaacgaacctggaccttgaggtttttgtacccaaagatcttttgatcgtctccaaagatcgagtaggtgaatgctggatggtacggttgaatgagagcctgttctgactttgaagaactgcacaaagcttcagcatcaggctcgtcccgtcctgtgttccagccctccccagatgcgagtaagagaaacacggtcagttcatgatgtttcccaactgatagaagactacgcgaagaaagagttatagcgcacgctggacgagggagattgcctcgttagagtcacagatccaagccatagggatgataaggcagaatgtgtcgggtcaaatgaaggagtgatggatggaatgaaggatgggatgatcagaaaatgtttaatgactctccacacgcgtccatctctgccagccgttcgaagtatcagcaagaaagccatcatgtctaatcttacacccatagaacctatcactcaggtcaggatctagcgtgggccatgaggaattataatggatcagattcactgatgtgatcttttgtctgctcattaaagatctctcacagaatcattcgaatattaggacaaaaccctggtcgctttacccttcaaggttggagtcaaacagaaatctcacctccgtgaagtcttgtgcttacgaggagaaaccaccctcaacatgtttctcgtttagggacaaacacctatcttgtaggcaactcgtcgccctatgtcttgatcgacacaggagagggtaaatcggcctatctgcctctcttgatatcttctcttggtccggaagggtcgatctctgatatcattgtgagttgtacatgttacatctactcgctggtatgaaatcgaactcaatgatatcatctttctcaaccatgcatagatcacccacatgcataaagaccactggggaggacttgctggcgttcttggtcttcttacaaagcaaggcaagccgaaaccgaaaatctggaagtggaaaaatccagagaccgatgcggccatcgtaaagtccgttccagagggctcttacgaaccaagtgaaggatcagaggtgattcacttcttggcaaataaccaggtaatgtccctttttactttcttatgatgagagtcttcttcatgactgagagatcgttgttcactgaatgatcagatatttactctcggcgagaccatacttaaagttatccacactcccgggcatactggtaactcattatgtttttgtcttcttctaaagcgaccaccactgatagaagttgtatatgacttgcgcccctcagaagattcaatctgtcttcagatggatgacgggtcgatcttcacggcagacagtgtgcttggtgagagtacggccgtgtttggtcacctacgaccctacctagactctctccgacagttatcgtctttaagtcccacatctctctatccaggacatggtatcgttatcctaaacggcctgaagacgctagaggactacatcactcatcgccagatcagggaggatcagataatgagtctcttgcaaagacaaccatcgggacccgaacaaggaacaaggctcccaggcgcctgggagagcaagagtaaaaataaaggggaggggggttggtcggtagaagagctcgtattggagatgtacgcagatgtaggattcgttcttcagaacgcagcagccagaggtggtcagtcagggttgtttctttctacagaatcccgtcttacatctcatctgatgggtctcatctgtttgtcccttgtaatccgcggaaaatgacgatagtgatacttcatcttgagaagctactggatgaaggaaaaatcaagaaacacaaccgaactaaaaacgaagaagaatgggtattagcccactgatacgcgcacatgcgtctcttctctgtacctcctccttctcgtcttcttggtcttggggagtcctcggttatgtttctttcgtcccatcctttgtgatcttgctcttgctactttccactctgcttctatagttgtatccgccttatgtctcatccatgatctcatacgatatctctctctcatgtccgttctattgttacttttctttcttccttccactgaataatcattcgaacaacgtatactacataaacatgttgactaccaagaacactcattcgtttaccgagaagggagaagaaaagaaaagctctcaccaaaagagagaagcaggaatgaaatagagcatgcctagagagttgagtacatgtatctcgagaccaacgaaaccattcgatagacccttttgatctttcaggaatctttccctggatcgtaagctgatcgaccgaagctcttctgtctacacatatatagttaaacggtctaatgactatgaatgacaaaagaagaaacaaaggtgatatatgaactaacaaaacagggctgtgaaaaaataccctgcattgcgtcgatgtagaatagggaattttcatgattttatatgtttaaaaagccagtagagcaataatacgatacatcttttatgacgaagggtggaagagaaaggggtttacgtagtgaaacctcaatggaataaggataagaacaagagatggaatgatggatgatgatgcgtagacatgatctaaggtatttgagaatcgataattggagataaacagaccaggacggtggcatcaaaaatatataagtacaggcaagctagagtaggggttgttcttaatttttaagaagagtggggaggagggggtcgttaagataaaacagacatccgggaaaccataaaaaccatcagaaccgtcaaaaacaaagcagcaaaggcgaagaaggcacgcgaaaaaaaagcaaagaaagagacgaagaagaatgataacagcgcgcagagagaaaaagagaatctatcgagccgaagctgtgctcgatcgagtactcctcctgaccggtcgggcaggttgcgtagccggggccgtcacgggcgtagggatcatcgagggtacacttggagtcgcagtctcgacaacagaagcagtcgcgggagcaagtgcagatgcggttgaagatctagggatgggcacggcagaacgggacgtagtagcagtagcggcggccgccctccgctttgggagtgagctgttcgtctgttcaactgacactgccccgttgggttttccaacttttttcacgacgcccgccggggcaggtgtcgccaccaaagtcttcgaaggcgcctttaccactgggagattggtggcagaaggcttgattgtgtctttagggatcattccggaagaaaccgtcggcaaggttgtggctttggatgttgcagtcgatgtgggtaggggtgtaggcttagatgatatcttgctggctaggggcataggtgatatcaaggactcggtagctttaatgtcgttggcctttgacccgctttcggttgccacaacagagtcggtgttgacgctagtgctatcatcagtcaccgggccaagaccagatggttttgagagaacagaagcaccagaagcaggcgccgaagttttcgagacagccttgacggcttttgaaggtctaggagcacgaggtttcggattagcctggaccggtctgggagtgtttgaagatgacgtggtctgtggtcgattgagttttggttgaggagctgtagatgggcctgcatgaacatgagctggcttgacgcttgaagtagctagagcaggtctcacggaagtcgggttgggttttggaacagtggttcgtagaggcttcggaccagtcggatagttggacctagaagcttgggagattggtaagagatgtaatggacgacgggaatgcgtcatctctcggtctccgaacgccaaagcagggttggacagcttgaggattttctttattgaattaaagaaagacacatcattaaataaatcagtatacgccacccgagaaacttaaaaatctgaatcaggacgtggatacttacctccaaaggagcagcaggaaattttgaagccagtctgggttccaaaaacccatctagcaaagcgttcccaggcatcaactgttaggagtataaatcgtcagtcatttgccctgtctagaaaactcaatcttaaattccaccgttgcaaggaaaaagatactcacagcgatagctacgttcctagctgtatcaagcgacacccaaatcccatccactcccggctctgcatcatccccaaatgcaacctcgacatgctctaatgcgcttttcagcaagtcgactttcggttgtctttcttgtttgccttgaggagacgggcatagcgtttcgacacaggatgtcatgttgataaatgcactatcaattcggcggagaagggtaacatcggcaacaacacatttgaacacggggactattgacaagtaggcaaaccagagaacagatcgaaagcaggcgaatcagtcacacgaaagaaagaatgacgacacagtaacaagagacattactcacgaccagaggccagagtagcggtgatggcgggggttagctgtctgattggctcgacaaccaaggtcgcaggaccgacgcgagcaacatccttcggtaattgttcaacaacagacggcccggtcaaagcatctggggcagccatagaagaaagatcaggcttgctatccgtaaatgtcgtctgagttgagagagggctgtgtggagtagatgtattcgccggtgtgacggtcaatgtcgaggaagactgagacatgggagattgtctgtgaatgttgattaaatcagaagatagatcttcaagggcaggaagctgaacgtcatcatctggcatgggagacgtcggaagatggacagaggtaaacgagaggagggttcgatcttcagtcggttcaggcttgtacatcaattcaactgaaacatcgtcttcctctccatcaacgctggttgcgaggcagaaataagataaagatcaccacataaacacaggggtcagtcaatcaggatagcagtggcgagtaacatcctcaccggacacctatacaaagcaaggaaacaggtgaggaagaaacactcactccataagctcaatcatgtccgacaccgagacagatagttgacttggttcggtactcgcaacggacgtagaatttgctccaccaatcaaaggagatctttctcttttgaccggcgccggcaaaggtgtagggagcaagcttgaccgtctctgtttgattgctcgtttggtccttgatctttcctgtcgatcttcttctcccacaccaatcatacagtcggcgcccgttctttccttgtcttccttcctgatcctctttgccgccagctcatcttcgcaaccattgtcgtcgtcgtcatcatcatcctcatcctcatcatcattatcaggtcttcccatccgaagtgccgtagccgcacggacacgttcgaccagagcaaaagcaaaagcctcctttgcgcgcttgatgtcatccatcgtgccagacgagcctgaccgagtggtatcctgagtcgcgccgtcatgcctaccgatatcactctccatattcgtcccatcctccaagccaagcatcccgaaccgaacggaccgaggtcttcgagcaccccagaccctctccagttcttctaaaccgacactttccggtcctagaaactctttctcattgtcttcttccgtttcctccccttcctccatcccacgtcggcaatcctcttcgtcatcttccatgctcaacaacgcgtcagccacacgcgtttcctcccaaacggccccttcgctgggtggtcgacagtacatctctggggaagagtgaaacccgggcgacaatggttccaatttgacgacctcctccagaccaagaactgaggttgtcgacagttgctcaatttgactacctacagcgactgacatattctgtaaagcccaagcttcggccttttccttggcgccttgaatttctaaatattcgtccgtctctgtacctggggaagagtactcaaacaacagacttttctcgctgaacgatggggtgagcgcgccaacttcgcacacactgatagattcctggtcatcaaaatcagggtgagggtatggaacggatctcgagtgaaacggaagtagagaaagcgacaggttgaagtcttcttccgactgcttcgtatgagccatagaaacgtcgagcccagcggttgactcgtctggactttgggcaacagaatgaaatcctccgaaccgagagggtgacgatggaataaatgtgccgtccaatgggtgaccagattgagggagagcgaccaaggagagacctgggctagggtttggcgaaaggcatgtcggtggtagaagcatagttcgtgggacatcagatcgagagttgagcgccgtcggctgagttacatgtagcgcaagaggagggttgacgaatggtgtggctgactcgggagaatgaggaacagaggccaacgcaggattcatagtcggctgggaaaactgctccatagaaacattcaaatctctgttggccaccgggggaaccgagacaaatggagcggcgtccaacaattcgcgtggcgtcggtggtggcggtagaggcggatggagatggtggtgatggtgatgacgattgatcggtttagatcggtactgaccatctataggaatgcgataaaagtcaattccatcgaatgaagacagacctcctagggttcgtgcgatcctctgttcgctcgtctccgcctcattctcgccttctgacgaagattcgctggaggatgatgagcaggacgtgtcggacgaattccgaaggtagatgggtcgacagtatccagtctgaggatcgggtgacaaggacgcgcgcttcttctttggccggcgtgttcttgttgaggaggggagaagcgagagaggatcctcatcatcagatgaatcgttgggcgagtcggatttggttcgcgccggtccgcgtttgcggttaaccgtacctgatggagcggacgagttcgtgttagaaggcgagcctagcaaacgagactgcgctccggcaggttctggtgaggtttcccggccaccaaccttaagacgaattttgagaccaggtttggtggaagcggtggaggcagctaaattggccgtcagactcgacgggccgtctcgttctactggcacaggcgttccatctctcgactcgtccgtctcgtctgtcaagaccctgtcttttcctttttctttagctttgacagccgcctcttcccttttgcgcttttttgttccctctaactcctcccgaacgctctccaaaccttcccgaacgaatggacttttgcatccaatggcctcgtttgaaagataccagacggtccctctcggccggcgaccgtccgcacaggcatctgggtggagagcaggagcaagaacggcttccgcaacagacccaaggagaaggtgcttcgacaagagacatggccgtgaggtgagagccgcttttcgagcgtgggaacgtatgcttgatgtaatctgttgttcaggagtaatcgccggactggtcgagcatgaagaagtggaagtatatgggggcgtcaattgtactcgtcgaaagtgttcggtaacagaaggaagaagaaaaaactaacctggacctaagccatcctttggagacacacacatgagagagctccttaaggccgagagctcgattgttctgcagaaccaggtaagtcaaacgtaacgacgttagtcagaaacaagtctttgggcgctacaaacagttcatgtggaggctgtacgtaccgagctccagatagctgcgcatattgccatgagaaccttgtcgttcaggtcttcttctgccagtttggcccgcatggcctttgtgggtgggaagccagagtcaacggtatcatcgacagtcgatcttcttgttccttttccatgagcgatactgtcatttgaagaagtcgtccgggatggtgtcggggtgactgccaggtctgtcgtcgatttttgagccaacgcagtggagagcctggtccgtttgggccgggaggacggctgtggaggggttggctggtgatcgacggatgtcacgggtgacgcaacaatggtggtactggcgtcgttgactggagcaggagcaaagtctggagcaatctgtccggccggcatcgtgtgtggtgcgggcgaggggacgatgccctgctcggaggaaagggacgagagcgaggatggcgaactcggtagtagcgaggacccccctgatggaatggaaaatgacagaatagtagtggtcgtggtgtgaaaagggggaaggaaagggcgagacctggatcagggatatatgtgtgtgtataaggggatatgtatgtttgaaagtgggtatatgcgtaagcgtgggtgatcaagaaaatgacgtcgaaggtggaggtgaaagacaagtggtggttggatggatacagaaggcaatgagaagcagaaagaagacagagttcagccaagacagaagtgcgtgcgtgtgggtgtatgggtctaggagagagagagataggaagagagccaacgggaaccaccaagaaagaaagaaggagaaaagggaccgaccaagagaaaacactcaatcaagacggaaaaagggctgtgtgtgggggcacacacacaagcacacacgcaagggtcgagaattgagctctgtgcccagacgtgagtttgttgtcttgctttgggtcgtaccactagaggcagagatttttcagacagagagagagaaagatagatagatgggtatgtgggaagggaagataggcaagatcgagagaatcctgagttgctttcaaagaatgagggaagggataaaaaaaagagtaagaagggaaaagaacggagaagagaagaaaagaagagcgagagggaaagagatggggggagggaaagagaaaaaaaaaaaaaggaaaaaaaaaggaaaaaaaagggcacgcggaaaaggcacgaggaaagaaggtaggcgagggcaaaaaggcaccaggcaccaggcacgagctattgagtgtggcctcagatcgagagggatgaaaaaaaactaggaaaaaaaatgaagacaaaaattagtcgccctttgctctcactcactcgcattatgacaagcaagagaaaattcaatggccggcgcggagatctattcgctcgaggtacggagactgcggatgtgcaaacaggaacgcttagtcatttgcttagtcattcatcggctgaatccttccctgcctcccatctgtttgacccgatctcgctttggccccccggagataaccacaggcattgtgcttacatctcatcacttatctatccttccctcagttaagacatcacgtcagaattcacgtagtcctaccataggcctggaagaggccactcacgcacacgcacaagcataactacacacaagagatatctttccatgcttcagcaggatctgtccgatctcgttcgagctctggatcggcggattttgtacccggtaaatacctcggtcgggactctctggatcattcgcgccagaaggaatacactcgcttatgatggcttatgctttcacttgtcctacagatcattctcgcatatacttgcagtttgtactctcgtcttgttctatgccctcgtgtctccagttacctttgctcttacttctttgctcaccttcacatctgctcatgcatacataggttacatcgaccgttcaaatatctcaaacagtctgacatcgctcgaacgaagtatagggctctcgccagagcgctatgctctgtcggcgtatgtagttcccttcttagtcttcttgtcctttttccgatgtgacaaatgtagaccatactctcctgttttgttattctcttctgggctcgggttggatacctatacatttgcagagctttgttcaccgtctctttggtcatcatcgaggttccctcgtgaggtctcctttacttgttcttgaattccttcgattctgtgagcaacatctctaaaggagaatgttcacaaatcctttatccaacagaaatttgttggttaagaaactgggacccaaaaagtggctctcggttctggtcgcaggatgcggcttgtgtaccatctttcaagcttgcgccccaaactatcagtctttaattgtcatcaggaccatccttggcgcttttgagggtgtgtatatgaccatgctcctttttagttgtgactatatgtcttgtgtgtgttattctgcctatggcgcgctgatacaacggttttctttccaaccgatcaaccgggcaactcgttccctggttttctctcttctcaacaataggcggcgttttccctggctttctctacgctctcactgtattctatcctcccaaaaacctcaccgtccggatctcgagttttactctcgcagccagcgtcgccttttcccttggaagcttccttgcaggcctctttcttcccatatccaatggtccatttggtctagaaggatggcagcttctgtttctattacgtacgtctgtcatgtgttcttgaggaagaaagatgtcaaggatctgtgaacgttgacacatcttacttcagagggaatcctcaccgtctctgtggctggttctatctggacctttatcccttccgacaatcactctatctattttctccgacctcacctcaaaactttgtacgactcgataaaacacgatccactttaccctccgccggacgagaggaacgtctctcgtagtgcctctccccgcccatccgtttcttcatccatcttaccaacctcctcgggctcataccctcctattcccttgcctgtgacggtcaccgcccctggccgatccttgagccgatcccctccgtcttccgattcacatcgaccgaaacaattacctcggatacggtctgattcttcaacaccgctgataacatccccgcctgcaactgttatttcttcgtcaacattaaagacattgatcgacccattcactataacgctcgccgctggctacatgctcctccttcttgccactactccctccgcctttctacctagaatccttcaggctcggtacgggctgacagaacggtcgtccaatgtgctcgtcggcacggtctacgtgaccggtggtttcgttcaattcgcggttggctggtgggcaggaaggagtggtgtccggactgtctggcggacggttgctacaggcgtgatctctatttggttattggttggtctgtgggaagcgattatcatgaggggatcttttgtcttcgacacgccgcatcatcctcaaagcggaactaggtttgggcattcatggccagacgggctggaagggatcgtagggatcgcgcttagattattggcgacgttggcgacgccttgtctaggaagtctctttctcgcacatacggtctctgttccggttgtgcttgtgccacaatcgggaacgttgatggcgggcgttatcggtatgtcgttcgctttttcttttcgtctcttttcctttccttctgtttctcgtcttgcgcactgttctttcaggagaagaaaaatatcttgactgttatgcatttatgtatgtgttcacttgaactccctccccctccccccacatacactttatacgaacagccgtcggaaatttggctcaggcgattggccctgtattatatgcatcatgtataccacctctgtctcggtcgcctagcccactacctatccctataccgccaacgacgcatatttctcgcgtcatctcccaccacaatttcaatcctagcgcgtcgacgacagcgaccgtctcgtcaacttacacattctgggccgagttggccacaagagatcttctcatgggtttatctgtactcgggagttgggtcttattcgagctggtcgctcgatgggtcgagcgttgtgtcgaggaacgatttgcaagacggttggatgtttggagcagtagaagtctacctgtcgatgtttctatccaagccgatcaacataccgatcaggaagaagaggagagagacgaagaggatgagagcgaggatgagaggcacgatgataggagggaggaaggagaggaagaatcattattaaggaccccaacgaacgataaatagatgcaggttcttgtttcttttctctttactttt

SEQ ID NO: 494 - DNA, 49273 bp, Xanthophyllomyces dendrorhous
cttgtgcttatagtcgcctagatgtctcgccttgtgatcacgttagcgcatgtgattgtgtaaagttgaacctgccaggcctgattgggcatattcaaaagaattgaacccatcacccaaccaacccatcgatagaagatggcaagacatgccattgtaggtcgtttgaaaaaggagaggaggaaaagaaagacaaggcgagaatagggagccacaacaaggatcctacagagaggcgggacatagtcgaaagaaaaaaaaaagagcatctctagagaaacaactgccgaaaatggaaagtaaaaagaactcgacgagtttatctggcaatctgaccaacagagttctgtgagcagtcgatcttcagatcttgtgactttgagtttccttgacggtgagcaataccaagagcagcggatgcagcagcagcaccgatgacaacatcagcagccaccacaacaccatgggcaaagcatcatgcctacccaccagccgaaccgcaaggaagaccgcgagacaattccagagatatgatgggattgatacatttttattctgctgaaaaggaacgggaataaaaaaattcgacgcgtttattttcgacgcgtcaggataaaaaaaattgattatgactttcactacagtccgcattaggacagatactacagattggaagacgcgcgcccggttctgattcggtgaacacgtcgaggtgttccctctttttcctcgataactttccttacagggagacttatcgtataaaaccaccacttacggatagatgagaagtagacatttaatatgatgtagtttatacaaccagcgaataagttccagaggagaaataaatttaattcgaccagaaagaaacgttattttctctcagtctagtccacgcgtcactcgcgactcgatacgcgcgacgcgttccgcagtgcgcgtctgaccgggttgcccgtcatatctacccacgactcttttaccggccagactcgaatccttcttcttcttcctcttcccttttcccccctcactcttgctccctaaccaccaccttcatattttctctcaacctcttaccttcatacccaaaacagtacgtcctcttctccgtctcgtcttttctttgtctcgcttgcatatcccttttcgcccatcatccccactgacgcgccctcgttcgttcgatttggtccttatccagccacctctcaaatcgtcccaacaaagatgtctgccaccaagaagaccaccgctcccgctaccggcgccgctgctcccaagaaggccgctgctgccaagccctctagccacccttcgttcgtcgatatgatcaaggttcgtttctttcagctttctctagcgttccctagtttgcaatttttcccttctcgctccatatttcctctttcggctaccgcacccggacccgggtcagacccgtcaaacctatgggtcctgcgctcgaccatctctctatacatccaatcgaatctttgttctcctttcctcgatatcacttccaccaacgccctctccaagtttgggatcgatccgttgggtttcacccttttggcgctcgttcccgtcctggtccccttctctcgccatttgggcccgagagaaggagtgaccgtctgtacgtgatatacaccatcacgtcgaattcttccgtttctctgtttcaatcgcgtcgcttctttacgaatccggattgcatcatgtcccatccactctctccagcaattcgttcgtttctatcggccttgatgcggtcgtatcgggcttgggagtcatccagggcgaacgataccgagccgcggattgagtggaatgtcagaaattcttcctgacctgccattccattccctccttgacttttttctttctatcgacattttcccacttcctcttttctctcctatcatctgcctttcgtctcgttatcgacgcgacttgctgacacccatgttatctttcgttcttcttccgtacagcaatgcattgctgagaacaaggaagacgcccgatccggtgtctcccggcctaccatcaagaagttagtgaactatcttcctcgtcatgcaggccattgagtcgtcaataccagatactcatctccatgcctactttctcttcctttctgcttaggtacctcgctgccacctacaagcttgatatgtccacgtccagcaacaccggaaacctcgcccgagctatcaccactggtgaggagaagggtatcttctctcttcccaagggttagtaattcctttttttttttttttccaatgctcctcagtgtaatagctttctcttacttatgcatctggtcgttttcaggtatctccggaaaggtaaagcttgccaagaaggagcccacccccaaggcccctaaagaggctaaggagactaaagagcccaaatctgcccccgtcgctaagaaggctgccgctcctaaggctgtcaaggcttcctcccccaagaaggccgctgccatcaaggttcgttctcttggaattctccctactctctacatctgtctgaactgattgttgactgatctttttatatgtttctaggcccctactgcgaagaagaccgctgcccctgttgccaagaaggcttctaccgcaaagcctgctgtcaccaagaaggctcctgccactaagaaggccgctccggcaaagaaggtcagtatctctttgagaccatgttcctgcatctcgttcttacctccttttttgtttctaggacgccgctaccaagaccaaatcctctactaccaaggctgtgactgccaagaagggtcggttcacttctttcgacacccttcttcaccgtttgttcacctcggctcacttatgattttttttcctgtcacagcccctgcaccaaagaaggctcctgctgccaagaaggctgctgccgtcaagaagtgaacgcccaccccgacgtttttcctttccttccttcagaccgctcccttctctcgttatccctgggattcttttacttgctttcgcctttgtcttattttttacccacttttattcgcgtactacacgtctcgattattttccccttttctgtacccttagtgtcatgaattatgtgcaccttctccgtcctcccgagggagcacttttcttttttccttcctctctttgtttctctttctcggttcgttagtctcgtctgtctctgtttatcctgtctgtcaacctaccctgccttacccgttccaaggccccctttttttcgttgatataataaatccgctctttgttctttgacttcgtctttttattctttgtttttctcttccttttctcttggttcggatcagggtttggttcctattatgtcatgcagattctcataattcatcacagttctcaggacaagcgcgtttaaaaaaaaaaaaatgtccccgctgcttatccatccccagacagtcaggatcagcgtgacatagattcaattgaaaagaaattcgggatccctgttcatctcgtcaaacctactgattcagtcgtctgaaagagacactgaagttacaagacgattaactcttacttgaggttgtcaaaacgaactcagaaaagaaaaggagaaacctgtgtacagacggaaagaggagtacagatatggaagaaaaagaaaaagaaaaaattgtcagaacgtccaaacggaggaacatagacgcgcgcgcgcgcgcgtgtgagtttgttcgattctttatcggcgttgcggacagcgagagtgtctttgagatcaactgattctcgttttctttttctttttgctctcttcattctctcgcgttgagaccttgcactcaacatacttgagtactctcttcaatctaattctggttgcatacgtgataggtgacacattgtgtgagaagcgtgacgagcgactgatggcgaaaattgaataaaaagtgacgagcgatatgcgattgatgattcgtacacagtacactcgacaagcatgttttcttgtttcactagagactagattcatattgttgttgtttttttgcttgtttctctttcggacattcgtcagattcttcaaatgactttgcgctatttattccgagtacatgcatgtcacaacttatacgttcgtgtcttgcatacattctcctcctcgtctctgtgaagtgtgttgtccatactctgaaggaggctatcgataaaagatcaatatatcatttcctttccttattcttctttttgaatatacaaacgatgagaaacaaaagaaaaatccactctcagttgtcgtccgaaacatcctctcgctaactcacgccgctcaccccttcggcttatcctcgcgctcagaaaccactgctggacctcaagctctccacctttttcagaacctcgctcgtactcctatccaactctgccgcgatctgcatctgcttcgtcgtgggcaaaagcgcgaaggcctcgcagagatctccatcgaccacagccttgacaggtgcgtaatagcctctgtaagcaaggtgatctcttccaacgagcgaaggagcttccgaccgcatgtgcatctcgagcgtcgacatgaactcgatgtcttccctcgacacgaacgggatgaggagtccgatggatccgtgaagaccggtgtacagcaacacgtccctccctccaggaacaagggatgttcgggtgacggaagtgacgatgtcgcctacgttgtagtgggcgagcaacgtcgtcttgttgggtgcgcccatcaattttgacttttcgtgaaggatacccgcaccggtgggatcatcgtccaccgatcgtgtgacagaagtcggaagtcggttgatgatcaggtttccaaacttgtcaccgatggccaccgtttcgtaatcgaccatcgtggaggagaccacccaacgaggttgagaatcatccgcaaagatgatcaatcggttctcttgaggcttgtatgtcacataagagacggattcctgaatgtctccaacgatgattcgagatccttgggtgttgagagtggtgatagagtttgggaatgactgaagacaagagtcgctttcgtttagatacgatgcatcggagtcgaagaaaaagatgtgcggaccgatagaaagaaaaaaaggatacttacagtgttttcacactttcgcagaagcttcttctttccgatatcgtatatacgaagggcctttccaacaccggccatcaatcgaccttggaaagccatcagacacgttgggatatcatccacctcggtctaaagcatcataggagacgaagagagagagagagagaagaaaaaacgtcaacgtccagccaagtcacagagaatatgtaagcgcgaatttacgatatgaagtaactccaaagccttgccatcatccttgagcgtgtacgttcggaagtatccgctggaacaagatctaggcgacaaaaaggtatccttcgcggtaccgaccaccagcagagtctcaccttcccggctagcaaacggcacgacagctatcgagaacgcagcttcgttctcatccaagtccaacatggaaagtgtggttgactagtattaaagtcaagacgcgggtcagacggcacataattcgatacaactgaccggagacggaatacctacctctatagggtccaccactcgaatgcacgaagcccattgaccagcatccgctctcggtcgaccaaacacttccggtgcaagatcgacaagctccatatcgacttttgatccgcttgcgatctggaaaaaaaaggtacgatcatgagggaaggagcgaagagtcagtgtgggtcttgatccttaaaggagctagcaaaataaaataaaataagaagacaccaaccttctccttgaccatacgctcgatagcggccggtccgtgagctctgtgatcagactcgatcacgtagaagatcttctgtgaaggatgtgaaacgaatcttcgaggagtgtaagacaggggtgtaacatcctgcttgagctttgtgcccagcttaggaatcgtaaagattctagtgatcatcaagtgggttcaaagtttgaaaagatcagtatctgtcatcgaattgcaagcattgattgttgaaaggtagggtcttacctgagcgtgctgccagcgataccgatcaacccatcaggacagagctcggccgagaacgtccaagcgtgatccaagttctcgtagatcaatggcgagaactgtagtaggttctgatggctgtagttcaaccaggaccgactagataaagctagcacaccactctggccttgaacgacgacccggacgaggcgcgcggcttttgaaccaatgaacctacacacccattgtcaagcgaaggaaatccgatgagttctccatactagttttcggagcgcaagatgcttccagacgcccagaaattcgagacgcacctttgtcgggtatcagtcagctgaccgttgacggtatcaatgaccgttcggagcagcacaccgttctgcagaccaatgttgaggaacatagtcgggtgatttttgtcgatagacgtatccgtcatctcggcgatgcagatcgaagaaggaatagcagtgagagcctgtatgcatgaacgaggacgacaagtcaatcacatggatagaaaggcctcagaaaatcgacttgagaacggagaacgaacctgaagactgagagtggacaacgtgttttcgggatcaagtgaaatgatgtgaacagtttggttttcgcaacccacggcctgaaatagtaagatgaaaatgacgattcagcaaaagccttatcgatctacagcttgcaaagcttatggagatactgcagaagcacgcaccaaaaacaagcttcgttgtcttcctgtcgggacttcccccatgctcatgcacactactccagccggcaactgcttcttgtcttggtattcgttcaaacttccatctacgatgtccaactcaaagtatacgagctcgcccgtgttgagggccacgcaaatctgtctagaatttgttgtagcagcaacgatggaggttcccggggggaccggccactttttcttttccttgctggcgaggacgtgtcgaatctcgtgcggcgtgatctgaaggagagaatcttctccgagttgttgaacggcgagcgttggcgcgtcggaacggaagcccatgtcgtacacttcttcgatggtatcaccaatggagaggaccaatgttccattgacgaaagagagaatgatgtatgaatcaaattcgtctgttggattgtgcaaatttgcaaagctgggcacgtcagtgatctaacaatcttgagcatgaaacacacgatgtttcaacataccgtcagaccggagcttggttgtccagaccgcattcggcacaccgggcaactctgagctgacagtctccgagacctccagcccatacctcaacatcctgaacgaactccttgacccctttccacaagcagcaaatatttgcggcgtgtcctgacctagcaggttggccaccttggcatcgacaattggatctaatgaatggacctcgtccgagagcgctaagttgtcaagcgggcggggtcggaagtaggcggagggaagaccgtcttcagacattccgaactcaggataggaagcagagctgaactctgcttcatcatcgtcgtctcctagtttctggaattgatgcagatagcttcacatcattgattaagcaattgttagattcagatcgaaaattgtgtaagcctttaaaggaaaaacaaaacaaaaaaagagaaaaagaaaggcgctaaagacttactggtttccaaattctgaagccacaaacaagaaaccactcttcaagatgcaaagcgaagaagcgactggcacggtgtcaaagtacttgatcttgaggttcaagacttcttcgtccttgtgttctatggtaactttgaacaaatcaccttcctctgattgcaacaagaagaagaagtctccctatatcgatgatgacgatgaggaagaagagaagccagatcaggaattatttgttttcttttgacgaaaccacacatatgagatgcataccttcatcttgtgcatgacagccgaaacaatgatgattcccttgtcttcaccgttcaggggattttttcgcttggggatgggcactcgatgttgaggcgcgtccatgtttctatagatgatgtaatcctcacagcagaccagcactccagacggaccctcccatcggtcggtcgaggcagattgaccaccaggtactgaaaagacgtggattcgatgagagactcgtgagaaaacgtgctaagacatggccggtgaatagaaggatgattagaaccaaccttgaacgagaaggtttgcacgaggatctgtcggctcggaccattttcggacaacgtggttcaacccaagatccagctcgtaaaatgtgagcatctgtaagtgaagaatgaatgtgaattgaataccgtcatccaagctccaagagaaaagcgaaaggtaaagaagactgtactttttcagcattgtggaaagcttctccagtgggatcttgatcactatcactgtagtccacttcaagcgcggcgaacaacggattgtcgaatccgacatctactccaacgatgctcaatatgatggccgactgcttgtgggcctctaacggactggagatcgtcaggttcgcagcggcatctcggttgaggatgtatactagcttggccttctcgactgctccgatcatgacggctcgtcctttcggatcggtagcaagccactgaccgggcacgattcgtcgagagccagacttgccgaaagtttcctggtgaagctttttgaaatgaggttgaggggtttgaatgaattcgagaatgacgatccgaccagaatcagaaccgacgatcacatagtctggtgtttgtttgagtatgaaattgacgcgtggatgagggaaacgggcaacagaggtgaccaaggagacagacaatcgcgttcaaggttggatcgcgtgtaacgacgacagattgatgtttgcaagaatcagcgaagagttgatgcgaccaagactgtgacaaatacgttggcaaagaaagaaggtgcaaacgaacctttcgttccacccgtcagtctgaatccagcaagacttcgaacggtaccaaacacctcagactccaacacggtatccagcttccctgtgcttggatctggacgcaagagttcaatcctcgttcctctagcgacgatgatctcctgagtcttgggcagtccagagaacgatccgacgaccgaatgggtgatcacctgcggaggagagagtgtgacattgtaaaagtgaggtcctggctggagagccatattgcttgacctttaaagagagcgacgaagaagaggaggagagcaagaaagagatcaagacaaagacaagaacgagctagacaagctatcagaacagacgatggttagagaacgacgggtggaaggtagacgagaaggtgaacgagctcaagatggaggctgaaggttgcttagtcagcaaagagcgaaaaagttcatttggagaatttacctgctgctcgtcaagttttgaatctgatccagctcgcttgctcgcttctttctcttttttgttctttgtttcgttcgttcttgcagggaagcaaagcgttctagttgttcttcttcgttctgtccgttagaaatgcctgattcggatccttctgctcaacacacccaggcggctcctttgtcgaggaaggccaaaaagaacgcccaggctgcagggatcgcctatgatgtgaccacgtcggcgacgtttgttgcaaagaaggacagacctttggtcgacccggtcgtgtcttcgctcaagtcgttgaccgagcactatgatcctgcttggggactgcccgctagcgacacggccgtcgttgcttctactgccgtctccaaatcggctcctctcttcaccgctgattcaacgtgagctttcttgcttcgcatgcatttttttcttcggcctttctttgctttcccaacttgctttgcttgctggcttgctttcgcaaatctctcttgtttggcttcttttgggtcaccgttgatggaaaccaagaaacttactcttggccttccttttctctttcccagttacttcttccactctgccggaaagaccctccggctgcactcaaccgagtcgctccttccgctttccaccctttcctccaaaaatatccagaacggacattcccagcggatcacgtccactcaccttaacccgacaaaccctctccaggttgttacatcttcatacgatggtaccgtcaagttctgggactacctcgatgcaacctgcctccgaacggtcgtgtgtcccggacctgtcactcatcttgttcccggcacgggatcatccaaaggtggttggttcgccgtggttttgatcatgcctgccagtcgaaagaagaaatctggctcggacaagtatggtaagctcgttctagtgtatactctgaaatcgttcagtcgattgttccaagctgatcatctttgcttttcacttgcttcaaacgctgtagagcgcaatcaaaacgccttgccgtacatctatgagcttgacctttctgcccctagtgctggagtgtctccgaaacacatccgtggacacaagatccgacctgcatcctcaatcttgatctctccttccggcaactttatcgtcgtgctcgccgcccaaaaagcactcctcgtgccgactcattcgatcactgaaaagccgaccaagtttgtatcccccgaagacttgacttgtggagcgttccaccccgcagatgatatctttgccaccggagattctgctggtgtcgtcagagtctggtactgccttcccggcatggccgatcgagcacaaaagcacggtgttcagttcacccgcgtcaatggaatgtccatggagacagaccaacaacaagaacctggaacgaacaagctcgcctcgctcggaatccagactcagtccaagacaaccccaaccactacgcttcactggcattctcatcctgtctcttctgtcgcattcaactcatccggaacgacgattctctcgaccggtcaggagggtgtactcgtcatgtggtccgttctttctcaagagaaacaattcgcaccgagattgggtgggcccatctctgccgttggcatccgaccacctgcgcttggaagggaagaggaatactggctttcgatggccgacggttccgtcaagcgaatcgcaggaaacggtcgagccggctggcgagtcaagagcacttgggattccggtcgagctgtgccctcggttcaaactcgatcaactctggccatcaacgctaccgctgtcccgttggcttaccacccgcagacagactcgttgattctgcctgccgcgcatccttcatccatccagttttactccccgttgggacagtcaagcgtgttggaattggaagtcgccccaagtaaccgagtctccaagagtaccgagaaggagattgagcctacgagggttggacgggtctccatcggcggtgactggttggccacaagcgacagcctggagaaggatgaagatgagggaggaatagaagaaagacacatcaagtgctggctttggaacggtaacaagaagacgtaagttgttctaacgcttatgaaccgagtgatccatgctgttgcctgctcatacgttctgtatacttttgtgttcgtgggattgtacgtcatctaggtactcgcttcagactgtgttcagcgcccctcactctaccaatgtgacctcactcaagttttcgcccacgcctgttccgtcagcctctggcgaaggtcaggcttctactttgttgctatcgtcttcgatcgatggagttgcccgactttggcgagaaaaaagaatccgatataagagtggaaagaccgatggtgagcttctcttcgcctttgaagattgtttcgccttcctcctatcgtcatcagttctgattctctccttggatacttctcacagcgtcctttgttcctcacaccttattctcgcacaactcgcttcctatccacgactctgcttgggcgcctgattcctcccttcttgcccttgcccagggatccgtggtcacgctgtgggacccggtgagcagcacattgaagggtacattgggttgttcagagttccctaagggagtgagcatcaaccatgtcgcttttgtcggtatcggaggcaggtatgtcgtcggtggagcttccaaaggcggtctggtcgtttgggatctgatccgaggtgaaagtaagttgtggcctgttgtgttgctgtcgttgatcatgagtgacttacttctttcccattttccttcctgcttgtagtcgcctggtctgtccaagacaagcgagtcagtcagatcgtcccctcgacgtcttcctcttctcccgacaagttcaccgtgctcgagaacggtcacggccaatcttaccgatccgccgcctaccacgtattctctgctctgtcacccaccgtcctcacttccaaaggtctccacgagcacgtgcggtcgcttgtctcatatccttctcccgctcctgagaacagtgaggaagaagaggccgaagagacgttcgctgttctgtccgatcgattcaaggttcttctcgcaggttcaggcgcggccatcttgaagtcaaccgccacccgaggtccgagagctcttcttacatcaggctccaccactgcttctcaacctcctgtcggagcgactctgttcgatgagatctttggtcctgctccttctacctcgtcttccgctcctacagtgccgttggtgagggaaggtggtagaaagacttacgatgacctgaacgacttgttcgaggcgcccgcccaggtcttgcctcctatgggacttttgttcgacgaggtcttcgatggatgtgtcatcagacgaactgtttctgacggaaaacaagccggagcagatgcaaacgagttcaagcacggtcaagaagagcaggaaaacgatggagctatggatctcgacgaggttgtcgaggatctaggagaggccgacagaagcgagttggatcaggtcagagccatcggtgatcaggacatagaatctctagcaagcctattcagagacattctctcttgtatgtcgttttcacatcatctctgccgagtccattctctccttttttaaagccagcaatactaatcatatcttaaactaccaatcgtaatcaaactcagccccagccccgacttccagcccttctaccaaaaccaagagcgctcctgtttctacttccaaagtcaatgggaacctcacgagctctccttccatcacccaaaaggggacacccgctaaagcgattcctacccgattgaacggaaatggaaatgggaagtcggcttcgtctcctttgaacgccgctgttggtgggacaaacactccggttcgagctcagcagggctcgggcaaacagggaaagaacggaacgcccgggtctgtaggtggaagtggaaagaagaggaaagctacttgatcgccgtctttcccctctgtcaccttgttttccccgtctgttctgttaatccctagtttgagagtgagcgacgtgaaagaacttgatgcgattcgatcggtctgtagatggtcaataaaacgtttccatttcttctcgttgagttatatacatgattccccgctcaactcgctctatcaatacaaagatgagggaacacgttttctttctttcattggcatcatcaacacattttcttgatagaggtaaaagtacggaaacgcaggatttggtagagatacaacacgactttttgaatacgtacataaaccagttagaagaagtggagaacaagaacaacagatagatagacatatgtcttgtgaaacaacaagaacacaaaatcctacaaagattacaacagaaacaaacgaatcatggacaggcaaaagttagggctacagcctgagcggaccatgtgctcacttgatcggactccaggacatgggcctcatgatttggctcgacatgccctgcgcaagcttgacagtctaatctcatccagtgttcccacaaactctcgcgtcagcttttttacttgaatacacagtggaggaatgaatggacaagatgagaggtgcagaaaagacagtacctgggtgacagtgtcgctccagccagaaattgcccacgccttttctcggacctcttttcgttcttgcatgtcctgtgtagatcgtaggcagaggagaagatgttgataattcacaaggaaagatagcgatcagtgagatggaacgaaacactgaacggtcctcgagcgatatgaaatgtgattagactcgccttgaactgccacatgtgatgaacgacatgaagtcttcctacttgagagaaccaagcgcccatcgggatctaatcgagcgccagacggatatctcagaaggtcacgaaaacgaccaagcttgtaaagtcgcaacgtcagccgaaacgaaggacgaaccacaaactttcgccgagcctcaattcctcgcttccaagcgccttcccactcgagcatcgttcccggcttcaattgatagcttctcaattcaaagattcctccttcggctttagcagacttctggtccatcgtcgggttatcatgcgccggggagaaggcaaactcctggaggagtgacgactgacgagaggccagtaaaggcagaagggcctgatgggcggtcgaagatgtcgacaacggcaggacatctgtcaaagagggatgtcggacaatatggtctgatcatatatcgataaatatcgtggcaaggcaccgaaacaacgaaggccaggactggatgaatacgactttctccgattgctagaaacgatcgaaatcggatctccgaggcaaaaaaaggacgtacagaaggtgtctaactctccaagaatacactcccagctacccatgagcaccgggcgaatggtagtcggttcggtcggacccggggtgagggtcttgaagtacgcttctgccaacttcttgtattcatcggttttgctcgggtgaactttatggactgtcaacagagaaatatcgggcaatcgtggaatggtttggcagcgtatccgacagtacccgagagaggaggatggtcaagcatggacacgactcagcatgaaaacttcaatctggacgatggcagattgcgcgagagacgagtacgaactgatgagttcatgatggttctttcctcttcctaccaactttgaatgctgcaacgtctttgcgtacacgccttcctggtcgtccggagctccatggagcagtgactgcattgtgagcacaatgcagtcagtttttccattggatccataccagagacgaacgtcagtcatgaattgctatgtgtgcagtgagacatagatgccgaagcaaaacgaggaacagaaaacatgacagaattgcgatcaagattacctgaacgaagccaggctttgaactttctcttgacacgaccgagtaggaaaacgacttggagagaccagtgagcgatctgttcaagagtgagctacgaatcattacttgttgtcggtatgaatgtgtaagtaaaagtgatgggatcgatgtgatgatggtagtgtgtgatggatgggaagcagacgagagtgagaccaagatctacggtccggctataccggtgaagtttgctggggctaaaattcattacaaattcgcattagagaaatatccgagaaagactacaaaaggatcaaaataagatagtattacgtaagcgtactatgacgacgccgtccctatcactttttatctacttctatatctggtcatcttctggcgaggacaaccaacaagctacagccatggtgccgtctcagtcggctggttcttctagcaggttagacgctcagaatattcttccggatccggagagccttactcccaaaaacgtatttatagattcggctcgtcattccctggaagacgaggataggagcgagaacgggcaggggagagacggaacagagtgtgagaacgatatttcagatttgactcgtaggcgcacacaacgtctccgacagtcgagcggttggtccaatctttttactatgaagtcagaggatataatgaacctgatacgcttgtcgtctcgaaacacagaaacgattcatgagaagaacccacaagccaagcctccttcgcagccctcaccgcctctcggcttcttcgatgtcaatacgctctccttctttataatattctccttgtttggaacactcgcccgactcggcttgaacgcgctctttagctatgacggccagtcggtgttccctcttctttgggcgcaaggagtgggctgctttatcatggggctcatattaggtcggaaagaggaaatcgaaaagtggggtggtagagagctttacgtcggcttgggaaccggtttgtctcaattttcgatccttcctttccctcactcactattgagaattgtgtttttctaagaccggaatcatcgttctctgttcatatccatgcaaacaatcaggtctttgcgggtcaattacgacattctcgagttggatgttacaaactttctccgcattcagtaatcaatcaggctatgatcgatcttgggttcacgacgtatgtctactcttttgcgaagggggaggaaactcgactttcttttcggtttcagagactaattgttcacaatcacatctacaatcacacaggccaccgacggcataacgcagacaattcagacctttgcgtttgcactgttttcccttcacctgggccgaaaattgtctcaccaagcacccttaccggacgtcttgctccaacctcgaccaaacccagggaaatctataacatcccgctcgatagtctttcttaccgctcttatcctgtacctcgctgtgctattcaccgtgatcttcacgccctcttcattccatcccggacgacgcgtgacgttctcgttattactcgctccaccgggatctattgtcagatggtggcttgctaggttgaacggaacggtgcctcgataccctttcttaggcaccctgagcgctaatttgatcgcgaccgggattctatcagcttcgtatctgctccaacgagtgcctggctcggtcagggtgaacgagattcagtgtcaagcgcttcagagcttggaggatggattctgcggttgtctgagcacggtttctacattcgctgttgagcttgatgcactggccagcaagacgaaaaataagaagccggatgaggaagggcggagggggatggaattcgcttacgggatcggaagttggggagcggggttagttgtagtggtgattgtgttcggcatcccttcctggactttgcccgatgggttgcagccggtgtgtcgatattgatcttcaattctctagactatcaatttctttaggcagtagactataatgccatcaatcaacatatgaagatgaacacacgatgtgtgttatgtatattctccagaatgtgttcgtcgacgatcgttactcaacgcgggaagaacgtctgactagccgctctaccatgtgggagaatagataagcatccgcgcgcccacgcggtctgatttgattaaccttctttctttctctacttgcagtccagcgctcgtcattgtagacgtcgttgagacgttgaaacggcatcgtgtgtgtgttttggatgatatacaacacagagacagcgcctgactgagagcatgagagaaataggaggaacacaaagagccacaagagatcttcaggaagaacatgaggcgagtgcttatctccaatcacatctagcgcgcaatccttcgtccacatgagatgatgacttattatagcatcatgtttgatacccgtagacacttccttttcactctgtatcatatggaggagcagatgtttagttcaagatggagtgagtgatacatggtctagtttacctgaaggaatggggccggtgaagcaagattcgaaacagtcgtcggagggggatacacgaggttccctccatctaatcgatcacgaggcgatgatgtgctgatagccggatctttatcttcgtctccgtcttcgtctttgtctgaagcttctgttgaccactcacatccatatagaaaaacataccttctcttacacccttccgtttactgacgaagcagagagaaatggctagtacttctaacaccgtccctcccgcatacagtgccgaccgtcccatcgctacagagagtccagctctcacccgaacggtatcaaaggcgacctcgacgtttgaggagtttaaagcaaataccaagcgagagccgttcgtcctcaagcgaagggtgcgtgccttgtattccctttgctctgttcttcaactcgttgcatagtgtgctcatgatagatcggataaatcaaccgactttatgcgtgtgcaatttatatatatatatgtgtgtgtatcactattagccaagggcctcggataacatgccaacagaatctgttctcgacttcaaaagagatgagtactttctccagagaccgatctatatcgcatcgtacgtcgcgggctggatggtcggttcgcctgaggttggtccaacactacttgccttcatggatatgcgatcagaatgaggctagacatcgtgatataatacctggaagatcggatattgatcacaatgagagtccttcccttcatgcctgtcggacagctaggaatccatgcgatcaaaaatgtcgagaaaggcgtccagaaagtcacaggggtatgttcgggtttgtatctggactttgcctttggcaaaacgttaacataattctctcttcaccttctcccgtgcctcattcgaccctcaacgtgtgatagatcgctccagatcccgtcggccggagacgacaagccaaggctgataagaaccgactggctgcgagagcagagcttgatgctctagaagaattcgccaacgaggatgctcaaagcgtccgcactcagcaaacagcagcgacaggtgcgacagaggtccgacctttgatgggtcagcattgaaggaaccagtctcaaacatttatgatggatagggttggatatgttcatcattccccaccttcctatcctgccattttcctctttgtatacctcgatccactgtagatatggagagcagcggatagtctgtcatctatcgttggaaaccgcacattctttcaattttagtcatcctacggcaatcctctgcaaccctctctttgtaatcacactcttttgaatgctcaatcatgtcgtcttcatcatctcctttctctttatctacctttccatcatgctgagcaacatgggtgttggccactctctgtcagtcaatgtcttcatctgatacacgactgagatcgaaattcgatcgaagtgaatggaaagtcgtccagttcgggcatgaccgttgttctgtatatatacaatacgaaccaagaggacccaaacgatctcgtcagtctgaagaacagacacgaccgaggaagaaaagagcagaacgcaagaaaagaaagacaacccaacaatcaaagggctgaggagaaaaacacatactgttcaggaccccaaacttttacacctctgacatgcgtatcttttccattcagatgatttcccaagatgacaacctggatcaagaaggcttctattggttctcctggatctgtctcgttcccttcagcgtcttcaagtactgcgtctcggagatccaacgtcatccatccgtctggcttttgaaattcaactattcgaatctatagaaatatttatgaacgtaagctcctggaggtcgtccaaatgctcaacgttgttgatccagagaaggaagacctacatcagtcaaatcatgaaatccagtaccggctcggatacacactttctgaggcgtatacgaatcgtcctttggatgggacaggtgtagcgagactttctgttcaccactcgcgcgagtcaaagggcgaatacgattcaatgagcgagggtggtctcataagaagatatgaggaaacatggcctgactagtatgggcacaaagtgcggaaattgaaggttgatatggtgtggttgtggtccttctgatctatgaataataaatagcccaacgccggacaatcaatcatcagcttgtgtcttgaccaggtcgaagctgagatcatgatcataacaccatacgaactgccagaaaacgttcggatcagggtctttgaggtctatcgcatgcaatcacaaccgacgagatataaaagtatcgagattcataatgtgattcaacaaagctgccattcccacatcaaagaaacgatacggactgtctacaccaaacccgaatttgtgagaggacaccgaccaggtcgcgagcttggagatatctcgagcatcttgtttggaggatcgacatccggttgtctataagcatctgtcatgatgtactacaaggaatcgacagcaaaagctcactctttggatgacctaccgtccagctcatgttccgcgcatggatcaagatggaggagaggacgcagctattgaaattattctttgatgtacattacaaaatatccgaatcattatcccgcttaacgccttcaaccctgcttacttcttccttctctccatcaacgatcaatcgagaccgatgccatttcaactcgttgctaccctttcgggtcacacagatagagcctggtccatcgcttggtctccctcggaaccaatccttgcgtcttgttccacagacaagaccgtcaggctgtatacttattctggcgagcccaatcagcttcaagttcgacctctgagctcaatctcgaccggtcaggatcatcatctcttcttctacctgttaagatgttctttcgttcggtatctaaactttcagacccttcattggccggttttttcttacaggacattcacgaacactgcgaaatattgcgttctctccctccggtcagtatcttgcgactgcctccttcgacgcaacggttggaatttgggaacgtcagcctgcttcccctagttcttcagcttccgactctgaccccgccagcgatcaaggtgaatgggagtgcgtgagcacactcgaaggccacgacagtgaatgcaaaagcgtaacctggagctccaccggcggtctcctcgccagctgcagtcgagataaaagcgtttgggtatgggaagttcagccggaggcagagtttgagtgtctatccgtcttgatggaacatactcaggatgtcaaggccgtactgttccacccgcatgaagagattctggcctcggcttcttacgatgatactatcttgctctacacggatgatcctcagtcggactggagtccgttccaaacgctcagaggtcatcagggaaccgtatggacgatggcttggagtccttgcggacgttggcttgctagcgctggcgaaggaggagagatcagaatctggaagcggacgtacgttctatcgtctttctctcttgctttctgtgctgctccggactgtgttccttaactataaactctcatcttgccttcagaggtcaaaccgcggaggcactattcaaaccagcgtttatcctacctgtatgtaactttctatcaggcgcatgaagttctacagcatttctgcatcagaattcaccgtacttgggcttacacccttgactttatatctccaaggacgtccactctcgaacaatctactctctttcctggacagatacgaactcgctttcccaaccttcatcggcatcgccatcgatagcaacggcatctgactcgacgaccgcaacaatacaagagaagacggacgagaggatattgttgggtaggttagcctcggccggtggagacggtaaaatatgtgtcttccaagctgttcgtctgtttgtttgtttgttttctgtcgctttgttaaatgcctttgtccgttccctgacttgctttcgtcttcattcaaaatggtggaaaccatagtctgtcgactcaaagacccaagattcattcgacttgacccttcaagcatgccaggaagacgcgcatggtgtatccgacgtgaacaccatcagttggtgtccccggaacctctctggtagcggtgatgagaaaaacacggggggttcggtattggccagtgcaggtgacgattggaatgtaaaggtctgggtggtttgaacttcctttttgatatcgtcaatgtagaaatgagaggatgaacgtcttcgttatattgaggtttcaatccgtttctcctcaaacttcaagaatcaagcaagatatcagaaaggtttttgaaaaatgaaaagggcgcatgaaaatccaacaacttcttcttcttctctcaagcatacataacacatatcacattcattgagttcgctcgtttgcttaggcgacgatctcctccttctcctcaatgacctcctcgatccactcctcaacaacctcatcctgctcctccttcttggtctctcctgccgatccctttccggtcgggtagactcccaatcgctccctctgatctcctaaagctttcctggcggcagtcaaccaggtgttccactcgtcgatcaatcggcgtctgtattggagaacctcggcagatccctgggtatcagcagcagcatcttcctcgtcgaacgttcgggagtattccttgagcgactttcggacctgcttctgctgatccttggggaggagcgtcggcggtcggggtcgccagaggaactgcttgaagtgatcgacattgtctcgcttgagctcctgtcccttgaaatcccagatggcgtatccagagtcggtctgtttcccaaaagagcaaggtggtaagcctctagtaattggtgtgaaagatcaagagcaaaggaaagaaacatacaccgggtcgccagctggtagcatgcgaagtcaagtatcgaccactgggatcccaagcgatatccgtcataccatagtgctccgtctgggaaagcaactgaacgtttgctccccattcaccctcggccttcttaccagccagctcgtcagtggtgaaatcgagatcccagaactcgatatcgcacttctgggaagactcgaaagtggcgagaacaacctgtcgtcctcgaggagaccagaagattcggttggaggtcttgccctcaagggtctctgttttatacaggtacaagcacgggtacatgaggataggtcagcattcaacccgagacataaaatacttcgataaggaagaaaaacttactgaacaatcggaaatctcccttcttggggtcaatctggtagaaagacacgttgtacttgatcgtgattcctggtccagggttggccaagttcgggtcgttgcaggtcacaataccgaatcgctcactcttgggctcccaagcgaaagcggtaacagggtctggatgtaaatgaatgtgcgaaagatatgttgagaaacttgaaaacttcgagaaaactttcaagtgggaaagcggacatggaaccggcgcgcacctttcaattcaagaacctcaacagggtagttcttctctcgcattcggaagatctccaagttgcagaacgtggactttccggacttagtatgacggtcgaccttgacgcaaaggaagtctccctgatcctgccagtgaagcttgcactgtttagtcgatgacacaaagacaaagagccccagattttagttatcaatgaaatcaagtacgtgtgaagagcaaagatggaggccgataacgtacgtcagacacattgaacaagttcttggttcgcaaaagtgttctgctggggaaaccgataagtgacactcgggcgggctggttcccaacctcgggagtccagtaagccaacacgttctccttctttccctttgctgccttcgctccagcagtctccttatccttctctccattggggcaccaagcgaaatcagcaacaccctcaatcttgatcgacttcttatccacgagctccatcaagggagcggcgtagatagagatctgggttccggtagtcaatcgagcgacgtaggcatcatcaggcgaccacttgagtgctggccatctgggtgctttgacctgaccggtcgacgaaggagcaaactctccagggaacgttcgaacgagtcgtccagtcttaatctcccagacagcgatgtggttgccctcgtcctcgtctcgagaaaacttgtcgggaccagtaggcgcaccttcaggaacagtgatgggataatcggcagtagagcaggtgatgagatagttttcgcaaggagagaaatcaatcagagcaacgtgagggtgagagtatcggttgaggttctggaacttttcacctccccaaagggccacaccgggtccgtgagtagaggcgaggaatgttccgagcggggaccaggaaaggaaataatctccccaatgctgtcaaggtataaatttgttttcagtaagtggtagaacgatattaaagggtactagatgatcaatgagaaaacgaatcttgtcggaactcacagcatccttgtaaggaatctcctcagcctgggcacctcgaccgttccagaaaacggcggcgctctgtccccgaagggtaacgtactggtctcggccagctgggtccgcgagccactttttcaaatgagcctgatgatcacaaaacgcaacaagttagcttgaacgtgataattcatttgaaacctattcaggacgacataccttgggcacgaaagccttctcctcgggctccacccactgagggtcaacgttggcgtatcgctcaacgtcggaaaacttgttgaacaagagcgtgctctttccgaacttgcactggtcgagaactcgagcggcgtaatcagcctcctgagcagaaggcatggtgaggaagaggaaactgcgaagtaggagtacgaggacgagttgtatgtgcaagatatgcgttagaatgagaataattccgggattaaaaaaaaagagaagaggagaaattgggcatcaacgacttaccctttggatgatccagcttcatcatcccaagggaagatgatctggtcctcagtcacattaacgttctgcttgttgaagagggcacagagtcgctccaagagctttcccttcttggactcgtcaacgactttagacacaatcaaacaagtaaaggattgagcttccttcttgattctcgaactggctcttccagcgagagtggcaagatggaaattgagaacatactggggacgttgtcaacgacaaggacatgctcaaatccctcgtccagctgaggcttgtatctaataggatagagaggtgaccgagaatgaagtaggcagaacaaatcgttcacgtcagtactccttgtgctttacgtgtttccatcgagttctcttagtcttgccaatcagaaagacaaaagcgtgaggcagaatggtcagaaacaagaaatctaaacacgaactggtcctcaatctcagtgtagtcgatctcgagatcatcgtcgaattcgtgatctggcacaggcatggtggctagatgaaggacaaagaaggtggagacgagaggaatgcttgtatgctgttcgagtgtcaggaaaaaagggcaaagagaaaaaaaacgagagttggtgaacagatcttgattacgtaagtctatatttattgactaagtgttcatttacattttcatttatttccaccatcttcaccttcttctacctaccattctttatatgcaacgagcagactgaccggttgttgatcagcaaggtttgtctatcagtagtttgcgctcagcagccgtcaattttagcgtgttgcgaacctcatgggtgactcttgggttgagataaacaatttggccgatacgggtcgtttgacgaacagctgttgtctcacaatgaatagttctttcatcgacaatcatgttctcgtcaactgaccaagttgtgtgcgctgaccccgaccgaaacgtcaatgagagatgatgcttatgtgcactctcaactaagtctaagtttatcttagtcatgtttgctgacttcaatgggatcaatcaatgaggcgttgagtcagaggtgtccgttggtcagatatatgctcaatgaatattcagttgtccgacaggtctggttcttgatgtacgtggtcacaacctgatgtgcgcattgtctcaacttatgtagattgatgctgcagaacaaacccatatcgaggatcgaagccactaggcagcgttatatcatgcagaacactagcaaatgagtgctggcatcaacatatgtagactcggtcgaaaagaggtctttagcagacagcaagcaagttgcctcgccttgattaagctcggcagttccttcgttccatcccgatcgctatactcaatctcaaagcttgctatcatcttcaagaataatgcgatcctcagctgtcgatacgatcgccttgaggttgtcccttgacccagctctgtcaagtgtttcactcttgcatcatcttgagtcgtttcaatcgtgtatatatgttaattctccttctacttgatgctcattcccaacagaataatctctatgtatcccattgatatgtgtctttccagaggttttgcttttggatcgaataaaaacgcaaagaagtaacaagaggcaattttgcatacaaattttgtcgatcggatttagattttacagaaacaaagtatttttttgttgatattgcgatggctggttatgcgaaactagattctttatcagtttaaaatgtattctcagtcgaatcttcaccggtgctcttcgctgtactagatcctccagaaacggctgcataaggacattcaaaggtagagacgaagtgtggttcatgtttagaatatacagttctcaaggattcgagagcagatagaaaggttgaaatttgatgaggacgacgaaccttcggtcaaacgatcgacgtactgagacccactcctacatggcgccagtgtatcattcgacatgatacggtaagaaacacagagtatcaggactcttctcaaatttcctccgggttccactagagattgatatcaaacaagacgaaccatttctgatgggtcaacacgtcacagcctatctcccgttccttctgctggatcaaattcacatatgcaagcattccttctgtgcggaatgcgctggcaagttcggctttgagattgcgtttgaaaagagaggaaaaatcagtcagttggtgatacgtctattcaagcgactccaggggaataatacatacaagtgacaacggcagaggcgtgcaatcctgccaaggatatgagctgaagaacgaatctacacattgatccggaagagcatcagatatcaaactctggtcatagagcgcgcatgataccagggtcaaacttacccttccttcgctaggtcccagacaaagctcttcaactcggactcgccaaacccatgtgcgctccaattaaaggaaggcgatagattgtagaccagcatcctttgcaagaacagatttgtccagtcgccttgtcagctttgtaactttacatccacatatgtgaacagctggatggttatggatgactaactttccgggatgaacctctcggatccgacgagcaaatgctttcgcctgagtcagatctggcttcttcgtttcgagccagagaagatcggcgtaaggagcgtagtgcagtgccctttgaatggcagcctaacgaatgaattcctaagagtcaaacaagttgcatatacaatatgtatacagataaattgggacaaatcaacgaacctctatacctcctttgaatcgatagaatccttcggcagttcgtaagctttcgcattcccaatgaacatcgtaccccaagacctgtctcgcgttcgccctcgcctgtgaatgacaaagacctagacctaatgattggtactcctcccatataagctcgggatcttccggaggagacaaggattcaatatgcgctttgacggctgaagacccatacccaaagacacaggtcgaaacaacgcaagcagaagacagcaatgtcagctcggtgatggatatgttatgggacgaacgggtaatagatgcaaagcaagaaactagccttcatcgaaggtcactaagcgattgctatcatcctgagcggcctctagaaaaactctctcaacattctccaactcatctgcctttgcccccttttcctttgctcggagaagatattccgcaagagaatgctctcttggttgagccgtaccaaggatgaaagggtggctattcccgcccgtaagacgagtgggttttgagtacagaaccaacaattggtacgctgaatatgctggttgaatcatgaggtaagcttactctctggcgtcgacgtcggacgaaatcagtcggctactttccgcgtcagttctagatatcagcctgatcgtagcatccaaaccaacactctgtgccatcagaatagcaattctgatctcgatgatctttttaaaattccatgtgcttacaatgtctctgcgcccataatatcccactggagcctggcggctgagagtctactgagatgctctccgacaggaacgacgatctttcctctgtaaatcgttcagtagacaacgatcaaggtgggattaatacgagttcaacacatctacattaaaggcgcttagaagcgcgactgagaaacatacgactgatgaccacattttttggctccattcatctggtcttcgaagtgaacggccgctgcgccctacagaaccatagaaaactgtgatcaagcaaccatagaatgtagacagctatgattcaaaaggctgtcagtcctacttacagattctgcaaaaagttttgccaatttcatgactgttgtcaccccgccgtgcctatgcggaatacttattaacacttcagattatactcataatcttggattcaagatgtaattctcaccctgcgtctccgtcggcgatgataggtctcaaataatctgtttgttccaactctgcacagagaaccgaaagggccgtcggcaacccacagggagttgtatattcaaccttaagagatcatttgatagtaaaaacagtgctaaaccttgaactgacctgccaatttcttgggatcagacgttgacacccgttcatcatagtgaattcggtcatgtaatgtctgggctcgacagagtcgttgaacttggttgggaacggttgtgtatggataatccctgatgatcgtatcgacgtgaacatcaacttcatcaaacctgtgttcgacatcatatattgtatctcttcaagacgataaagatcagatgaacttacgccaaatctggtcccaattcattgctacccgtggtcaatagggaagagcaagcccagccactgacatataccgcttctaatccagccctggccatctgggtaacctgtacaggatcgattgccccgatagtatgaaccggtttgccttcttgctcccgtctgctcaacagatcaaacaactttctcgagctctctagagagacaggtgggctaggtggaatagatccttgtttggaaatgacatcttctgcttggtacggcctttggagagtcttccaacgagatgtcgaccagcttgctgttagagattggcatctgcttgtgaagtcttgcttttccttcgcgaggaacgacgacgatgaccgagtgagtgggatagtcaacaacgacctaagtcgagtgttcagcataattttgatggtcttgtttgcatgtaccaagtgagatggagttgcttctttcaatcagatctcccatctctcctttatcgtccatgctttttacctgcctggctcatcgtctgtcgtcacgagaacataccggcccggaggtatccgatcaattacgtaacaagtgacttcggttactacccttcatagggaaataattctcgcttcaacgctttcgtctgaatccatagcatatcgttcgatcaatcaaacataaacagatatgtccagctctcctaatcctctacttgatattgaatctcccgaagctcgtcagatcagactaggtttgtcttcttgttatggtgtctctttcggggttcgtccttctatgcagatggacctgacttacggactgtgtttggatggctttatatcacctctcaagccaagctcctggcagacaacgcttcgcctcagttttcgacagagtcgagacctatcggaaaaccaccaaccacattttctgtcggacctcctaccgaacgtaagtatttgtgctcatttaaagaattagtataagacgtgcacgtcgatcaaagctcatacgtgctcctacaccgattacctatgtcgggccatcaagttctttcccgtcttcaggcgttcttacctcagatcgcgtcagcaaatgaggcgctcgcttctagagcacccgaggatgttgatattgaaaacgtcggtgaaggagaaagccaatacgtggagatggttcgtcttgcttctcacgaatacgaactcgacgtcgaactcacgttgatcgatattctattctgttcttctcggcatatctcgccaatttaatatcgaaaacaatctgaatgtgtctacaggatctaggactgggcgtgttcaatgccctgatggatggcaacactgacccttctcaatctgcgccgcctaatgcatctaataccgattcatcgtcttcggaagacgacgatgatgacgacgatagttcggattcatcagacgaggatgatgacagcgaggaaacggaagcatctgtcgaaccgatagcccctcggaaaaaagtgttaattgaagagatcctatcaaaagaatgattctcctatagtatttaaattgtttctatgattttagattgatcaagtacaaaagcgcgcgcatatgaaaaggaagatgaatataccaagtagattagctgaccaaagattacgagtcgatgctgaacaactgacatgtcgctttctcaaggtcatatctgtctggaataaccttgttgaatctcaatcgaatccagttgaaaaacacaactctctcccttcccttcctactcctacccatcctttcccgcgaacccagcccttgagctctttgccttccgccttcccactcatctctactctctctgtcttgattgtattgacgcgattgcttactgtagactctaggaataaatggtaggtgatccctcggatctccttaggtggtgctctcctgaatggagggaacgggtgatggtatggatacggcagatgtgtcggtgtgaacataaacttatttgaagatgaagacgacgcctgagtggacggacgactagggatggacttgagacttggattggtagagtgagaaagaagttgggtagtgaggactatgagaggaaagtatcgttgacggatagacgtcagttggagaaggacttgatacatcggttggttcttcagcgcgtcctcttcatcttccactctcgtcttctgcttttcagtcgtcgagttgtctttctccctctccgtctccttttccttcacgacagaatcctcgtcgtcctggtcagcatcgtgatcaccctcgtcaagtgaagaaattgccttccgttttttgctttgcctctccttcacctctgcatcccaaaccgctcgatctgcccaaaatgactctccaaacccatcgatcgccaccaaacctacttcttctgccccttctaattcatcttcaaccagggtttcgaagcttttgagagcaaacgcaagtccccacgtgccttggctctcactgatcgtgcataaccgcactcgcaatagacacatttttatcagatcatcagtctgatctcggagagctgaattgaggtcagatgaggagaacgaatggagaagggtggattggatatgagatcggagaagggaagacagccgggtaagtgaaaagggcgcggaagtgagtgagtagatcacggcggagagagaaggaccaccaaatttaatatggactggttctgttgtgccgcccggaggggatgatggagagcggaagaaaggatgtgagaagggaaggatgcgggagatcgtcaacttatagactagctcggtttttcctttttttaaaaaaaataataacgacggcacgatgcaaaaaatcagtcctcaggtcacctttgacagaccgtttagaaagatagatgatggacttaccacatccggaggggccttgaatctctatcatgtctccgttcctcaatcccctatcattttcgtccctttctcccggaagcacagcatctttgctttgttctgatggctcttgggtgtcccctgttgttaggttatacgtcttgattctttcttgttcctcaagaatgaccctatctaactgtttgatgcctgatcctgcaggtactgtgaaatgttggagacagcacgttgaacggatgtcaggtctctctggatgaatcaaactagcaatataatcggcacgaaagaatggttctttggagatgatttatgtatagattgtgacggcctgagccaatagaaagatgtatgacaggacgaacgagcttgatcacgtcgaacggcaaataccagatctctcaaattagaccgggtgatctgctggaggaatgctcttgtattttctaacgtcggacgagtctccattcctgagctactctacttgaagatagaggacaaacaaaagagttggttctttgtcgagtaggaatgaatgtgggaaacggttgggtagatgggtcgtgttaaccgatgcacgtcaagctgttacgtcacgtcgtcatcattctgtttcgcaacggcggtgtcatacgttcagtgtctctaatccatcagcaaagacacggtaacaatacggtaggaaggcaaaacacaaattatgaacgggctttctagggactctatggtttaattatacagaagagttttcggcagaaagaaacaaaaacaagaacaaaacgacaaatgctgctgccaacatcctggcgtttctataatgagagctataaatattctatatcaagacgacaaacatctcaaacgagctggttgtgcttcttcaagcactgagcgactcgcttgggatcactctgaggagcaagcttcaatccctgttgctcgccccagattcgaacgtctctggggaagtcagtgataagacctgttcgattgacagaatagaaagttagtgttgtagttctggatcctgttcaccaatattgacagaacggggacccaccatcgattccaagatcaataaggtacttgatcacgttcaatcggttcacagtccagggcttgacacctactccaagcccgtgggcagtgttgaccatgtcagccgtgacaaaggggatgtaaccggccattgagacatcgaccaccgggctaccgtaagccgttccgaccggggagataaagtcagcaccgatcgaggcggcagcctgagcgactcgggcattgggggtggagccgttgaacgagtcaatatcgattctgtgttgcaagattggtttagacagagtgagtttgatgagaacgacgaaatttaaacaacgaccgctaggcgagatgaaaacatacccagccaaccagttcgagggtccctttccgtgggtggtgatgtttccggcggctccggaggcgaggtgggcgtagatggtggtatcatcacacttgtttcataaattattcaaaaacgaagaatcagaactgtatcctgtctgtagaaagagcgcgcgtggtagattgagacgaaacgaaatagaaatatactcacgagagcggaagtcctgaggtcaggaatgaccttcttggagatgatgagcgatcgccactaaaagaatgaccacagaacaattgagatgagtaagaacgtgattttgttttacaagtttttagtcgaaagaggatgacaacgtacgtcgaaagactggtgggtgatcctgtcgatcaaattccacttcttgtagagggtctcgtaggccgcgacgaaatcctcaggagctcgagtcaagtttcggaagtcaccatcgactttggactcgatgttgtagaggactgaggaagaaagtatcggtttatgtcgtacatggttagtcaacgaagacattttcatgaggaatcagagatcaaagtcaaatctaccaggctctgaggttgcgcacttgacgaactcgaaaagctcttccaaagtggagaccttggtacctgtaaagtggaagattgcgagattcgtgagctaaatagataaacggacattgatgcaagcgcaagtcaacgttgaatcgagacataccaggaacggtgatctgcaaagggaaatcatccagtcggagacttccacaatcgagagtcttgatctgtgccaaagtcaagtttgcgatatatttaccgacgtaggggtacatcggatcgttgtcgaacacgggctgggagtccttgcacttggtagcgacaaagttctcgtcgtgccagaccactggagtacgatagagaggcagacatgggtcagatccattgtgattgactgctacacagcagtgcgagagagaaagaaagtacgtaccgaggtgaccatcggcagtaagtccggtgtcgagttccaaagtggtaagtccgttaatcaatccatcggcaaatgagggcaaagtgttctcgatggtgtgcttgattaaggagatataacccgggttttaacatggcgcttcattcgggcatcaataggtgacgatggtacttactcctcgacctcctcgatgaccctgaagatcgaagtacgactcgtactcccatctgggtttgagggaagattttgaaggagcggcagccacaaagctagacgaagtagccaagagagcagcaaaggtcaaagcgctggccattctgtgagaaattcttgttgcttgttaggggagaggagggaggatgatggagtctatgaaggagattttgaggcaaaagaagcctgttcagatcctgagttttatactgtagtgaacggttaaactcatcacttcgagccaagaacaatgtcgcacgaggttggtaagcgtgaaagaagatcagcatgtgggtgagtatcacaaagaaaagaagaaaagaggtgattccgagtgagcagtcaacgaatgtcatccactgtaggacaagagtgccggagagacacgttgctgttgtagccggtttaatagaaacgtttgtcggcttttagaacgcttgacgttttcagttccctcctcagggagatctatcccacttaaccgttccgattatcctgtttgcacccgtcgtgtgtttctcccttttttctctggcgttcttttcttttcgcctttagcaccgttggtgatctatgggtatgaccgagaagcatcatgttggacgcaattgctcacaactggagtgaatgtgcaagagattaccgcgacatcgaatcgttgatcaatctctggatgctgagtgggtgagaattacacacagagcacatgcaggtatgcagggcttcaatcctgtcgttctcatccattgttgtgaggttagatcggatggtcagaacattgtgaagctctagcaaacgatgaactaattggccatattgtatagagaagagtagaaggtggctcgcttagcgatgccatttgaacaagaatcaagcaaagaacaaacgtttcagccaagaatacaatcctgagaacatccttttcattgtttccttacatgctcaccgtctgactgaccagtctaggacatccccctctcgacgacactgatgaaagcacccacaagaaagagcaaaagtgacgggcaggtagaccacatacggcggtatcagaagtggaactcgttagggttatgacgcgcctgtttgttcctccactcgtgagaccgatcttgttgtttcttcccctcccgcatacatacatcatctttcagtctgtatcttctacagttctcatacctagttatcgttcagaatgatccttccttctccgactggttcatccaaacgctcactagtgcaaaagaagactccatcgtcaacagtcgtagcagagcttccgatccaatcggtcttctccttccgtctccgaccaggctcttccatagctgtacgctctttccttccaattttttcctcttctcgcttcttctgatctttatacagggctcatgagctgaggctgatttatacaagaggaaaattgcatgatttctaacgtcaggaaaccgagatatacccggaaactgtcgacttggacaactttgatgggctgttccaactctcagagtatctcgaagccagagttcgaagaggggatccagcgagagacctagtggttgaaccctgctcagaaccgaccgagccaggggatgatgcagtatcagcagataaagatatggtacgctactctttcacctctcttccatcgagcttcttttccctagggatgctaatccttgcttgtttgacgcgacacagtggctatacgtacacatcttgtaagccttccttgtacatcagtcagggcatcactagttcgctcgtctcatcagataatcccatggctttgttgataaaacaacccgatagacgtctcccaaaagacctcacaacgctcgtaacatctcttctcgagacgtgtcgatccgactcgtgcccgcagatgaaagctggtgaatggcagtatatgtgcgccgcccattcctccgccaaggtaaatgatggggttttatctaggcctcaggcatcttttgtgaagagaggagaatgctgaccctgaatactgtgtaatcacaccatcctttgcttatccagagttgtgctgcaactagttacatgacgcacaccttggatcaagcctgtcaattattgacatcaccaaaactctttccttctaggtgaggtggttctttatgccgtccgtcaaatagtgcaaactgacaacaatacctccttttcattctgccatgtaccaacatgctcagattatctattcctcaaacctctctaaacccacttcgccaaacggccagaaggctaagccggatcttcagtcacgcctatcaccatcatcgagaagtgtttgaatatgcggaagcagaaacaagtctttacgagcggttcatattactctcagagaggtacaatcttgtccctcggacggatctcgccattccttctgatcgcttcctctcctctcgcaacctaccctcgacttcttcctccctgtcttctccgtcaaactccttgggagagtcatcctataagacgagccaatccgcacatagctccaagaccagaggagtaagtgggcagatctcgacagacaggatgggccaatttaaccaagactctcgaggtagcgacaatgacgatgatgacgaaaatgtgttttcgaggggccccagatcacttgaacgcgacagatcaaccacgggaggaagaggcagggcgcccagagggaagatcatcgacttcgaaattggcagaggaacaggatcagagtcagagtcagagtcagatgaggacgatactgaagaggatcggcgagaggaagacgttctggatggtgagaagctacgggcgtcgatcggcttggagaatcaattgtcgattccgagcaaactatccgtacccgcatcatcaccaatgccatcatcttcgccatcaaagccgatatctacacataagccaaggcgtatcaagccaaaatcgacaaaattaccaacagctagatcaacaatatgaacaagaagcctgtcctggaaaacggaggggggagggagcaagaggaaatccgagagagttaagaaacgaaccaatactatcagaggacggtcaagagtgcaagtgcataccttaccttctggaagatggacgagagggacagtctcatgccttggctgctccggcaccgtgaacttcaccactgagaacggcgaggatgaagatggtgtaggattgagatcgttgattgtttctgtgtcagctcggaaacagtctgcgccatcctcttgggctctgttttgttctgtccatttgtctgtctgtctgtctgtcgaatgatgaggactaaatagaagccttctctcgacaatcgagctatagatgatataacgtgcagtatcagggaatacatgggcgtggctctccccagacactttgtttcagtagctcaaaattagaatgagaagattcgtcttctaagaagatacatgttgcatattcgtatttatttcactcttcttccatttcctcttcgtcttcatcttcctcctcttcttccccctcctcctcttcctcctcctcttcctcctcctcttcctcctcctcttcctcctcctcttcctcctcctcttcctcctcctcttcctctagctcatcttcactttcgctctcagtctcactatcgacaacctctccctctccacctcccgagctcaacctaacaccctcagccatcgtcaaacatgtcaatcttgttccgttagtgtcgtacttgcccacaggcagaatggtgggtacgtccgacccgtttgatgtaggaacgttgggaagattgcttaagttatagaggttgatgaaaccgtcggatgagacagtcgaaaggagcggatatagcacagcaagggatttgacactatgaagacaataggaagtagaggacaagcgcgcaatcaattgagaagcatcagaggtcagtgggtttcccatccaaagaagtggttgtactgctagagaagacacataccgattcgtgtgcccacccaacctggcgacctccttccattggtcctctacatcctcctcctcctcttcatccttagcagcttctaattgcttggattccttgctctcaaacttctcatacaccctgacgtaaccttgttccacagcagcaaccaaaagctccctcgtcttttctccctgcttgacgtccaagaactggaaatcatggaaccttttcgggttctctatcgtctggaccaacttcatctctttggtgtacacatccaacgtggagacagaaaggatggcaaactggtcaccggagggagcgaacctgacgatctcgccctccttcccgatcttgacacctcctccaggtttgcccttcatcagatcccacattcgaagaactcgatcctttccaacagttagtgcgagttttcccgaaggatgaaccgtcactgagttgacccgaccgacatgacccttgaacgaacggagcagggtccagtctcgagttcggaacaaagaaagcgtcgagtcttcagaggtagtgagaaggtgggatcgggatgggaagtagagcgaagtgatggtccctgaagatttaaaagatccaatgtggacatagataaaatgacagagcgatcttagtattagcaacaaagaaaaaaaaaggagaaaaagggacgaagcggctgcagtaaagattcggacgaaccattgtgattcatgagtccaccgacttcttttctccttcgaagatcccaaatcttgaccatctcatctgaactacctgtcgccaaccactttcctccctcggaagctgccactgtcttgacgcaagcctgatgagccgggaagataaagaccggcttcatagtgtagtcatgctccgcctgctgctctccttccgccgtcggttccggaaggagaccagacaaaccgtacaaaagtttctcgtatgaaccagcgacaatctggaacgttcgaggaccggtaggaagaggtgctttcggtttcttgaccttgggagcagtcgtctttgcgctctctgtcggttcctcatcgtcgtcctgagcaatctcggactcatcagcaaagggcgatttgtacggaatgtccttcgcgaacgttagcttcttctcgctcttcttgggcttggtaaccgacgaaggagcagcagacttcggcttaaccggttgagaagccttcttgggtccactcgatccaaactttccactcttcttgagagacgaagccgagtcttcgtattcgacctcgacacgagccttcttcacggcaggttgcttgttcttcttgggccagtaaccctctggtttcgattttggtccaccttttggtttaggcttcgaggacgaggatgtgctgacaggggctttacgtttaggagccatggtttaagatctgaatgaaaagagttttgagtgtaggcgagaggtataggtcgaattcaacttgaagtgagaagcttgacgattcaaatttcggtgattacataatcccggttaacatcaatcttggttacataatcaaccccgtgcgatagacacacagcggcttcaagcgactttcttcctctaacgatgtctaccaagatacattctgcaaacctatgggcagacattcaggcatcttcatccggttagtagtgatgaggtcgctgtatatctgtatttctgttagagaggctgagcttgtgtcgtgtcttgattggtaaagaaatctctcagttgcttgcgccctcaacgttatcgactgatgacatacagactattcagtttaaacttgcctcattgaagcggactattgtggttgcttcggattacatacctaagtatgatcaacgtaatgctgaagctgtcagtattctctcacttcggcgtcttcaattcagtagtggcatctgaagcagaatctttggactttttctcaaaagaaaataaaagagttggaaaccgagtttgaatctaaacgaacggcttcggctccaaaatcgaagttttcattcaagaaacagcccaaaccgatgaggtccactggtttagtctcggatgtgtctaggccaactgagtccgttgagacgccgctgtcagcaatctcgataccaagcacagatgtttccattcaccgtctgacgtctcaatacataacgcttcccactatctcggccgatggattcggtctctccctcttcgatctgacccgatgtgttatcgatttgtttccttcaaacgagcgctcttcaaccaatccgagcaagatcaccgccttgcatataaagaacctcaagcaatgtgttcttattgctcccatattggaaggaagcataatgatcagcgattgtgcacaatgcgtactcatcctaggtggctggcaggtacgttttgatacatcagccctaaccacaatcgagacctccaggaggctatctgggaggggatttctcccgaactctaagttgacgttcgcttattctcactctatatcaaaatcatgcatccattcgatcgatcgtctagttccgaatgcatacttcgagtgattgcaaggtgtttatacattctgctcccggaagctcaacgcctatcattgaaggttgtcgctcgatccgctttgggtcctatctgatcaacgatcgtgaccctctgggctcccaggtttgtccttagatcattcttcctggttgtaccctcggtatgttcgttgaactgatatgttcacattgaactacgatgtctgtaattcaacgtttctgttcctcctaaatcagcaatctctcaaagttctcgacttttcccatccaaatccgactgtgccgtctccgaactggtcgatactgtctgtcgaggaagagcgcgcgatacaggttcgattgccagccctgttggaaggcagatcccgaatgaccatagaaacaaacttgacagagtctatactagattccgtactgtcgacataatttcagactttgtatacactagattcaatgaaatgtatgctctatgcatgtgaaacacaacacagcgacaaaactgattgatggcgtgaacacgatagtcaacgcttcacttttttatcgttcatctcatcttttgtcaacatctccacttcagctcacccatagaaaaaccatctcatgctgcagagaggcaactgattacaagcactaaccaaggcgcacataacagtgaggttcggaaggatacactgactgtcttgtaagacctcatgctggaactgacgaggttagagttatgcccgattatgggtccacagatctcatttctaattctgatcaccaccctcccttctctgttatgctccctgtatcaataatgtacgtcttgttcttggaaaagtcttctttataaagcggactgactctgttcttattgtctttcaaatgctaccgtcatgaaacatagtgggataggttctctcgggactttcttcacttctcaattacggttgatacatccggatctcccaatcaaccttctgctcaaatcttcaacggcattgcaaacatttcatgaaccgtctgcttctcggcctgcttcatcacttctcgtcagagatctggtagggtcacctccgatcatcacctcatccttttccgctacctccttacatccgtcctcgccttcatccatcacatcagcagaagacgcgcctccgatacctattcttctttcaaccctaaaatgcacaaaaatcgtaccgaccctcaaacttctcgcccctcggcttcgttctccgtcttcaaccattgtgctccttcataatgggatgggaatctacgaaacactcatcagggatgtctttcctgacagaagttctcaaccgagtttcatcatcggcaccacttcggtcggggtgagactcgatgaaccttttggggttacactctccggtctcggccagtcaacgtttgctctcgttccctccgagaactctactccacgttcgacttcaacgcaaaagattggacaagaacatgaacaagacggagacctatcaaggatgccttcttcaagcgagcaagcactgaaatacttgtccagtctgacgactcatccgaatacccatcctgtcgaactcacctcgtaccctacgctgctccctcagttgttactcaaattatgtatgaatgccttgatcaaccccttgactgcccttcattcggttctcaacggtcaactcatcaccgacccttccttccttcctctccttcgagagttgatatccgagaattcaaaggtgttgaccaaagctcatcccgcttatgcggctttgttcaccgaggaagagctgacgagacgtatgtgggatctttgtgagcgaacgaaacgcaatcggagttcgatgggtcaggatatagaccgcaagagggaaacagagatagagttcatcaacggctacatatcgatgttgggaaggaccgtagatgtgaagacaccggtgaacgataggttggtcaaggaggtcttggagttgagtgaacgttcgaaaagagaacaagatatgaaatgatccttttgtggttcctttccatacaagtgaacaaccggtgttttctttgttcatcaaaagacgggcaaagtcgagatgacattgtgctttgggattctatcatatctcgagaaagactgtgtccatgatgtgcacagacgggcggataacgagaaggagcaacgcaaaaagtccttgtatggggagaaaagaaggagcaaagagggagaatatctgaggcttcccataaaaaacgagcgaataagaagaaaagatggcgcgagcaacttttgattgtttgtgatagtagtacaacgagcaacgaggggacgtatatgtatttttgtggatgcataggatgcgcgtgtaaagtcaggcgatagtttgcaaatggtccgtcgagaaaacaagtaagaaaagaagagggccgggagagtaaaagacagaaaagagacacagaacaaaacgagagcagaacgcttttcaggcgagcatcaaaccgcttccagccatgacggcaacagcaacagcaacgatcagaggcatcatctcacttttgaattggggacctgccccgctcaaagacgatgatgtagaagttgtagaagctgtcgatttcgtgcttgttgaagtcgagccatcaccgccagtatagtttgcgactgtatttgtcggtgcagatacatcgttcaattcggcggcaacgttgaacggtgcgaggcctgcagcatcgtagaagtcgaggaggatgaaactgtgtgggagcaatagatcatcacaaagaggaggaggaggtcagttgctgacgatcgtttgctctagatataggtctgaaagacaaacttggggctgcgggcgtaaatctggaaacagttagaggcgccctgtccaacactgccagttccggtctcagcattggtctggttcaacttggatttgttaggagtcacgatggaggttgaagatccaacctgacgaccaacaccacggtgatacagatgggagagtgagtgaactcaatagtcagccactgatgtcacaagatcaacttgtataaggaaaacacccacctggtcgagatagtggttagtcaacaccagttgattctccggcgtcccggttgatcggtttgccgtgcacgggaaagagtcttccaccgcgttataggcatctggaataccaacaagtttagtcattgctagccttcacacaaagacagggttggaaagagaaacaacagaccttcaaccacattggaaaattctacgagttgatcagacatcagaaaaggtattcaagttagatgtatgttcgccaatatctgttgatcgacgtgaaacagaaaatgatcttaccgtcgatgatatacggcacagtagtgaaatccgcagagctgtagaaatagagagcaaaacagggctgtcatgagaatgcgggattctaccgacgtacgtacgcggactcttctgtagccaaacccagcgttagctcggatgagagaatgataacttacttgtccatgaacgtgacgactctgaggccagagtcaatcatcgagcccaacgtgggccagtctgcgacagaggttgttgctttcgttggcgcatacgagactttgtctaaacctgacgtctatcaacgacagacgggatatggatcgacagagacagaatgacaagagaccgttcagggatatatggatgaggacgattgagaggatcagcaaacattgatcgctcggttacttagtacgcgtcaagacaagaagatcgagagaatcgaaagagcggacctcgaaaacggcaccgtacatagaggcgttcaagttgtcgctgttgacaatcaagatggacagaacctcatttgggtttgcgacaacccaggtgttgacttctgtcaggtaatctgaaaagagtcctccgtccagaagcaagcacgacctgggagatcaagaagcccgacaaagaatgagaataaacttagtctggagaatagtcaatcagacacgacggctgactcacgtatgacatagatgaatcgatccatcatagctatgggcttgcacctgaagcattctcactccgtcattctgcgcagcacacgatattcatgattgaacgtaggttagtttcttgacaaaagcggagtcctattcagaaagacccggggagagagggtacgaggaatctcaagagtgctcaggacgtacgagttgtgtcgtgatgttttgatcctgtgaggatcaagtccgtatgcgtttcacagatcgtttacatcagccacaaacatttcaactccttacataaaagctggaatgtagaggtaggaagtcgaccaacctgattcgcagccacctgggttgcgctgatcgcatctgtgagattcgattttagatgagatttgacaaccataaccaaaaaaaaataaaaatatcatgagagcccgtcagtccgtcaattgacctcatgaaacacttattgcacatgagtgacatcggaggcaagacatggacgtacaagaatcgtgactcccgatgaacgtaacatttccgtagcttcgatcgcatagctcagcatgcccgttgcagactgaatatgcattaatgtcgaaccaacacattggtttgaagatttcacaaacggaagaggcggtgtaaacaatgctcgatcccaaatgagattacaaaagtgaagaggaaaagaacaaaccggaggccctaggtttgtaggacgaagcactaacaagtccgctattcaacgtcgaagcaaccagagcaaaaggtagcatggagagagcggaggagatggtaacgatcatccttgttgaacaagaaaacaaagatagaccgaaaggatggagtgaagagttgggtggtggtaggtaggtgttgaccaagccagaagtagatccagccagatcaacaccaagcacacttggaaaacacaagctcgccgcagttactgggcgttcacaacattctcttacacatacaaccgccttcttattttggtgttctatttcaagtacagacgttcaaagagatcacttctttttctcttttctttcttctttgaattttattttgatacagagatcgttttagtttgagagaatattgtcacatgtattctaattcgatcatcatgcttattttcgaatcaacccattgactcggtagatgactgcttctgccaagtcccagtagccttctccgacgcctctgaaaccttcgagaccaagaacatccgtcccgtgccagagtgtatgatgagcaaagccaaaggtgatccctaggccgacaccggctatcacctgaggagccgtgtgatgacctagtcttatccgagaccaacagatgagagttccaagtgcgagtacgctgatgctctgaagaggagcgatctgagctgtagtcaagacgatgtatgttgcgaagtctaggaacacgagaccagcggtgtcagcatactttaggtttcagtgaagggttaacttggaaagaggactttgagggctcgacatacaagagatggtggtgctgtgagtggagggcatcccatatgtcgggatcccagcgattgatttaggaacattcttgtataatacctggttcgaccgcgagggcctatggccatccggccgggactgcctgaagagatgtttcattatctttgctggcgaagcagttgttaagtcgaaaggtgctcagccagcttgatctgaagttggtctttctgcctctgaacgacaagcgatagtaatccactcacctgctgcagaagcggcgatggctcctccgatgaaccatatcttctcggccgaaggagaacgtatgaaccaagctgccgtggcggaagtcacgatgatgtttgtctacaacgtttccatccaagtgtcacagttgaataagaggtacccatcagctctggagaactcggttgcttgtcaagactctcgatgcttacctcatctagcacccaaagtgtcaattgaccgagtttagaatccatcttgaagacaaaaccccaaaggtcagtggatcaaacgagttcaagcagggctgggtggtttataatagaatgtttgtgccgactgtgccgtcgatcgatgtcagtcgggatcaacgatacggcgagtggctgggatggaaatatatttgggtggataaacatcttcggcggagtcgacaatcatggaatcaacattggtgcgatcaacatctccacggcctatgcagttatcgtcttatgaagaagatcttatctcgattagatagatcagagcatgtttatcaatcttactagatatatcgccatcgagtttacccccatcgtttttcctttgtttcacactttgttatctctttcctcgaaaacccgcctcttgttccatgtctcgataaacgtgatgccccgtctttaccattctctactacatacaacttaaatgcgagaagaacaggaccgagggatgatggaattgataaataaacatggtcggatttaatgaagacaaacaaggacagcgttcgagccgggcaggacgagtgtctatttggaagatccagaaagaaacaagctgatcgacgacgtttgccagccggcaagtccggacggggaccgaaggatgataaacttctcatctgaattgatcgttcgtttcctttttttaattctctctgcttctcttcctcttccaagaccagtccggtgtgtctagtaaacggaactaaagagagctggaatgatttgaaactcattctgctttcttgtctatcccagcatgatcgcgagggagtatcaccgggtccagattgactcggtgagcggtttatgccaattatacccaaggtatctttctcttatcaactatctctcatgagaaagacgcgataagtctgataaactgaaggaaaggaagtgagcacaatggaaagatagacgagatagcggaactcaggaaagtatagcaaatccaggaaagtatagcgcacccaatggaaacagaaccgtgatagatctgtcgttcttgaacaagagcagcatcaactcacatggaaaactcgacatcatgcaggggcggcagcagaagaagaaggagctatcggacagaactcgacgcatcgtgctaaggacattctagactttccagacatctgtttacctccgaacgtgtttcgatgccgtctgttctcatgcacatgagcgagtcgtggatggcttgtatctggtgggatgagcgatgccggtttgccctctcctccaaaatcatgggccgcctcgtaagaagcaagaatgaagggagaacatgactacattcacaacgtatacattcaatcctgtgatcttctgttctgttgctgatcagagagatcctctcggattctggcctcgtgcggttatatattctttccttcttcgtctccttcctttgccgcctttttcttcactggcttcatatataaatcacatctcgacgccacggcagccactcggatggcccgtcgcccggcaaatgaaggtagaaaggttgatcgacccacaggcattcctatcacccttcttagtccttcttcttgctctgtcttcttctccatcttccaatgcaccaggtgatgagacaatttcggcatctgagcgatttcccttacccacctgctaatcaaccgtcgactctctgcctgtctccagccttcttcccatcttggtcagacacagtcttgtcctctcgaatttgcattgttttcttgccttttgccttatttattagatccttcttgattttcagccctttccaaaaacaaaaaaaaaggtcgaacgtgtcgattcttagatattgttctttttttttttttttt

SEQ ID NO: 495 - DNA, 3836 bp, Xanthophyllomyces dendrorhous
tccttttcttctgcttcttctgcttcgcttccttgtgcacattatttatctcatgtcacctcagccgtatgtatatattaatgggtctgaaacgagttctactggagtgcataagcttgactgatgctcatcattcgtggcgtccagtcgtatgtttacatcaccccaccggcgttgactgacctcgtccgtcctggacatagaaggtgagaaccaggaaagccacattgatagagataccccctccatccaatacccgatcgagggaacggttgcaagaacttttttccttctataaagatcaaactatccatttcgacctcgtacaccgttgttcttctcgcttgcaccctgccttctcccttctcgctcctccttctcttggtcccttcatcattccctctacgctttctctcgttgcccgtctcccgtttcctctttttcttcttaaaagtcttcgatcatttctgttctgcttcgcacatcgatccagagagttaaaggtgtgatgatcaaattgctttagccgttttgttttcctatcttttttttgttcgagacaatcaatcattaacaaatagcgcgtatttcatccgtccaacgtcatctctatccgttgtcgccggcatcttcagcaccatcgtcattaagaacagactttcgaagagagattttccgcttccgggtcttgcctcgatccttgccgctcatctggtgtccattctcttaccgcttgcacgaatattaattgtcacaactattttccgacggccttgacgcctgtcatcgaaacgcgggaagcctatcaatagttctcacataccggtcttggctcattcggtctctcggcttcatccacaacatcgccggtacgtccggatcgcatacttctctccggaaaaccttctttccgagtttcctttgcgatctacctatagtctacttcttggtgttccatatgttcattttgaatcattcctccttcgcgctcctcaatgttgctctttcttggcccatatagaggaaaagatctcgtgctgactagactgcattactctgatcttcatcattatcaaaccttgtcaaccttccggcctaactcacgactctatttcccgctggctctcccgttgtcaatgtcgatgtcgatttcattgtcattatcggtgtcgtcgtcgttgttcgaattctctaccctggattctcgcgctcaaacccacacccgtcattcgactttcctgcaaacagccccccccttttgccaaccctgcgcttttcttaatctctgatacgagctattttttctccacggcagacagccgtctgtctcccctcacagactcggcgctcctgcatccttatttctttcttgtttcggcccagcttttcgacagtctgctttacgttcgaccatcccatcccgctatcaagcgaatatcctgtatatataaaggctactccggccgacagtatttctcttagttaaccggtttcttcttgttcatattccactccagtctttcttctctcctcttctgtcatcccactttctctcggtttctatccgtcatcgttcggcgcttcggttaatctctcatccgccgatccctaacaaagcttcgagacttaccttcattccgtcacaatgggaaaccaagtttacaacgctgccggttcagccgacttactcggactcacgatcgataacggaaggttcgttcgagtgcctttttttttctttctcttttcttatttgttctttccttcggaaaacaattctgtttgatatctcttacttcatactcacgtttatgccattcatctgttcgtcctacatgtgctgttctgtctgagaatagattggagtttgtgtcgatcctcggatctggagcgtatggctgtgtctatctagccaggaataacggtgactctggcgcagaatactatggtacataatttgaatctttacatcatttaatctcgaacgccgcgatgtccgagacgtgtgctgactctgcgcgtcatgggggacagccgtcaaatgtatgaacactgccggactggacgacagacgacttgaggtagattcctgtgccccttccgttaggtgtactcgccatgactgaccatcttcctctttctgttccgttcatagtatcagcaccgagagatccattaccactctattctctctgcccatccttccatccttcatctgtacaaagcgatatattctcccacccacattttcctcgttttaccgtactgcaactcgttggatctgtttgctcagataacatcgaacaagacgtatctcacccggaatgaactcatcggaagcacattcattcaactgttggacgctgtggagtcttgccatacgaatggaatcgcccatcgggacctgaaaccggaaaatgtcctttgcaccgagggtggtcggaagatccacctcgcagatttcggattggccacgagggatgcttggagtagtgactttggttgcggcagctctttctacatggcacctggtcagtcctcactccttgattgcctcagtcttttgcaacacatgtctaaccaacattccggttgttcatttcctcccctttatttggattcacctcttccttttctcgcgatcagaggttcaactagtgaactatgaaccaacattttcacccacctacgatccttttgctgcagacatctggtcgctgggaatcatcttgatcaacctggtcacctctcgaaatccctggtcctcgtctgtactcaccgacgattccttcgccgcctacgtccgcaacccggaagtttttttccaatcgatgcttcctatctcggaccaggcgagcaggctcttgaagagagtactgtctgtagacccaagaaaacgaccgacggtgatccagctaaagagttgggttcggttcgtcgataggtgggatatggatgaggaggagttgagtagagcaaaggatgcttgtttcaggaccgctagagaaattggtttcatcaaagatcccaacatgatggagagaattgtcaaggctcgaaaccaacggttcgtagaatctctaaactccgtatcgaacgtcagtgatctcgagactgatatagcttttcacttcttttcactgttaggtcggcaagaagcgcaaaagcattctctcaaccgctcacaccacctgcagagccgcaattcgaactacaacagcacgctcaggtgcctcccaacttggcaactcgttcgaccgtatgcgctgtacctgtcaacacccttcaactgttcaacctcgaatctgcagccggggactcgcacgatgcactcgcgtgctcgactccatcgatggacgcctcaatcgtcacccactcctctttcggctctccctcatctgccgtctcctctcagttcattcaaggtcaccttccgacatggcccgattcagccttttcccgcaccgatatggttgtctctcgatcgactctctcatcgtggtcgacgacagattcagagccggaaacgccctctcgagaaacatcactcgatctcctcccagaagtctgctccgctggtagtcaggaagcccagttgactggacttgagcatcagaaaccagattacagggcatggttgacaggtgtgaccttagagaaggtcaatctgatcagctgagatgcgctctttttatctttgtagtaaaaaccccatcctttggctaggcctcccatcccattcctccgatttccttgcaatccttggtaacggtcttttcccttctccgactacctctacccatatgactctttttcctccattctttatatatata

SEQ ID NO: 496 - DNA, 3407 bp, Xanthophyllomyces dendrorhous
atatatatatatatatatatctcatttgatccttaatcataccaactgacatagaacaatcagatcgaaaccgatctccactcaacattgtatatatcattctctacatttcccacatcatgtccattatgtttgtcctctcttattacatctgactcggtttgtttattcattcttttggttctttttgtaccacccttttgggtgtcccgttctctagggccttttctttttcttgtgtgtcttcggtatttcacgtatatatatacaaacaccttcctcatcgtgatgtgaggacacccgggctttatctttcttgtctttccattcttgttcaatctcttcaccttcctgtatcatgataacaaataactgtatctgtccctgcttggtctttctctttgcaggacaactgtttctgagtcgttgaagatccaagtctgagcgctgaaaaaaaaaacgccgtcttgagacagaagaggaaacgaaagaacattcccaaaaacgagggaatagacatgggtatatcgttgcaaatgcaatacacaagaagaaagaaagaaagaaaaaattctgaatgagggtgtttagaaaagaaaaacgaagttggggcgaaactcgatagacagaaaaataaggaaggggttcaagtgggtgatagttgactctcgatgcccgatcggtaggctagacttgaaggaggagagtgcgcgcgtatgtatctgagaattcagagcaaaacatgaggtgacagaatacatgggcattttgttagacgatgagttcggaaggaaaaataacgatcatagtaggaactaaccgatgaagatcttcctcatccatatcatcctcggtatcgtaatgagataaaccagaaggtgatctcctcacgcctaccggttggtcgtcctgcgcatcgagtaagatcctaactttctcttgcaactgttcgttctccagtttgagatctctcacatccaactgtagcctctttacgtcctgtatgcccgccgaaagctgttgcagtcgatcgacttctgtacttaacgagttaatccgctcgtttgcttgatcaagttctagagtataggcgtctttgagcttctcatgttctaatttgagcgtcttgttgtccgaagaaagcatctggttctcaagggagactctactgagagccgtcaattgacgttgagcgtctgctagcttgagtcggagggaatcagcagtggtgtcatcaacgacgggtgtgtttcgaccgttggcatcccgagttcgagatccagcttctgaagaatttgttcctcggatggcatccagttcggtttgaagactgagattagccgtcttatgtttggtcacatcttctttcattcgacgaagcatcttctcagtagctctgttcccaccaacagatcagacacaatgttagtaaacaatcgatagaatgactacagataaagaaagatcaggtcactgacttgacgtaatggacggccgtctgataatcagcttggatctgtttatgactagccacactctctgccacttgtttctcagctgcctccgctctctcttccaactgccgaatctgttccgccgaaggcgccggctcgacagatttgccttcgttgctctcttccgcctcgagttctctggcccccgaaagaatttccgtcttctgagttgttggcgatatggctttctccaattttttcttggcgagatccagctcccgttcagcggcttccaaagccgacgttttctccgatagtttcgccatcagctcatccattgaattggttgccggcaccgatgtcgatgaagtcgaactagggccatcgtctgtataggggcggagttcatcctcgctcaaagcgactccatggttggacaggacacgccgaaggacagacaatcgtaattccagctcggaaaccatcgctgattgatctttcagttcgaattctctggctgtcacagaatccctgagtttagccgactcggcctgggaagaagcgagtgcggttcgaacttgatggagggttgattgtattgaaatatgctcgttttcaagtcgttgagacctctttcggtgatcggacaacattgattgagattcatcaactcttgtacctgcttcaccgagcatcgtcctcagggacgaggcctgttgttccagagcagcgattttctcgtcatgtcccctggtgaaccgaccttcatcttctttcaaccctcgatgaagttgaacgagttccgctaacccaacagaagcgaacgttcggagtgattcggtctctgctcgagatttagaccaagaagtctcaacctctatcaacctggcgaccgccatctcagcctctcgtgccctggcctctaactctgatttagcatccgctaatctactttccaacatatcgttcctatcccgttcggattgatacatcgattggacttcatccgaccttgtcccagagaccgccaacgcctgttgaagctgttcgagagcctgcatgtggctgtctgtagaagtggtcttctcttccaacgaagatttggcgagatctctatcagtctcatgtcggacgacctgtgtctccaaagaaaccaatcgatccacatgatccctcaatgaccgctctgttgacgtgtgtttatcctgcaatgccatcaactcgtctgacgctagagtatgaacagacgtaaggtcgtcgattcgctgaagagcttgttgttctcgttcttcagctgccgagcggagttgcttttcgtttgcgtgggtttcttggagattggtcaattgacgttgaatggccgagtagttgctcgagatcgagcttaactgtttctcgagttcgatagatcgatctcgttcaatcttagctacttcggtgggagagccgtgctcgagagcttcaactttcgctcgatagaaggcagcttcttcgatggctgcttgtcggactcgatccacctcagagaatcgcgaggaagattgttggatttggatagctagctcggcctgtgttccagaatcatcgacagagcagacatgatagagaagacgtcaggaatctggaatctcaactaagaaccaagaaggaatggaagaaagagatcaaggagcgacgacacacctgtaatagggcccgatccttcttcatcttcagtagcccctcaaccaacctccttaactcgctcccctcctctcccatctcctccagtccaacctgcgatccttcccccagatcctcgacgacaaagccactcttaactgctctccctagctccaacttcaaccatcgttcccgtcttctcgatctctccaattcggcatccttcgctttaatctcgcgcataaaatcttggcttgctctgcctgttattgaactttgcctggcatggcc

SEQ ID NO: 497 - DNA, 1097 bp, Xanthophyllomyces dendrorhous
ggagatgacccgttcaatagcggtgatcgaggattgtagaatgcatcgggaggatggaccgaactgttgatgctcaagttgggcgagtgggccacatctgacgagggcagaactggtgtggaaggcgacgggcttcttgcacttatgggctgagatgaagaaccaaatcgaccggaagctgcagaagccgaaagagggtgctgagaagaaaggagggtgggtgaagcagtcgcttctctagacaaagtctcatctcgaggcgatatcggattaacaggggtcatcactcttgccagcaaactggggtcttgaatgctgtccgcctgctgctgtgattggccactgacggggtcctgcattcgtcgaggcgaagccgctcgctgagggtctccgattccaaaagccgcgtcatcctctctccgaggcctctgtggtatcattcctgcttgtttcttttgacttaacgtgggagacgtcaacccagagatctgtctatcatcgggcgaaagtgctcgtttgagtggttccgactgtccagtcgtaccaccctccgtataaggatttgatttggtagcttgagtgagtgccgaagactcgttctgggaatgagaaaactgagaatactctcgaggagaactttggccggctaccgaagaagatcgaggaccaaacggatttgtgtgcggtggctgttgttgggaaggaagatgcggagcagacgactttcggtgtactacgttctgaccagttggtcgggccggatcaggaggatatttgatttttgctacgattgagcggcgggagatacaccacatagtcattacctctgtctaacgagcagaaaagaaagagggcagtacttacaagtgtccaatacgtgaatgatgtccggtgaatccggcgggttagaagctgactctcctcctagaacaaggattttgtccccgtacgctgttaacgcgtgcccacttcgagggtttggcgatggtcccatgttctggaacatgaaccatctacgcgctgtaggatacgagggttgctgactatcagacaagtattcgcctctcaaaggactaatattgatatatatataaagc

SEQ ID NO: 498 - DNA, 22250 bp, Xanthophyllomyces dendrorhous
gcttactggatatcttaaaagcagctagatcaccaagatctttgccttgaacgtctcttcctccaaacacatatacgacatctccgacaacggcggctgcatgtccttctcttgccacaggcagatagccaatacagtccaattctgtccattcttgagtctgaacattatatgaccaagtatcgttgtagtggaactcgccatcggtccctccaaatctaacgcagtgtgatgagaaataagagtttagcacttttttatcgttcaatggtgggagcaagtgaaaaaactgaaacacagccgacgaacaagatgatctggttgttgtaggtcacgcatatatggcctgttcgcgcttgaggtgtactgcttcgagggatgattctttcccatgcagggccatccgatgttttgactacgtcaaatcaggagataatttcatcaatgatgtacgttgtgtactcagatcagaaagaagaacagtcttactagttgtcaaatcaaagcaccaaaggtcgtcgaagaacgtcaagtcgacttggccgccaaacataaagaacttgtttcgaaccatggacaccgcgtgtccatatctgccaaagggcatctctctcctttctccacctcttctaccgtctgtacatatacaactccactcgttattagccatattcagcaagtaaagcccctgatcctgctggtcctctgcccgagtcttcgtgtctcctccccaggagatcatcacgttcccaacgagcccagttgcatgtccgactctggcgattggaacatctcctttaggtggcacaggagcaatcgtcaacgttttgcagtctagcacaaagaggtcgtttcgaacagagtcggcgacaagaccaccaaagagaaacaaatagcctgagctggtagttgtgggtggagttgacagaccgtaccgagggaagggcgtcagatgaggcggaagtgaaggaggtgtctgaggaagagtcaatcggcgttgagtcctatagaatttgagatcgggcaaaagagatgcaatcagtgacctaaacaaaacgcgtatgtattttctacagagctctgaaacaaagagaggcgacacaagtaggattaaattggactcaagaaggataaaaataaagcaaaacaaaccatgggtacacgaccggggatgagtttccactaggcgtccgcattctggcttcgtccatcatcgtcgcctgctgctgttgttgctgagaaggataaggtccgtttccgttacccagctgagcatactgagctcgtgcgccatcgaacccaagcggctgagagagctgctgagaatgtgatccaccattggacgtgataggcgtcgagctggctcgtgagcctggcacggaggcagatttgctcgagagggcctgattacttgacgaaggctgtgagctagatgccgactgatcttgattaggagctttttgttgttgttgttgtgcttgttgttgctgtagctgctgggtttgtctttgagagccagctgaagacgaggattgagcaagtgtgggctgagaagcagcggctgctgctgctgctgccgcgttgtttttcgacctcttggagaaaaacgacatggtctccaaggataggaagtttttgaacagaagcctgcctgtctgaactgatcaatttgagtccaataaaaagaatccgacaggaagagggaacggacagagatggagagatcgtcagagaagagccaaagaggttctggacgaggtgaatagaaaaggggcgagtcggtcaagtggcgtcgttccacgtgatctaattggcaccgccttccaagacgaactggttatacagctacttccatctctaggccacaaagttccaccacattcacgtctcactcatcatttgcacttctcttttcttttctttcatcgtcaacactctcatagaagatggcaggattcataggttagctttgtagatctatgtagaagttgcgctctcgaaagtttgatccgcaataaaccgttctctacttggactttctccatcaaaagatctctcgtctacattctctagatctaggcccacattcgatcagcccagtaatgataatagagcaatcatttggctcgacattgacaacactctttatgcgaagtccactcaggtatgcgctcttcgtgtttgaatggtatcctgggagacccatgtcgcacagtctatcttttaaccagttggggttcgtttcctggtcaaacttccactgcaacgtgtgtgcttgatttgatcacatttagatccacattctgatgcaagaacgaattagaggtttgtctactccttttatcctctttgtaatccatctctgactgttcatgagcctttcccatcttcaatacagcctactttcagacacttggtctagaccccaaggaagccgaaaaattacacaagacttactacagccagtacggtctagcaatcagagggcttgttaagcatcacgatatcagtacgtctctttgattcttttattatcggtatccatcagaaactgaacttgttctttgcgcatcgtgatcaactctcagacgcgcttgattacgatcgggtttgcgatgcttcgctcccattggaaaccatcctgtcgagagacgatagacttcgtcagcttctttccgatattgatcgtatgttgtcttgaatctaacttctttcatactatttattagctgacagactcacttctttattcttccgccgttctcagcttcaaaagcgcgcattctcgcactcaccaatgcttataaaacagtatgtgttctattcatcttactcagcttctgtattcagtaaacgttcaccgtctgatttgccatcaccatatgcgctttggatagcatgcttcaagagtgctagagattctcggtgtgatcgatctgattgaaggtcttgtcttttgtgactatggccgacccgatcaagactttggctgcaagccagaaccaagtttctttcaagaggtctgtctcctttatatacgttggttccctctccagtccagaacaaaaatcaactgacaacaactctcttcatctgtatgtatatgtatctgttcaatcaggcgattgagtacgccttaccaaatcattcatcgcctgaagcaatcaaacattacttcgtggatgattcgcttttgaatgtcaaagctgccgttcagcttggctggcaggccgtccatttcaaagagcccaatgaggtttgtctttcttttattctctttaggaaagcatggtttctctgcttctctttttcctaattcgtgaatctgttcctgtctctttctgcgcaccatatgattcgcagtgggacactgaccacgacaggatcagtcaaaccgatatcaaactgcaagacggtcacgtcgagaccgtgtctgtggttgagaacttgaaggatcttcgagtcgtctggaaagaacttttcaaagcatagatactcagacattagagtcttcgtcctctggtgttgaagatgattgtgtgatcagtggcttgtactcgacggataactgttgcatagaagactataacagaagggggtatgatttgtagattggaagatgttcacgatatattgaagtagtttatcatcgaatgaatcatgatgatagaagcttgaacacctttttaagtgcaacttgttcagaatccttagtcacgtcttgaactagctcttccgatgaaacaggtcaaatcatttcaattattcattctgtatatctcttcccacatctcttcctcccagtttgtcgcgactgtttctttttgtttttctctttctaaaggtagaagaaatttactgggtggtgtagttgattcctcggaagaactcccttgggttaccaccggcctcaacatattttgtaaggaaatgctcgtccgagttgacttttgtcattgaaatgaaggcaagaagtttcagtattaagcactgcttgccagaagaagaaagagaaaggacgaagaggaaagagacaaacccatgtgcaaacttttcttgacaaccttgacctcccacaaacccttggcctcgccgacggtcattccatccgggacatccaacaccttcaactctttcgcgtgctccacatgccatttctttaaaccaccttgttcgccgtcactcgagctaggaggatagtaactaggactgaaggatcctccgaatttaccactttgagacttgagaggttgttgttcagtgtgaagggaaagaccggcaagcagtgatctggtaatgggcgagtccgtttgagaggctgatagtgagaggaggaaagttccggatgtctttaagtttgttcgtttgatttatttcaagtacagagtgatgggcaataccgatagtgagtaaatcagtcttttctttgacatggaaggtggaaacaggtaaacaaagaaaagaggaacgaacgaaatcctttcgcccactgatgtagtccaagaataatctggggacagagagatgataactctccaatcgatggttttctggggtcttgtactcagacgcaccaaagtatgcttgggcacaatctaacgcgaacaagaatggaattctttttaatcaagaatttattgcgagaaaatgaacaattagcctctaaatctcctcaatgctagaaaccgacattgtttgaactgactctttctgtttgctcagaatctctatgacagtctccaagacctgtacactaactccaagattgtctacacctaatttgcaaagatcaaccaacgttcttctccttccttcttgttgcgctttcttcccgctcttcccagcattacccttgacctcatgttccatcgcgaccgctcctaacgtaacttccgtgtcggttttcgtacctgttccggccggaagatcaggagtgaagacatggtctttgacgagagatatcctagagagaagctcatggttcgactgagatttgatgaatgactcgagcaatgacgcagacagtgagggctgatggaaggtttgggttttgctagagtggtggaatgcgtatttagagttgacatgaataaatcctgcacaaagacgggtaaaaggaaagagcaaccaagcgcgagcggagatgaacattgagaccatgagttaaatcagggtaagttcagagagaaagacgaaacaaacctcgagggatgtacatgacaagccagccggtctgcatagcgtgagcaacagtctggaacatcaacaccgattttccacacccagatcctccatctatgaaagagagaagatggttctcgttattagagtgggtatctacttgtgtgaacaggaggactattcgagaatgccttactgagcaggatcttttggtccgcaaacccatcggttttgttggcatccaatcttgtggccaaatctaatgtgagctttcgaggaacagtcagagggaacaccttcggaaaacaccaaaaacattgttgtgagagtaagtcgcagctctgatacgaaagagaaggaatgcaagtaaaacgaagaaaataagggaattcggaaggcgcaccgcgttttctccaccggtcggtcggccccaaacttgcgtgatactctgcaagaacgatctatcgtactgatggagttgaccaacagcgtcagggctgaggacagatgggctaaattcggggataccggacagatctgcttcttcctcgataccaggaatattgtccctattgaacgactgttataaagaaacccaacccaagatcaagcgagcagccggtcagatgattgcgaattacatcaagatacctcaggtacagaagacttggccttcagtgaacctaagaatcagacgtacaaaagacccccatcctcctcttctgccaggcttgactggccctcctttcttctgaacaatagctctcttgggtccctgagttcgaactagatcagacgtatggatgaagaatcaagtcagactctagttcccatcaaattcagccagataatcaaggcgattggtgaacgttcagccgagatgttcgttgtattataaatggctactcttcgatacgatcgagtactgccgatcatgataccgctaccctacttctggcgtaagccagtaggagccttttcctctacagccaaccattttcagccgtactccgatgactccgtgaacgatttcaatagaggagaagtaccacaagagctctccttatatttaaagattcaagtccaaaactagcaagaaaagaagagcaactttgacaagaaaggaaaagaaggcataaaaaaagagagaagaacaatacgaaccagcagcagcagccttcttgggaggaagataacaagccggagtcgtcgacaggagcctgacagcagatacagtagagggagaagttcttgctatacgagcgagcgaggtggtcaaacaggccatggctctatgaagtataaggagaggaagaaatagagtgaggtgaacgattgttgagggaacccgtgtaaggtgagagatcagtagcagttgaatcaagccttagatgataagtattagaatatttgattcatgatattgaaaagggtatatagtaattctagtctacatggcactaatctccaccaaccttcctccttctttctcctttcaatatgcgtatggtagatgtatcagatggtgtgttgcaatgaaggaagaagttcgaaacataacgtaaaaaaatattgaagatgagagcattatcggaccggatgaatgtccagacgtccttgactatgaattgaggcatacaaataaaacgttagttgtctcaaatttggcttttgaacatgccgagagtatcacataccgttcaagtcgtactggatcagcctatatcatcaacgcagcgatgaaaacaattgagcgccatttcttcatacagatttagaatcaaaacaagaataaaaaagtacacaccatttttgagattcgcacctgcggtccggtccggactccagacatgtcttgcggtgtgataaagactgacaagacgtgagttcagtgtgatgcatcgcagatggttagcttaagatccctttgcgaacacaagtaggatccggcgaacgaaccatattgagtgttgtcactcgcactatggaattcaatatctgagagttagattcaataaacagtcgctccaagcaatcaaacaacttacgtagcgacctccaactgattttttacatattgagtatccatcatacaaaaagatgagtatccaacgacaccgaaatactgtcagacaagaacttcttactgaccatcatattcagagtctgccttctattcacagcatccatgaacacatcaaattcgtccaaacaccgaattggacatccaaccgcatcccaaagagataatagtaaggcgcacgtcgaaaatgatttttcaccacctgataattgattagggttcttttctctggattgagtcgttgtcgaagcaagatcgtccgtttgaaccttaagagatatgaattgacatcgacatagtaaagaatgggtaggttagtctgtaggaactgattcaatggcagaatatcatggaaaaattacccttagactaagtttaagatcgtggtgattaaacaagattttgccaagaaacccgcgccgagcaagatgttcctggaatgtaacctttgcccgaagagcgatgtaccttctgaatgcgttccaccttgctcctcggacttgaagcgcattcagaagagcctgcatattgtggtaaaataagatgaacatcaaatatcagaaatgtttgatcggctggttaacgtaccacttccaggtctttcatctcctgtatctcctgcttggcggaattgtaggccattagcgcgttaagatgctgctcgttggcatcatcagcagaaatgcccactctgaaatgttcgaattgcatcaaaggatagatgaagatatttcggtcagtagtcgttaaattatacatactcggtatcactcttatgaaaaactcacatcctcgtctgctcatctatccgtttcttgcaagcctccatctccttagtcagtttcttcaccgatttatcaacttgcgctcgttcaggatgagacaaaacctataagagtatagttcaagattcaaagtgagcatgtaaagatagagctgtaaaatgagagcctagaatattgaaggactcaccacttcttcaacccaagcatcgagttgttgttgggcagcttcaaattcgccaagtgtcaactcaactcgcttttcgagttcagcaagttttttctcataatggcgttggtctgagcgtttcttggtaattctttgagcgatctcaacgatatcgtcctgtgtttgcataattttcaatgtgatcaactggagtgatccgaaaaacgccacgcgcatctcaaagaggaaaggatactcactccgattttaaccatcaaagcctctttctgctctttgattgccctcagttgatccctcgcctcttgaagtggaactgcttctgctctgacgcgggcaatctcccgatcgcaatctgccaactgtatctgcgtgttggtcagaagagctgtttcctcctacaaaatcaccgatacaatttattaagcaaaatttcaggaataccgaatatttcaaaacaatggtttctataacttaacaattgtctatagaaactggacttacatctagtacgttctggagaccagcgatattcggaggttcttcgtctctattcgcttgaatcacatcagtgagtttgcgctcatgctgcacaagggcgttgttgagcctctgaagcttatcctatggggtcatcgaagcgaagataagaaaagacgtgacaagacgtctactcagctgtcgaagcttatacgtttgacccaagtgctgacagcattagactacgcacatcaacaatttctcggatctgctggttcaattgctgtagttccttggctaactcttttctctcagcaacgttttgtcgatctacaagaccgagttcattcagcctgctctgcagagctctatagccatgaaatgaaagatagttagctgtgtcacgaggttgaaacttgagcctctttcgaatgatgatgataggtgaactgaagcgcgtactcgatctccccctctcgatcggccacgaagaggccgcctttcttccactgagtcacgaataaagattgtcgagtttgtcccctattgtcaaggcacgaataaacaagggattgaatatcagctcgttcccgagacgtgcatatagtggggcaagagatgtacctaacagaaatccttgctaaaggattggcggtccagacatagataccattgagacgctcggccgttccaaaggccttgtctcgatcccattctaccgcgattcgctcgatgttgtgtcggtcaactagaaggtcgcgtacattggaatcgctgatctttaggtagatgaacccggatgttatgacagagtcagaaagatgattattcaaagtgataacatgaaagtatagagcacacacttggagtaatgatagaggtgtttgaaacccttttgaggaaaggtcgccagcagagatgtctttatcgggatctggagtaaagacgaagactgtcgggttttcctcgttgaattttctgcgctcgtccaatcgcttgatcagtatgttatggcaatttgattcggctctgctcagacatgacttacgatctgtgagaattttgaaattgtctgaacagtgcccgaagtgcagccgcatctgcctggtgggttactgcaaacgaagaaagtgacgatcccaaattagcttcgatcacctgctgccactttggatctactaatttgacatatagtcccagcggtccgatgggtgtttgtccagtccacttcttttgcttgatggcttgcataagaggcatcaaattggatccataagctcctattggaccatctcctctggatctgataaggccttccttcttgctagaaagatgaccaatttcagatttgcacttgtcggcatcctcctgtttaagtcggattcgctcttcgagctcatcttttcgggtttgaaggcctttgagtctgctgttaaggatgggaaattgtgttttgatcttgttgatcttttcttgcatcgtctaaataaacacgcacgagattctcaatgagttatcaagaaagaattttcgatagactagtgaagattcggacctctatttcaagctgtcgcctctgcttctctccatcgttgccatgcttgattttgtcttcttcaagttgaatcgtttcttgcaactgcttgacggtttgagtaacacgattgagatccgccttgatctcttgtttggtagcctatcaagtttacaaaacgcattgttaggatcgcaatatatatgagaaagtcagaacgatagaatcacaaacctcgtgctgtctgtattgtaacttgatattcttcagcttcccttcaacttcagcaagggtttgatcttccggctgatcttctgcagccaggtactttcttctttcctcttctttctcgttggagagcgctacgagttcctgttcctcagcctttaaagagaaacctagtcagcagacaaacaggcagcctacaacttgtcggtgttgatagaaccatacggtacctcaagctcggatattttcttctgtgctttttctaggattcgagctgcttctttgtatttatttttcgtctcagagacttcctgtttcagccaaggatacaaagtgaggttaacttccatggttttcattcaaaccaagaactgtagagaacatctgagcagataaagcgcaaacctcttcctgctgagctacaaacgcccatgcgagctgtttttctaatgaatccatctcatcttgcagcctccctgcaagttgaacgctatcaaccttctctttggcgcgccggatagcgtctttcatatctggaaggacggcatccttttgaactagcgcatttctgatcacgtcgatgttggttttgacaagatcatactcgtccgacagctgagccaactgagtgcctttgagaaagaactaaacaaggcagatttgatgagtgggtagccgaacaaacatttcttcaaaagaaaatttatgactcacattgtacttgtctgaagcgttcgatttcgccaaaaaagctcgggcagcatcctgggagagaacgttgatcggattgtcgacctttcaaagttgaaagaagattaatacaggtttcttgtctacctttcatcctttacactcaaaaggtggacaatttatcacctgaatattcatgtggtccagaatcttgtctaattcctcccttttactgctgacaatctttcctgttaatgagcttttgagtttgtaagaactcgcgttaccctcgcggtgcactccccgctcgatgatgatgatgtctccatatacgtctggtcggtaagcctctggacccctattcttcagcttaacagtcactctacacatactgtgagccgattaccaaatcaaagaggggtgtatgcgctcaggataagacttcggaaatattgtatagcgattcgacagaacatactcttctccggtcttgacgaaagacttaattccagatcctcttccagttgagttggcttttgcaccgagagcgacagtgatggccgtcaaaatcgcagactttccacctgttataaccacatgttcccattcagcttgccagctccagatttctaaatccttgagaaactaggaaactgaagagcgagtaaaaggcggacgaacttccattagctccagtgagaaagtttacctgaggcccgagcttaacttctaagtaagaatgacacatgaagttgactagctcgacctcttggatgacacccatctgggctttctcctacagcatcggtggcaaaatgaattgattcagtggtatgagtcgtttcaagatcagtcgcgtcttggggcttcaacgcagagaacagcctagcactggattacgcactcctgatactttggcatgccccttatcttgcatctctcctctgatccggtcttcgtgagcggcctcatagtcggcatccgcttgctctccatccctgtgtgtattttcttcatcttcttcgtagggttcatctagcccattgttccccacaaattcgtttgacatatttccactcatggatagtcgagctcgtttctgtgccaccattcaggtatcaagaattagtgatcggtctatatgtcactgctgtctgtccttagttgatcgaaggtatgaagatataagcctacgaggatcgcacttacagctaaagaacgatcatcagcatcgaggacctcttcctcttcctctttttcctcatcgtctgcagccagtcgtttagccatatcgatggaatgttgaagtgatgatttctagataagttgatggtgtcagttcacttcacagacgtatcgacttcaagggagttgtaagtcgcatgcgcgttgaattcgaacgcgtgcgattgcaaccctaacatgatgacataagtgacgcgacgcgcgtgcacgtgacgtgcgataagacacgtgactatatgattagtcttgtcgaatgagatcatggcgcgtcctcatccgtttcacttccattctctatttctttcgttctctacttctatcttgctttctttcatagatcaaaagcttcaatcctgttgatactccagaatggaccggacgctggccattcccacattgggcaatccacttgtgtctcttttgatggccatcgttagggcggccatctactgtcttcaacttacgaggcaactgataacctttctgacattgactttgccgaggatcatgatcatcgttgtcaactggagttggacgtttcaggtaggtcaggtactttatttaacagaaggtggaacgtggtatacttattgaaagtattatttgtcttgaatcaatcctcctttcaatagctcaatttcccaatcgtactctttattctgtgcttgatccctgtcggattcttcttactcgttcggtataagtatcttacaaaatatacggagctcaaggaagacccgtaagcagttccatgtatccggttgaaaatatcctacatgcttcggatgttaaccagtttttcgctactcgtcagcttgtccaagtcggacacgaactcgcttcatcctgacgttctctccgagactgctacgaagcccttgaacaactatcttgacgaatttctctcagctatcagggtttttggatttttagagaaacctgtgagaaacccgttgtgattgttatcacacatattcttgttgcttacaagtactgaatatcatctcctctgtgtaacgtatggcaggtctttcatgagttatccagacatctacaaaccaggcgactcgtagcgggagactctctcaccttagactctagtgataaatcgttctactgcgttgtagacgggtgagctcgttctttcttcaaactttgcatcgtctttgaagaataattgtaatactcacgccttgttctgaccgctgatcgaattcaattacagccacgttcaagtgtttgctccctcgccccctagcctgtacccccctcaccctgttcagtctcacttgccatcttctcaggctgatctatatacagaggaagacgaacctcccttaaacggctatgatctcctcactgaagtttcctctggtggcaccctcagctctctctttactattctctctctcttcacagaagatgtcaaattatcatgggatgattcccctcctcaagaaagagaatcccagttcggagctggctacccttctgagaacggcgaaacattagattctctggggttgaacaggcaaggagtcaggtcgcctgcttcatctgctggcacagctcttccagaagatgtccctctcggtttctatgaaggaataacgccatcgggagagtatcctgacagagctggttcgacaaacagtttcatgggagcagaaagtggaagtagttttaaaggatacaattataacagcgtccgcggagacaccccaaatctaggactgcaagcgaacgatgaggaaagggtcgcgagagctacaggttggttcctgtcatgacttcattatggtatcttcatgctgatgaacatgacctttcttcaaacttaaagtggatacaacgttggctgttatccccgctgatgcctttagaagactgacgcgcaagtttcccaaggctagtgctcatattgtccaaggtgtgtcggtccatcgcgagaatcctcatacctatcggacaatattttaacgtcgagcttaaacatggttggatcactatcagtgatcttgactcgcttttctagagtgactttcacaacagcacaccagtatttggggttgacttccgaaggtatgggaaacaggagacccttgtactttatcgcgtcagaagctgactttcctgtcgaataaatccagtccttcgagccgagtccactttgaactctttggtgtcacatcctctacctgccgagttttacgaaggagggggtatgcaagcccttcgagaaaagttccgacaagagacaaaatctacaaagtacgattccaaagaggattctgacgacgattccagacgaacgccaggcagaggtggatcttattttcctacaatcaacccgaagaagacttcctcagtctcatccgcctcatccggaaaaactgctcggactaaaggagctagccctatggttggttcgcctgatatgtcgaaatcccgaccggcaccgggtagtgtccttggaaggtcaaccacttcgcctacttctacgtttgccaaattgaagactcctttggaaccttcacctgagaatgaagtcacgccagtagcgccatcaacggctgtccgtacgcctggtgccttttcctcttcttcttcctctccgagtttctcagcaaaatcatcagccaaggtccttcccccagtagactctcctaattatagtcgacagtctcatcctctcttccgcagatcgtccactatgagacaagttcaagccggcgatctgttgagcatgacttctgatgaggataatgctatgtataggaacaatcaccagagccctactacccctcggcctatcaagtgggatagacccatgtcaacttttgcgtcactatcatcggggatcttagcaggctcgaactgggataatcatttgaacacccatgctccatattatccagagggaggcttctcatccgaccgagttcactccccaccactagctgcatcgttgaaacctcagtttaatctccgagatgctgtaatgacttctttggccaaatcaatcgggctcattcagccgccagctattgagcaaactccctccatattttccccatccgactcgaactcgtccaagatgaactccccttcgttcggagggtccatcagttctgcattaagaggtttaacgatgttaggtggcagaggcgttgatgattcgagtagtatcatgactgggacgtctggtggttggggagcggacgaaggcggcgtactggaactggagaacgaggtggaaatattgttctatcctaagggagaatatctggtcaaagaaggagagaagaacgcaggtatgtcgattgttgtttgtcaatccatctacaactaactgaaccaaaatatccctgactttgaatactgactgtaatcccgattcaacctgaaactttgataggcttgttcttcataatcgagggtttcttagatgtgagtccaaagtctctatctcatccaatgtccgcaagttgactgatgctttctttacaatcaaacatgatcaacaggtttcgctccctccacccgatgtgccaaccaaacccgtaaagaaagacacaaattctaaaaaaggcaatggctcatccggcactagctcatctagcaagccctcatccaaaacagccacctcgtccaaatctcgacgatattctactgtggattcagctcgatcagctcggctggcatctatgtcttcaggtgaagatcgaagagcggcatcagaaaccccaaaagcttcgaacattgtacctggatcaactcatctatatacggtcaaacccggaggcattgcaggctacctgagtgctttgagcaatgctgtgagtagaaggtttttctgttccatttgaaattttgtcttgtctattttctttaaaaagtatcgttgactgagagactgtgtcttcatttggggagaaaactaggcgtcatatgtagatttgagagcaaaaactgatgtttatgttgggttccttcctgccgaagcgttggagcggctgctcgagagacgcccaatcgttcttctcactcttgctaagaggctactgtccttactctcacctctaggtaagtgagaaactacatgctgcatgtcaaggcttaactgatttttttaatctgcttataaacagtccagcacgtagatgcgtctctagattggatgcagttggatgctggacaggtatggagtttgttttcatacttcaggttctgcggttgaactgatttttcttcgtttcggaacctcgacctaacaaggtcctttatcgacaaggagatgttgcagattctatctacatcgtagtaaacggacgactcagagctttggtagaaaacaagcaaggagatattgatattgctgcagaatatggtcaaggagagagtgttgggtagataaaatttccttcatcatcttcactcaatactattgtcctttgctgacatcttttttcttatcatcaaagtgaaatggatgccattatgatcaacccccgaggcagcaccattcatgctattcgagacaccgagcttgtccgaatgcctcttaccttgttcaatgcgatatctgtccgacacccagccactactgtcaagttcctccgtctaattgcttccagggtgaccaaggtggtcgatcagcggagtcgaccttctctgacccctggctcgctggaagtctctccatcgaatctaaacttgaaaacgatcgcgatattgccttcgtccaagcacgtgccgatcgcaatctttgcaaagaaactgaaagcagctctagaagatataggagcgcccactgcgtatcttgaccaagctactgtgatgagacatttaggtcgacatactttctcgtctatgggcgctttgaaggtaagtccatggtcatttttattataggatactttaggtgcttatgaaacatgcatccggcacttatccgtactcttcataggtcgccggttgggtaagtgttctgtaaaattgataaaaccttagatgattcgctgaatattctcgccttcattaagctctcggacctcgagcaacggcaccgaacggtactatatgttgccgatgctggtatgtatatacaatgtgcatcggtctatgatgtcgcgctctattaagcactgatatgaaaccacgtttataatgaagctgttggaagtcaatggacattgacatgtttgagacaagtaagtgcttagtgcatgatcaagtaggaaggtttgacagagcgcatcgctgactatacacaaatattcttcccaggccgatcatatcatggttgtcggtgagttaaggtcctctttctttgcaatcttagttgacttaaaatgacagcaacggttgagcgtctggtaggaatgggtgatgacccgagtatcggagaggttagttcaggttgactgctatgcggttttgtcaaaatttacttatgctttctgccatttctttacagtatgagaaggttctattagctaagaagactagcgccagaaaggagttggtccttcttcaccctgaacgatccgtgccacatggatcaactcgaccctggctgaaagttagtatcttcattcgaaagttgatgagcagcttcgcttacagtgcaatttcacgaattttacaggagagaccatggatctcccaacaccatcacgtcggtacgtgagagtttgttcatctcttctcgaattgactggcagttatctcaaaatccttaatacaataaacagagttgcccggtatcgtcttgccggctaaatcgacccccatggttcacgatccagctgctatcgttgcgttcaagaacttgagagaaaaggttcagactcagataaagaggttccggcctcgaccgatgtaccggcctcgagcatcgcctcacttaaacgattttgccagactagccagaaacatttgtggagccagtatcggaatcgtactcggaggaggaggaggaaggggcatagctcatctggtaagaccttcagccgacttgtgcaactatcaacttcacaagttatattctgactactgatctcgcaaatttttgtaaatcagggattcattgaagctatggaagatcagggagtgcctatcgatatgatcggtggtactagtattggatcttttattggtggactttacgctaaggatggaaatcttgttgctactaccggtctgttcatttctttgtcctaaatggcagctcaattcgtgcacatcatctcatcaccaaactcttatggccttggatatcgtcttcacaggtcgagcaaaacagtttagtggaagaatatcatctatatggaggtatgttatgattgtctggatgtaagcttatgggacatgcgaatcagccattaacgtgatttggttgtgtaaaaaggcttttgagcgacgtcaccttccctactatagtgagtgaagttgaactggatttattcaactgactttcactgagtactcaacgttatctttgtatgatctagtcatataccaccggacacgaggttcgatatcacctggcttttgtccttcaacgcttatctgacctaacccaagacatgttcttgtttgctagttcaatcgaggaattttcaaagcctttggtgatgctcacctagaaggtcagtgcccgtatcgcttcataaccttccgacgtcgttcattcgtgcaaaggttgacatatcttcgcgcgctgtgttcacagatctttggataccatttttctgcaactctacttgtctgaacttgagtcaaatggagattcatacaactggatatgcctggagagcagttcgtgcttccatgacgtaagaacgatgtcaattctcttcaatctggcactatggtttacgatgttgacctttcatcgattatcttcacgatgtgatagtctcgctggtttgcttccgcctctttcggacaatggcaatagtgaatgctcttgcttatcatacatattcaaacttttgcttactgaaactgcatacttgaccttcttcaatcataatagtgcttgttgatggaggctacagtacgttcatgtttttgttgctgtgaggatttgaatcatgacttaccatatagtcttctcatcttggcttctagtcgataatctgcctgtatggtctccctacctctcaatatctgaggtaaatagcatgtgtttctgaagtgatggtttttcttacattctcaggtcaccaccatgactgccaaaggagcgagcaagatttttgcgatcgacgttggtggcgttgatgatccgtctcctagaaactacggtgactctgtctccggattctttgtcttattgaatcggtgggtgttttcgtttaaatgttccactcatggtaaacacacaatctaatcgaagcatgtgaggattatttccatctgtaggtacaaccccttctcggatgcccggcttattccaacccttaccgaggttacgtcgcgtttaacctagtgcgtcaacttcgccctgttgatgaatcacacgcatctctgctcaacaatcattcatcttttttcatttctctcttcacatcagtgtatcttctgtcaaatcgctggaggaggcaaagaacactccaggtattctctacctagcgatgcctgttcaacaatatgagactcttggaggatttggaaaattcaatgagtcagttcatctcgctcgtttctctcaattttaaatttaaatgctgagtatagatccatttctggaaatgatagaattcttgatatcggaaggaaagccgctagagaatatctcgcaacctgcaaatctgaaggtgtgtttaatgtttcagtccttcaaaacttcaagctcgtgtctctcaaacttctttgtttcataaaatcctggtgttgtgggagctgtaggtacactgccgacgggatatcttcctgaacatgatcgggcggcggagagcgggtcaggacgaattaaaaagtcgatcaaaatgaggagaaattcaatctaggtatgagcgtccttgaatgaagaactatatgaatgattatggtagacaagacggtaattcgcaaaaccattgggaaatataaaagaacagacaaggaatgaaagagaaagaattatcgtcttctctctgccttccatttgaacaccctactcttccactctcccttctttccacctctctcatcatcctcctcctcatctccatctaattcaactatttcctcccttcctcccgaagagattttcttctttgatcctttgcccatcaggttcctttgaaggttcatctcgtgttctgcatgcttcaatgcggattctctgatcagatgagtcgacaagtttcgaagtaatgcaagtttatgtttcttggcagcaatggtcctggctctagcctcctgttctgcttcagctgcttgagttgctggatctgcactggcgacttgtttggcttttttcttgttggcttttgagacaggagtgatccatccgagatccggaggaggtgcgcttgaggagagtgacggcgtggatccggaaaggaaagatgtggagctggaagcaaaagttgatgggccaggttgagagctggaagagtttatgctagatggagtgtagttatgaactgagaccgcacatgggcgcatcagtcattgagcccctggagttggtgatcgtttcatctggcaggaatcatcaaaaaggattgaagctagaacaaaccttcattcagcgtatccttgaaaacgatctttcgtggcaccgcttttccctttcccttcccctttactggtctttcttccagtaatcctgacttcttcaaagtactctcctcaagctccttgatcttttcgtccaattcagtttcttcttcctgagagttgacacttggaatgagatccgccagagatccgagttgcgctttaagtcgttcaatattctgttttatccccatcgccaggcaaatgaagacatccaaggagagacagtaaagataccacataatgaaccagtaagaaggattcgcaaacgattctgagtcagcagctgttgtagagtggcagaaaaggccaagataggaagaaaaaagacagacagatagctcggaggctcggacagtgcgcacgtagccgacgtcctgagtcttgaggactttgacaagctcatcaggcatagcgacgtttcctctggactcgtattgaattccattctggttgattacgtgagttatgaatgattcatggagtatcaataacgtgcccgaaggaacccataccatccccctagagtgagtttaaaagaccaacctcagtcttcttgttgaccatgccaaagtagaactcgtccttgtttcgcatagccgccttttcttgtagccgcttcactctagccttcttcgaattgtagtcctttgctcggagaacataatccttatgtttctccagcagacccagacgttctctgccgactaattgagatcgttctttatggttcctcctgtggagggaatctacgcgcaggaggttaaggtagagtgaagacatgagcatgagcggagtggtcgcgagctgaggagaaatggcacaacgtcggaactgaatgtgtggacttacttctcattgaagaccctgccatgatgactgtcttgccgctactagatccagtatgtgtgtgagaatgaaagaggaatgaagggtggtggatggaatggggtcgtggctctcaccaaatatcatgaaattttgttttatatttattttattattttctttctcttttttctcttttctctctttccctcatcatcaacatcgaccacgttacga

SEQ ID NO: 499 - DNA, 32112 bp, Xanthophyllomyces dendrorhous
tctttgtacctctagaatcaacaacagttttgggactgatcttgttcacctctcccagaatggtcaaagtcgaagaagttagagacgcccatttcgaggacaatgattcggtacgattcaatcccgcttctttcatttctcatggccgtccgatcccgtttcccatgccacgatctttctttcgttctcttctctctctcttctggtttgctcggagagaccatgtttcatctgctaactcatggacgattgtttgatactctggacgatgtttctatcttacaacggcattctcctggttctttttcccttccaccccttgcctttttttctctctctacactatcattgcaccataccttatcctttcccacccacatcctccataactctacaggattacgagacctcgtcttccgtctcggatgattccgataacatctccgtcgccgattccgacgacgagcctgagtcgttcaccgagcgaatcgctgctctcaaggacatcattcccccttcgactcgattgtcgatcagctcctcggccgagtccgctgtcagctggacaaagtggggaagcaaagctgtcggaaacgtcatctgggtggtcactactaccgctctcttaatcggtttgccgatggctttggctttggaggatgagaacaggttggttgctcaggagaaggagatggttatgcagcagcagggtcaggccgctgtgagtacatatccttttccttcaccgcgtttttcccccttctgttgctttcgtccatcatgatcatcgatgaaggataaaagatcgatcaagcaatggagttgcttccgtcttatgtatattccttctctaatccttgctgatgtgatggtctacttccctttctctgaatcagatggcacctggcggacagggttctctcgttccccccggtttctaaattgttcgttcttcactccttctcgtcgatccctagactttataatcgacttccacttcggcttctgatctttccggtgttttcgttcaaatattatctagatgtcttgaattgtatcgatgaatggaatgctcatgtaacaaagactgcaaacacaacatcctccgacgccccttttacaattccatctgtgtcatttgaagggaatagtagcgagggaagaacagaaacaatatacacaaggaaaagcacaatgccgacctgatattacggtcacaatgaagatgatcaaaagaatataagataaaaagaagcgtcgatgaatgttgatactgatcatcctacttcattgatcattgggtctctaagggctctcaaccctctagtttctactctccagcaagtcctacaaaacacactgccaacagaatttccataactcgaggcgcacaacgatctttcacaacctggacaaatccttctgggtccgacgccgtcttcgaccacctctgccggtaggaaaccatgttgatgatacttgtttcctgcttctctcaatgagtccccatgaagagaaacgaatcgagcggaaagactcatcaaccgaggtaacggatgaagcattcccaggtgatgaaacttggcgtgaagaccggaaagtttatatatatcggaagatgagtatgctctcaaatcagatgaaagtggtcgagccgtccattcatgaaatgtgctctctgtgaatttcgcacgaacttctcgatgaactgttttcagcaaacaaagtgagtatcagtctcaagaccagagacgatgatgaacgagaaaaaacaacaacaaccacaacaacaacagagaatgaagacgaactctcaatcgatttctgtaggagatcaccttccaaggcctggtacttttccaccgctttctgcattcccatcaacccccatacccaaccttctctcaccgagttttcctgttccttcatcctcttgacgagttccaccattgagaaatccaacacgcctttgatttctattccatgagaatgtttgatctgagcaacgtccatccgaccgtcccaaacgatcttgatcagctgtggatcttcgagtatgtctgctaacagatgaaatctgccatgaagtccgatgacgtcaatcagatacacctcaacatgcactgcagccgtcgggggcttcaatgctcttccggctgatgaggagaatgaatacgagaaaggtggtataggaatccctatctgaatgagtgatagtgaaccctgagaggttcccaaatcttgaccttctgtgtctagataaagttgaaatagattcgaaggcgttgccgatcgagacagtgatccgattcgatcagtcaatttctggagaccatcttgcgtgtcaatgtatgtatattcccaaagttcagcttgtaatttcggatgaggcgctgtggtaggtaatgaaccagaattgcaaatggatgttgatggtgtggcggaagtagcagtcggaccggacgcctgtccaactataggtggacctgtcgtagaggcatggtacgacgatttcgatcttcgttgacgagcggatgtgaccaacgtgaaatctgaatcgtcatcttcatctcctcttcccggctctggcgctatttctgttatcagcgatggtattacggatgctggtcctttcccgattgaagttattgctaatttccgggaaccgctctgtggatcattcgttgaaccaggtgtcttctcataccgtatcgggattgccaacgtgctggatgtattggtgtttctatctgtatgggagtatatgtttgaattcgacgctatatgtgttgtcaatggagatcctaagaccgatacgacctccttcttcttctgttgacgggtcattgcttgttgagtttgtcgatgtttagccttctttggtttttggattgatgatcgaattcgactttggtcttctgataattctcttccgatcttctctctggtaacgttgtttgtcttcttcttgtgttgatagttggagatagaggtgtcgtcttctgagccaggatctatatagtcgacctaatgattatctcaaagttgatgtcatgtgataagaacatacgaggtccggtcagctctagctctatatacaccactatcggatatatcaaggaatcaactccaagcaggcccaaaccgaacgaagaaatcgaatgataagtgatgcgaagagtgaaagaagatcggctcgcttacaagagaaggtttccagtaagcgagcccaaagagacaaccgatcaagaagggaaggtagatccacatgacttggcgcctacgcgacacatccaaacgcaaacacgatccttctttcctcctagtgtcccttgtgtgactctctgaagagagtttcgggagaaaggtaagagaaggaggcaaaaaagaagggaagaagaagatgttgggtggcggtcagaatagtgccataggatgatcgaatgctccgagccgagccgagcctttctccgctttctttgcaccaagacggtgatcacgcaagattcgtcttgttcccgtccatttcctttattgacacacctctcttgtagtcctctcaaccgaaaggcatgtatatatgtatgtatatctattgatcaacatctgaagccaactctatgaaaatgatgaatgaaagctagatgaaaacattgaagttggagacggaacgttgtgaatgaaccttttgaaggctgactcgaagaagacaagtgatccagggaatcagcatctgttcctctgaagtttcggaattgaatgaaagtaccgacagtcatatacgtgggctgagggtgcagagaaagagaaagagaaagagaaagagatactatgaaaacaaagcgaaatagaatggtgttggaggatgatcataaaaacacagcgagaaataggaaagtcttgaacataatgcaaataggtcggatcaatagtccaccggagggtaatagcttttccattttgtgcccgaaatatctgacatcttccgaggcacgcatgcatacgtcttgccccgatgaacaaacgtgccctctgagaaaagagtgtacagccgagcagccaacttagggtttgaggaagcgcacactgtgcagattcagaagattggtattagtgaaccgtcgccagaggggtttcgaagggccttctagtccaaggcgatcgacttacagtccacaacttgttttgaccagactaaagatcacggataagaagaaggaacgaatatctgattagcagccatgcgaaagaacgaacgataaccgaaacaagagaaagagccttactaaaatacctctgagatcgctcaacatcccagccgaccggaatagcgctctgtatcgataaacagttgtgcagcttatctcctaacttgacttgctctgattcatccaatgtgtttcacccacgaaccatcgaataaattaggccattcatccttgagatgaattcaaagctcatagggctatgcaaaaaagagacgtacgcgctcgcttggatttatgaccggcagtctctacttgggcgagttttctcgcacacgcacttagcgtagtatcgtccgagcattcctaacatatcattgaaccaatagcgtagggtgagctagaagtcggcatgaaagatgtttcgagggcagaggacacagatgatcgagtaaacacaacgtacatcaacgactttggcgacctctggcccgaaatgaagctcaatctcatctattgtgcattccgtatccttaatcgtcattacgttccaaggaagagatagtttctcattgtttgagtaactcgatacagaatttaaagagctttgtggagtttaaagaggtacatgctcacctcgaccacatcatgtagaattgccgcctgaagaacaacaatatccgtttcgcctattttggcacaggttgaaattcatcacaaagtgagccaacttcttcttctaccaagatcaattcaagcggaaaggcggaacggagaaaaaaacgagacccaccggtttctgctatgaagtttgcgacacctattggatgattgatatatgggctctgcgccgggtcttttcggcgttgaaagctatgtttctgcagtgtcaaccaaaagtccgaaccgatacagacagcgtcaacacaaattctccatccgcttatgacgatattctcgagtaagaaatgaggaacgaacctgggacgagaatgatagtgttttgagcaagattccaacatcgctgatattcccatcgaggaacccatcgaaactcgtcgttgtcactgtcgtcatcgagttcaacgaggatgaggatgatttagaagaggatgaggatgccggtgaggtcgatgtatatttcgataaggaagaggaaggagtcgccgtcgtgttgtttgagatagaagtgacagatggagacattcgatctagatggtgcgagtataagtttgtttcgggatgttaggcaggagtgaaacaagggagatccaatgggacgacgtacaatgtgtgagcacgatagtcagacttattagaaggatgggacaagaaggattttcttctatgtgtctcaagcaacgagttagatagtggaagttcgatgtgtacgtatgtgtgtatgttcttctcgcttaatgatgttcaaggatcgtaagaggaagagagtggaaacgaaggaaattgagggaaaaagaagagaaaaaacgggaaatcctccgaagaaggtcagcctacaaacacccgctgagtcttccgttcatacaacctttactatgtttttctctccggattttctttcttgaacagctgatggcgcaaactcactcaaaaatcaacaacggtatgacactcacttgacgtggctgatctggtttatccttttgataggattcaatgagtcggctgggtcacatagaaagcccatccggttagttctcagctcttctcattcacgtcccaggttacgtcatcattcatcatcttcatgatttcgtacacacaatctcgaagtatacgttctcaaccacagctcacagtccaaatgtctacaattcgagagagatgaaacacaagtcatatgggacaagaacaaaaaatgtagacacctgctcatctcttcagagtttgctagaacctctaaattgagctagcctggttcgaatcgccaaacctccatgttcgaccttatcaaccacaagttacaaccattgttcgacggttcagcattcatctcgcagattcaaaactgatatgaatgtatagggagagagagagagctagcagagtacgtacagccgatgcttgattcacgtgtttctgtccagactcctccgccctatcctccagtcggacatagtctctcaacgtaggcccgacatagatctgaaattcatcatcaaacataaatcacgataagaatttcctgaacaacctttctttgactatccagatcgtgaatcgtataagaaaataaactcacttgacgaggccgcctatgagcgtcgaccgatacatcgtaaaaaccactcttcagtcaagtcattcatgattgatgcgaaccagcgaagttgattaaaaatgtcaaagagcagaatcaaatacggaccagatcttcagtccgccttgtgcaagcatcatttgacgccttcagtgaaagtcccgatacgaaaataaaaataaattcagcacctctatcagatacgaggcactcattgattcttgagtgcacgtaccaatgagccaaccaaccgaccacacggggaacagcaaacagcactgggaaaaagtcgaagggaaacccctatcataagtaaacaaaaagaacaaggtcaatcaattggtgcaatcgtcgtaagttcctatcgagcgtctactgaccatcgctcggtagatgctaagaatgcattgggccgcatcggtaagattggtcagatagaacattattattgatcaagcgccagatccgacaagagactcacagcccggacctatcaaacgtcgcaagcaatggtccaattcacagcttagcagagactacgaggtttgaattcaattgagataattcttaccagaagtcaacgtttggatctgcgcaaccatcataagttacgccacgaaaaattgcagttttggtcaatccgttatgttcactatgagagagacagaagttctgacatacaaagttttcgagatttgaagtagtctgtaattggagtgtatattttcagattgtaagcgcacatgccgcaagcagtattgaagcaaattcgagcgcagacgatagacacttaccatccttcaaagcagcgtcatgtaaagccatagccacctctaacaactgatctcttccagtagcttcaaaaacttcttctgcaatctttctaatcacgaaggatcttggatcagatgttctatagactcggtgaccgaatccactctacaaaagcaatgatagttcagattgtcagaagagacgatggtcttactacgctgtgcgatggtcgaagcaacgaatagacatactaggactttctgctttgatttaaccttctcaatgaattcagggacgttctcgggcgacccaatatcaagcagcattcgaatcacggcttcgttcgctccgccgtgaagaggactgaatggaaaatcaaagacaactcaatagagtgtcaatatcaccaaatagacgaagcgagaccactcacccataaagcgcctatccggacaaatcatgtatacatatatgatgatcagtatgtttctatgaactttggagaaaccattggaacatacagcacaggcggccctgtattacaagtatcaaagcaggaagacaaggaaattagttcgagcgccgtatactttatacatattcaggggccagtgaagtacacagatacttacgctacaccactgtagggatcgactccgctggatccgacctgcaagattgaggctgtactacaattaacttcgtgatccgcatggagcaagaacaatacgtctagcgccttagccaatacaggggaaggtctgtactctcgctcgttcaagaaatctagctggtacaaaaagctttcggtgtaacctagtccaacaggaggtcggttgaagggacgtccttgtcgaattcggtatgccatcctaattttggaaactacataagttcatttgaacaagtctgtttgaatgtcactcacaagagaacgaacaaactcacgcagctaatgtaggcgccttcccgatcaaccgatagatctgcttatccatgtttcgcaagctgtctggtgttccggttgtgaacagcttttgtccttgaagggaaggattcgcttctgaatggaagcttcctaaagcagagaatgcggacaccaaaattgccctgggtatatacacacatatcagggtcagcgagcgcaaggggtgagctacacaagagaacactcatcaagacaaacatggggtgggcgtcgtatcgaaacgatttcatgaagccctcgagatcagaatgcacatatgaatgtgcctgaacctctttttcgaacaatattttctgagatgggctcggctgtgatgtttgaaccccgacggagtgcgaaaagagtggaaggtcaataactatagcttgtaagatggaaaatcttcgatttgtacttaggcttgatgtaccagatttccgtagagtagaaggtagctactttccaagaaggtcgaatgctcggccagctgttcgatcggatatcctcggtatctgagaactgatataaaacagccgggtatatgcatttgaaccggaatacgatcagacgtcaactgcaagcaagatggaaaccagaagacttactaccggcttcaccatcgatgaaagtgatagtagatttgatgacagcagtattctttcattcacaagatttaagcttcgtatcggtgtattgttgggctttgatttgagcgttatacgtgagaccctactaaccatgtacccagggtcaaaaactctcaaccctttggattcttcatcttcttcccttcctttgctcgacactccaggaatactgagctgcttgaaagcagtggcaggaatagaattttcggtgattctatgtccaagatgatatatgtttacattgtcaatgagccacattcacgtagagatgggattcttcaacgggcgataaacaactcacggaatctcgatggtcttcgaggttcgattatcgatcaccgtaatagtatcggacgaagacaactgagtagtcaatcttcccattgtgattcttatggctcaagagagaatttttaaaaagtgggttgacgtctgatgtgcgttagcggaggatgatgtatcgtaacctagaaaatcgggtcttttgaaagaaatgatgggccggatgagcccggacccggccagttgaaagccggactgacactggttagtcaccttccgagtcttcccttgttttatcttgggtttttgtatcaacatactccgtaagtgttcgtcgactctagtcattgatggaagaacattcatgatcttttgaattcaatcctcttttctttctgatccgtttcctcccggtcgaccgccaaatttctcccatccatccttgccagcctcccaccggtcgccaacctccagatacttcagaggccaagagcccagaagagtatggacgacccatcttcttgatattccagccaggccttcagggctcaatcgaggagaaacctcggttatgctagcccagacaagtgcaaagaccacgccgaggaagaacccaaaatacacttgagatgtagtatggtagtaaagataccatctgaacaaaacgtcttggttcagctaaggttttgggatggatcacgaacaaagagattatcacataccgactgaagcaaagcaagaatgaccaaatcgctgtcccaactaagacgatcaggcgcttccaccaccagagtgttttctgttcatcagtccagctctttggagacgtctgaacctgagtcaacacgacaagcaagaaggtgaaaaggtatccaaaaaattgagcgtgggaagatggagaggcatctgaacgttgtgcagccaaagttttagctcttaattagactagatgagcttgaatgatgcgcacttactccctgagccgatgttagctgtggacgaccaggcaatcaaaggctgattagacaacaaaaacgactttgattccatctacaagccagttaatcagactcaccgtaaggtctttctgccttgatattttgcttcaacacccagctgaaagcctcattgatgagctgagcttcaaatatcgtatcagaaatgttcagtctcaagagccctctctatgacatcatcgtttatacatggtgatgtggatagaagaaatgacctacttggccggctaacatgttgagcaccgttgcttctctttcaaacacaaacgcgacgagatatgccgggatgaccataattggggagagtgttaagatggccagcacatgagacaccgggtccgatgggttatctgtccgagtttcaattcaatcccaaaaaaaatatccagaggatgagtatacatatagagaaagaaaggccataaattctgtacctacaggtcacttggcttagctccagtacggctagcgaggatggtgtactgttcagcatggcttctctcttggcttgttcgtatatgaatgtgtcgtcgatcaatgaggggacctatctgggctgggatttgcaagaacaggacttgacttacatgaattcaaatatgtcacttaagtgtctcactctctgctcttcatcccccatctctcatgctcactgccgatttcgtttgccaaaacaacagacctcagcatggaactcgcattccttctcttcgctcttgtactctctacagagatcctcaactgggttgggaaatctctcttggtcgatttggtaagatttatatgtttcttgtctatcaaatagatattcttcgcgtaaaacacgacttaccgttgtttctctctcaaagctcttctcggcctaccagttctttgctcaagggcctcttatcaaccagcagcgatcgctcaaaaaggaagtcttgactaccaaactcgaactggatcgcacgagttcgcaggatgaattttccaaatgggcaaagttgagaagaaagctggataaatcgatcgctgagctcgagaaatgcagttcgtccttgttctcttcacgctttggccttgattgtgtccaatcttacttatctgttatactaccctcagactctacgctttcgaactctaagagcacattttccaaaaccatctcatcctcactttggttctttaccaccggtctccagtttatcattgtttggtggtatcgaaagcaaccggtgttctggcttccttccggatggcttgcaccaggatttgcttggtggttcagcgcaccgtttgctcctcgtggtcagtgaatcctcctttgatgtgctctgatctcttcgaatccgtggttttcagtaggacactgatcaacttctatcttttcgcaaactactattactcaggctcaatctcttcagctgcatggtgcatgatctgcaagcgaacaattaaatacgtcgaagaaatcggaaaggaccttgtggttcctatcccagctgcagtcacgccagaagctggtgcttctcctgcatcttttggccgtaagttttttttgacctatctctcactcttgcatcgtgcgatatgttgggctaactttccatgtactattctcatcatcttggcgctgaagaatcggctcagggcttcaatgccaccctaccgaaggagaagcaatctactaaagtggaagattacactcctccgttggatctggattgatcgacttgtttcaccactccaataaaggatattcaaaagaatcaatcgacagtatataagaatcagaagaactcggcgatgagacatacgcgtctcatcctgtactttcaaatagagaacctaaaactcggatgacttgtgaatgaactaattggaatgtatcgatgtaaaaagccgcgaaggagaaaatgaactttacgattctcaagtcatgatgtgatgcgttggctaaacaagaacatccacgtcctgatttctttggcatacatatcaaacagtcgatttgaaaggggtcaattatacacgcagattcatgaatctcttcatttttcgaacattcgacaaacgtagaaagcggtcattgatacagtatcgttatggacaaagcccctgctgaagccgccacatatgtgcaagagaaaccatatgatttaagtgctgttgaggaatttggcatggaaagcgatgtgttggtcgataaaagatgagatctgatatggcgagcaggtcaaaagatgagtcatgtgagattcactaaacaagttcgcaagttcacattgaattggaagagcaacgagagaaatgagatcttacaaagtagtagctgtggtcatatccctcttgtgcctcgaccttgacttgctcctcaccccatcctttttctctagctgtcttcttaaatgtttccggcctgagttgaccctgcttatagaagtcatcggccgttccgtacgtgatcaaaatgttgagcttgtgatcatgttcagaggaagcagtaggaagaagagaggacgcatcccattgagcagcttccttctcaggggaggcaaggtaacctttgaaagctttctcgccccatggaaccacggttggattcctttcagcatcgatgagagcgagtcaataatctaatgcgccacacaaagtgaatgccaaggtagaggcaggatgaactcacgcgataggagaaaaggcagaggacgacttgtatgtaagtgtaggagacttgagatagatcgtcaaagcgccatgccctcccatcgagtgtccgatcagtgatactttctggatttcgatgtgtgagtgatgaggaaaaaaagccaaccgtccgaggaaagtaatcagacttttgtcgagaagagaaaaaagtgatctctttcggacgaactttgggatcgacagcaagctcagccttagagatctcctcaggcagctccttggtgatcaaatcgtacatgttgtagttctttttgtacttttcagaagtagcgttcaggtagaacccggcacctgtggagatgactgcgttaaaaaaaagactcttgtctgaagacttcggagggagaaggcaatctgagacgcaccagtaccaaaatcccaatcatcttcctcaccttcaatcccggctcctcggggagaagtatctgggaagatgacagccaacttgtgctcagctgccgctcgtagaataccagatttccagggactagtacgaaaacattacataaatcgacacggaacgtgagatcgaaaaccgtataggtttaagtaaagctctgattcggatacttacccagtatcttcgttacaggtgagtccagagagccagaaaagtgtgggagcggggctttcttcactagcctcggaaggaatgaagacgttgaattgagtgtcgagacctcctaaagatttggactatgaatacgagacgaaaaggaggggtcagaaagcccgatcgatacctatgtacctcttgagtagacatatacaacaacaggaaacgtacagcgaacttatatttagtgagagaccctccgaatgctttattggacgagactttggagagcatgttacgtgataaagatatggcagaccgaatgttattgatgatggtgacgatggtgatgttggtgtcggaagcataagtggaactagaagacagtcagagcgactagccaagatgacgtaatgagatcttgattacgtaataagtttagtcgcatccgggtctccagcgataagccaaagctcggaagagacgtctgacaatcatcattcatacaaccgttccgaagcagcatcaactctcatcatgtctaccgcaggggtaaaaataaaggcaggaatcaagctgttcaatactcttacagcagagaaagctcatgtaggttgatctatatccaggaaaaaaagatcgatcgtcgatcgttcaatcgccaatttcatctcccatctcttttctcctcaatgttaactgagggctgataattttccttttctgtcatatcttggcttttctatatcaatatttgccccttcttgttaatcgatcaaaagagctcggttactgactggatcgaaatcctgaccaacgataactatgctagagacgagctggatggagtagcagagcttgtcgaatcagtgtatgtaccactcgagtttcggctcaaagatgctcaacgatcacaaactcatgaagttttcgtcacattgaattcatgaagcgacatccaacccgaaggatctacagaggctgcccgagcgatccgaaagaagctcaaatacggatccgtacatcgacaacttcgagcacttacactccttaatgccctctcagagaactcccggacgttcccaaagtcattcgctacctctcctcaacttctcgagcgtctcaaagagacggccaaagattcgcacgctgatccagaagtcagaaggagagttttatgggttttgaaaggatggaaggttcaaagtgacgaaggtgatactgctttcaggagagtttcaacactctatgcagagtgtgcaggcggacatggaggtcaaggagcaaatccctccaggagaggatcgctcgcccttggggccgtagtcgagcctacagtacctactaaacctactttgagggatgatgggctctgggaggaccactcttgggatccttctcctaaagctgctgctgccgctcgggccggtatgttttttatttatttaaattatacctctgtcgtcagtcaatggtatgcttactctaatacgtcatgtcgttgttgaaactttcgatctataacagagtctaaagcacaggagtccacccgactggccgatgtagccatgcgaaaactcgaggctgctaaagagcaggcgagaaaagatgctgaggagaggcagcgaaaggagatggaacgaagagagcgagacttgaaatctagagaagaaaaaatcaatgcgttagagaagcttagggctgccaaggcggctgcaggtaataagaaggatgctggaagtggaggcgcaaccggccccaagaggcctcctttcaatttcgaaaaggtcagtaaacattcccttttttgcgctcacactactcgctgatttttttgtataccgatcttgccttatgtaggagaaaccgataatccttcaaactgttgcttctgcttcacaagcagccaacaatctgatcaacgccatcagagtcagtcgaatttgctactcggcatctatgtttagagactagcacacattaattggttgtttttatcaaaaccttgtatatctatacaacagctcgttaatagagaaactgagtctatcacggagaacagcagagtgcagaagtatctggaagaatctaagttgttgaggaggaaagttattcgatatattcaggtctgtgtattctgtacttcttctttcccgtgcatctggcctgctgattcctgaattcatgttcaaccttgaatactgaagttggttgaagatgaagagtacatcggaaccttgctctcaaccaatgagtcaatcatcaccgctttgcagctctacgataaggttagccagatgtctttcaaaccgtcacttgttgtttgaatattttttttgacccgtcgctctatacattatcgaccagatgtccaaacccgcatctcaagactcagacgattcgagcccacccacgccgaaccctgcaaatcgtggtgagagtggaggtgatgaggatggcttgacggcccgaatggcagctcagaagttgcagaatgaacagcgagagggagaactgatgaagcttcagaccaaacaaagaatggccatccagaggcaggtcagcagaagctcgatctctaggactccgacgggtactggtgccgatgagttaagaggcttggatttctctggagggttcgtttccttctcttctctcttttcatctggaaaacatgaatttataaatcttaacatgttgcgcggtatgtctctgtcaattaccatggatgtacagaagacagaaccttcctcctccgattggaccgaccgatgttggttattctcgttaccccccaactcagatcgtagactctggatctgatcttacagattacgactcatcggatgatgatttccaacttcgagctcgatcgcgacggccgtctcactctgctggtgcagagtacaaccacgattactcttacgggagtctggacgagggagcggtaggcaatctgttggactcacaggggcaggccaacgaagatccatttgcggacccgttctttgatcaagtccaagagagggaaccggaaattgactcgaggtccaggaaggagtggtgcggtctcttctcagacatatctttggatttgggaaccccttgactgactagttttgttgcttgacatgtgtatctggaacctttcctacaggacatctgtctaaatccgcatcatacgttgtctctatttttcccttgacatatctcttattcttcctctccttgtcaaatcatcaagcttttatctctcatcttgtcagatttgttccttcagctcttggttctccgtcaaatttcctttctgttgttttcttcgtgttccgataacttcctgtttttgttcgatgtcaaatgcaattgcttgtccctctggctctttgtccacatccttgttcctgcttttggtatcgacgatgtttttttacctactatatatctctcgcatatgcagaaaatttcctcaatccgatgctgcttgaaagtcagacgaatccaaaggtgatcgagaacgacgatcacctacatttcctacgagagaacagaatattcgcgtgtctcactgttagggttcatcttgatgaaatgatttccacacaataaaaagcggacggttggtcaaaaaatccgataaaaactgacatatcaaatacaacgtaactagggatagacaacagataaatcttttacatgaatagacgcgcctagagggtcgtatagagatgtgtgaacttttctggaggtgcaaaggcgcgatctgatttaaaccagccttgaacgcttcaaggaggtgtaagggcgaaatcgaaaaccacccgaccgaagaacacaaacagacagacatcgtcatcgaaagcgtcaatctcaatgtcagagaagctgctgctatcgagctcaccatcagtctctggccgaagaccaagaattccggcgctgatgctgatgtttctcttgttatagtggtctcatactatccggcctatcgtatgtctagcaaacgcgcaggacctttgccgatccgaccgggccgagttcaccgggcgaactcatgtccgcctttcggggttacgtccgctttgcgcatcccaatcactcacttacactagatacgacaaagaactctccatcgctgacccgtcttgctcactctgatgataataggcataactgatctttccgatgagcgggaatcactaaaaatgaacaatatacagaggtctttctatgacttacccggtctacagatatccttctaacttggtggatgttactgcatcatctattttcctttagctatggggcgaagcgtggttcagtcccatccaacgggtttcatccgcactgatcaaattagagatactgtgccttgaactcgttcagactcatacttttatctctgatacattttcgcacctcagcagagagcaattttaagaatgccaagatgattcttcacgacaatattggggcttttggaaagcgaatcagttggaaggcatacataaaccccctctacttcgtttgcgtattctaaaacttattcttaaaccgatttccctgtcacagatacgtaccaaagcacacaagtcacagtctatctcaactctccacaagcgcaaaacatcttcacaacaccctcaccatgctctctgtccagaattatgttcgagaagatgatcctgtcggaaggcgattcgatcaggtgttcgtccattcgtctttgactgtatatgacatcaacctgatcgctgaactttcgttttctcatttctaattatttcacaaacagatctgataatattgacgccatcaacgttgggaaattatggcaatgtcagcaggccgaagaggcagaacagaacgcctacgccgcctcccagtttgacgctgaaaaggaccacagtagcttcagacacttcgctgatgagaacgagactcccaaaaacttctatcggtgcgtccgatgtattttttcttcagcataggcgtatagtacaaggatatctcattgattgttctctcgtttcagtgagcaacacacaaagcagacggtggagtacaatatcgaagcacggaaggaagcgttcgcgaagcctagagcgacgctctccatctgggaagccatggaactactcaacaccctcatagacgcttccgatccagatacagataacactcaaattcaacatcttcttcaaacagcagaggctatcaggaaggatggaaaaccagagtggatgcaggtcaccgggctaatacatgatctcggcaaacttttgtactttttcggttcgccttatttctttctcttcgatattgtcccattacctttgtttctgcttggctgaaaccttttttacattcgcgcgccttaacggtttgacgttgataggctcggaaggtcaatgggacgtagtgggtgatacgtttgtggtcggttgcaaggttccgcttgaacatgttgtatacccagatacgttcgaagcgaatccagatataaatcacccgatatattccacaaagtacggaatttacaagcctgcctgtgggttgagcgagttgatgctcagctggggccatgacgaatatcttgtgagtcccaacacctagctttgttttgttctcttcccctcgttacagcgctgatgatatgatcccatcatactaacagtaccatgtgatgaaagaacaatccactctcccgaaagcagcgcttcatatgatccgattccattcgttctacccatggcatagagagagggcgtacacctacttcgagtcagatgaggacaaggaggcgttaaaagacgtattggctttcaacccttatgatttgtattctaaggtgcgcctctctcctctttctcgaatcaattcatttcctagttccctttcttctctaggttctcagactaagcagacgacctgtatgatcagtctgactcgataccagtcaaagaagagttaaagccatactacttggaacttatcgccaaattcttcccggacaagattaactggtagtttgtctcctcaatcttcttcacctcactgttccctcctcttgtccttttcttcatccatactttgcaaatctatccctatatcgcatgttattttgtcctgagtccttgaaaactttctctcatcttccaaataacttctctcattgacttaatggtataatcctcgtctgtagaatgcatcctttttctcatcttctccataataaaccgaggcattctttctttcttactcagtgctttcttatttcacggctgcctcatgtgcactcttctttgactacctttgatatatcatatctgtcaagtgtctagaacagactattataaaatcaatcacagaacgatggtcatagggaaggacaaagccgagaaaataaaacccaaaagaagagagaaaagattcatcaaacacctttatatatactgatccccagccactttcacactatgaacccccaagaagagagagaaaccagcaagaacgaggaagacagggaagccgacagagaatgagaaggaagagaggaagacgaagaacgcaaaggacttgaaatggactaacactcccaaccccaagggaacctctcaccaaggatattcaaagtcgcgaacatcacgggatctcctccatactcaatgtcggccttgagcatctcaactttcacttccagatccgtacctacttccattcctacgtccatgtccaagttcgtacttatcttcttctttaaattcggctctgacgctgaggataacgataaagcctgcttttgatcatcgcctttcgactttctggtcttgacaccccaactagattcattttcttctggttccttcccgtggcctttgtctcccttcatctgactcgacctcaaccaagacccataagaaccccctccccgaatgtttcgtctgaatggtctcggattcaaccatggacccggcggagcgcgcacaggaagcggaaggatcttacgagttggcccactccgagaaggaggtggttggccaaagtagaaccatggtttagcgaggtaagagctgtctgtagtagtcgtcaggggtttgagtcgtagatctggtgggttgattatagagaccgactggaatgcgtcaggtagtggtgttgaagctttctccacgtcatctcgcgctctctcgtcctcaacatggttatcatcctctgcgcgggatgaataggcaagattagataactgagaattagtgaccgttcggcggtgttgttgagtattacaaagaacacggttgtgctcccgtcgtaacacttgtcggaaaaactcgctcgatcttggctttggacgaacaagcggctctggcgcgacattcgccttcgtctctggcctcgagaattcaacagaagacgaggaagaagttgctttcatcaaagaaagtgacgaggatgagggatagttgaaatcaggactgtgatcagaacttgaatcgaaagagatcgatgcatatcccgaatcgtcatacctctcctccttctccacatcgcccttcaaatcgacttcgtgcccgtggaaattctcgtcacgacccgagacgcactcaggctgatcaggaagaaggtacgtagcgaacgcctggtctagttctcctctgtctccgtccctctctaccattccttcaatttcatcgttttgagttatcccaacattctctgatgagaaggaaccttccaagagaggaccatggatcgataagaatgcagagaacccatcaaatgccagtctgcctgaatcctcaatgggtgggtgtgttggttgtcggttttccccaggatctttctcttgtttcgtgtcaaactgggcttcaagcgactggaactgggatcgcgacttggtttagagatgcgggtgggcacaaacaaagacaagagtaaaaaacaggcctgatcatgatcacgattcaaaccaacagtcaaagaaaaaatgacaaacatgatttaaatctgcttcatcagactttagttcttcacgcctcttgatactcatcccgtggtcaccaacttggttactgatgaagcccaactgacgctcaacctcttcgagatccgctaaaagattttgcgcatcttcacccttttccatgcgtacaatacaataagggaaagctggtacaaggcggatctcacgtctgatagggaggggggtatcggtaatacgttctggagggatataactttggatgctatttttttataacaaaaagcgaagtatacagggatggatgctgaaaaagggataaacaaagaagagatataataacaggcaaacaaggtgatcagtcctgtaacattcatttccctgccttgtatacttgtgtttcgatgagtttagttggtcgatcaggaacgataaatgagcgtgtcggttcctgaaagacatataagcctctggccatcgcgatataaggttagttttacttctatgaaaaccgacggcttaaaaaacttgagtatgcgttgttgaccggttggcaacaaaagccctccaagagatgtggctgatgccaaagagaagaaagacaacaaaacacgacatgatattttttctttgatacgtaaaagcaagcgatgttctttatcgcttatcgaattctgtcaattgaaacacagatcaggtcagcaagatagaaatatgtgtcgtcagagaggagtaaagacatactgcttcctggaaagaaagattatcatgatcaagccaaaaatgatagaaaacgaggggggttaagataatcagcaaatccgtcgaacggcaaacgaggacaacttattcttagatcaacgtgttgcttaccctaagtttgacaaaggaagaattcaaacaaaggatatcatttagtgagtcgatacactatgcccataagccaggtcgagtgaggagagaaataacacttacatccattcggacacccagatttttattgatatcgtatccaaacgtctgttgtaaaaaaagagagaaagcgatcagttcggtttcatcttaggacacaatgcgaccgatgaattaacctttctctttccgaactcgatccgctcgttttggactcgtctaaggtcctccaattgttgtttacttaagtaggtctcggtttctacagtcggtcttctcaagctagacgaatgtgccatcagatctttgttgggatcataggatgactgagtatcaaccgttcctccggatcgaatcaaatccatcttgacagaataagcctcgatatcataatactgtggtgttaagaggaataggagggataaaatcagaatgtatgtatgcaagatgggtgaccgaatgtatataatcaccttttcatgaggaagcgtagctaaaagtgcgatgcattgacggagacaagatgtcagcaacatatggaccatttgcaaactcttgaagtgaagactaaccagtgttgaaatcctcaacaaataccgcccactctttcttttctttgtccttcttcacagtttctgggttgatcttccgctcttcgatcatccaagctcggaattcctagatgtatgtttttttccgtgcgcaaatgattttgagcaatgaaatcgaaggcgatgaaacaaggggtgaagtacgactgacattctctttgctttgacgactgtatagagagcgatattgacaagatatcagtcaggctctgagaggaagtagagcaatcataactcactctgcctcgtcaataataccatatttgccccattgggcagtacttgaagctgaaagacccttctttttgtcctatcaaaccagagatagtgatctgctaggtcagtcacatcaatcttgagggcggtcgatcagtcagagacaagagggaagaacggaccttcttctctttctttcgatccttcttttccttcttgcgtcgccttcgctcagatcgagactcgtcctccgaatcgtcagatgaatcatcatcccgatgttttcgggagcgttctttgtgccgtcgtcgacgtcggcgttctctctcttcttccgagctaatcgaacagagaatgaagttaccagtcagacttgagattcaagtctctcacaagccgaattgaattggacatactctgaatcagactcggtttcggaagcgtcccttctgcttcgacgggaagttgtgtccttgtatctgtctctgcttcgacttctactctcgctcctgtgtcttcgacgcccttctctacttctgcttctgtcccgtcgactgtccctatccctatctctatctctatcacggtctctagatctatcgtcatctcttccggcgtcccgattcctatccctacgggatggtgaccgagatctctctgaaggccgtcggtcctcatctctgcgagaccgagccggactggctgacttctcctgccaaacttcttcttcgcgttgcggattcgatgacatggtgagaaggaacagttcgtgcgtatgttggttgagctcaaaggagatataagatgtaatgttggagaaaactaggcatgagttagcagtcgcgtggtggttacggtgattaatgtgccattgtgtcagggatgtgacctgagtgttacaccccggtaatcttctcctgcttctgccgttcctcttgcttcgttattccttatgctttctgattgcatcaacatgctggtatatagtctggtagcgcaggtgcttctagcaccttctatgaatcgttctcttatgcataatccctgaagtctgaggatgatatataagacgggtttcctttgccaatcctagcatagtccaccaagcctgaatcctttgtcattactttgtcactccttggtttcctagtacccttgtttccagtatcatatcaatattgttctaccaatctctttgccctgcgccctcgtcaaagagtaacgatagaagctggagaaggttaccggggtgtaacatccaggtcacattcctgatagaatgagcccgcctgatgcaccgtcaaagatgagcgcacaacatcatcatcaacacgagtcaagccatggaaggaacgaacgaagggaaggatacagcacgggtgtttcagtagcagaaagggggagggaagagaagaaactacaaaatgggctatgtaatggactatgagtgaaatagtgactaaatggtcgatcattacggcggacattcgaagaattgaagattcacgtactctcacacactatggagatatgaatgaccacctggtctagatagttcaaattgtagtcgataaactaagcagccgagatcctccgtggcgggcaagaaaggcagaggaagagattaccttccccatcggaagaggcaagtctcgtcagaaggtctaaacagacgcaggaagctttttttggtcatgagattcatcgaatttctcaaccttcacccgctcgctcgcttcccattcttccgtcgttcgtcttcactccttgtattcctattgacctattctatcttgcttcggccgtctatttccactgctgctgacatgatgaaaatatataaagcacaatacatactgatcacacacaagtctatggttcctatgagtagcagctgctccatatcggtggccgaataggtctcttctttatagtgcctgtgcctgcctgtgcctgtgcctttagtgtaatgcagattagatcacccattcaaacaactttccgcccgggtaaacaagaaaaagaccgtcattcagtccctgcttggaaagctgtttacggaaccacacacaacaatgtccatctcattgcgccccatcgcagatcatcacatcaactagagcactttgttcatattagtcggcatgttcttttgctacgggagagagaacgaacaatatggaaaaccaagagaatctagcgaaccactgttcttcccgatcctttccgataaatatcttggccgaacccatgttctcatcttctcgacactttccgtttgactgaactctttctttccggtcatttggtcttctgaatgtctacttaaaatccattccttccttctgtccattatctcttccgaagatctttcccttttttctttcagagtcaccatctactgaagccttagttcatacatacgcactcctttcaattaacatagccatgtccgccttgtacacaaacgaccctgagcgtcagctcgaacacgatcgcgtagagaatgaaaactcggtccctcggaacagaacgatggacaagcaagaggtcaacacactttacccgatcaactctaccacccactggacaaaccagcagtgggtatcttttgcttgtctacggtttattcttgatcttttgtcctttgttcctgaattgagccttcatcctgtctatctgaacactttttcactcgaaggggtacaccagcagctcctgtagagcgtgagcatatcccctttgggttgatctgttttatctcaagattctgacgcatactctccaccttgtaactgtctcgaatgtcgtcctaatcccgcggccgctctgaatcaggtgtacccgcattctacaagacgatcggtaatcgtacgttgcgttctcttcttgtcgtccagccatctctgtagtcagctgaagactgagccttacatcaattttattggtctaaagctggtgtcctgtaagcctttcaagatctgtttcctcgatgaatgaagaagttccgggcaatcacggatcactcatgtctgtttctggaggggtcttgacttcgttcagtggattggcagtgcatgcagtcacgctcatgttactcgccacccaattcatgggctggagaggagtggggagtcctcaggtctacatgtgagttttcctcggacacaatgaattttatcgggtttgtgctaacagatcgattgggtaaaattgcgcgcagcggaaacttgtatttcacagcagggctatacatgttcactaccgctcaggtcagtctattttctcctatatgcttccctctctttccatgcgctcattctgctgacaaattggcttgactatcttctcatacagtggtgtttgatcaaaggagaaaccttgtcctactgtgtctttggagtgttttccggtatgtaattgtcttgattctcttcttcatcacctctcaagctatacatgctgaaactcatacccaaatcattattcgatacaggattttatctttcggcaagtcaatctcaggtttattctggcctacctgtcattttaataacatctttctctctcaatttttactttattcaaatcattgatagtttggagccatcttgacacccgcatttggcgttgcctctacatatgtcggtgaaatcggtagtggaaccggaattgattccgagtatcaaagcttgggaatcttcttgtttgtttggaacggaatcttcacggttcgtcagaagcgctttgtttatgtcttaatcgagcgcgtgcttctgaacgatcaattgaaacactataacgccctcaatgcatcaatctcgatgatatcagatcttcttcttcatctcgctcaagacaaacgttgccttggtggtcgtccttggtggtgtgtccatcggagtattctgtctcggtggaatgtactttgcgctagcaagaaatgcagctggacatggaggtctcggtttggccagatcgtgcagcaaggtgaactctcgctctttttactcgtttcgcagaggttctcctatattgaccgctctacttaaaacattccaactgagcaggccggaggagcattcctgtttatctccgctctctctggattttatcttgcattgtcccaattgagcgcaagtgtcgagatgcctttcacccttccagcaggcgatcttggtcgagtctgggctccaaagaagaagagatcataaactgcctgagctatctctctgcccccggtctccctccctctaccactcctaagcattcattctccctggttttgtctcagggaatacctctcttgggttcgtcgtcgctttggtaggagatgattcccacatccggcttgtcttgttctatatgtatcataagattcccctacgctgttctctattcatgtaactcttatcctttttcttcttctcatctctgctttccttcgttctttgacttgcctttctatcgattctttcggaaagatctcgatcgtttccctctggtcttcgatttctggtcatgttgttcgtttagtttgggttttgggagtggaaataacatgtattttcttaactatatgcattgtacagactggaaacaaagagagaaagaagtcaccacagcagggttccattccttctatgctgctggcaggtcgttgatacaccgtgtagatgaatacgcgattgggcaagtcgaggctaatattatgttacaagagttaatattatctgaaagaagtattgagagttttgacagagtgattatgttaagggtttaggtgaattatcgtttcgagctgtgaagcaaccaggatggttgctctagttgttccaagccttggcgacaaacttgccccacatgttgtccgttccaagaacctcactggacggcgaggttggtccgtaagtcttgaaaacggccgtagtgaggttcagcgtggggtcgatctggttaacgaactttgcgatcgtgggagcgaagaaatccaaaaaaaccaagtccacagggtcctcatccgcgagtccgacagggttgggagaagagatgtaagtaggaatgtcggaggagtaaggaatcgggttgtggagagtatcatctcccaatccagggcatttgtcttctgtgacgtaaccaagagtcaacgtgctgttggccgaccgcgccttgagctcaaggtctcgcttggccgtgtcttcatgggcagctccagctcgaacatagttctcccaagctcgtctgagtacaagcgccatcaaaccaaaagagagctatgtttaagatctgtggacagtatgcaacacaaattagcacgctaaggacgcaccgctgagctcgctcgaacgctccgtccgagttatcgtactccccggcctcttccagtgctcttcgcctgggcgcatttccggtgataagcgcgttgagcaccttgctagcgactcggttgggcaacctagagggcgtattgatgatcaacaagacatactctatctttcgtcaatccctgcatcaaacaggaagtaaactgcttactccacgtagttgaagaggttgacgaatggagagacgatgtagttgtctccatcagtgaaaggtccttggtaactatagcaataaaataatccgaattatgttatcttcaggttccaaatccgttgaagtcaccggtcgacgctaagcatttcaaggaaacaagagcttacaggtcaaatcgctgagaaccagagttgacgataacaatcttggggttggttcggttggcctatagttttgaaagtctctagattgattcaacctcttgtaaaatattgcccattatgtatcaaactcaacttacatctacgatagcggtggggaggacctggttggcgagcacagttagcaagctgtcgttcgctccgtagggggatcggttgaggtagtaatctgtaggacatatcaaagtataggcagacgtttagatttcctaaggtatgagtaaacgcagacaagactcatatcgaaatcatcataaacaggtcccttaccttgggggacctcgccaaggggagtagagacattgtagaaggagacgacgttttgcaattgctgagtaatgttgattccaaccttggtatcgaacacatcgtccctcttagtgtgccaagcgctgtcgtacatcagattgagcgagtcaatatcaagttggtaccatctgacctcaggatgaacctagatataggtatggaatgatgtatacatactagctgtttcggttggcgtcaatgtatcgtcctgacatatatatcaagaacacagtttgatcaattatcatgagcagctgggtcaaagtttgcggcaaagaaaagttaaaacttacggctaacgactaggttgtcggtagtgttgggagcaggcaaagtagaactggcccatccgatggtctccatgtatcttccggccgaaagggcgatggatcgtccatcgtactgcaagcaatctcggatgtgatcctactcatatccagacgagtgaaaggacattcagtcacatatctcatcactcgagatagtcaaaaactctcaaaactaccactaacatgaccaccgaaagtaaacacaggcacgtgtgggtgaagggacctgattctagcctgaatagccgcgaactgagagtttgatccttgaaccggcatctttcattcgtagaagtcaagacgtcagcccattagcgcatacacaagacgaaagaccatttgagataacttacatgtccaagaacaaggaagaaatcaggttcttccacgatggcctcgttgaaccaagtctcattgatcatggctacaggatcctgaaccttaacgtttgaagcagctccagtgaagttgaagagcacacctgcggaccagaatattatactgtcagttttcgtctgataggacctgtacatgacacgtcgtatttacgaaccgaaggcggtgacctttcgaccctttcgagtagtgaactttgtgaatcgctctccaataggaacacttttatgttacataaggtcattgatgagagcgcagatcaaagtaagaaggtgatggataggcacgataagagtaagaccggacaaacctggtgttgactccattgacagtgacggtaatgttaacattgctggtcaagtaacgaccgttccacttgggcgcgaagttgtagtgaacatctagaggtgcaaaagtgttggtgagagttggtaagttgttcagacatcgtagcgatgtatgagagcgaggactatatattgtttaccttgcgagatattagccacgtctattttgaaagaaggttcgttttggatatcagatatgttgtgtcaaaaatatcgaagcaaacgctctgaaaactgacaaagttcgtggtttccgatctgatttcaaaaaagaaagttatctagtcaggcgcttttacttttgatttgaacaaaacggtagtgacttgctgcaagtgcatcgtagggaatctatgagaataaaggaagacacgattaacaacaggcaacctagattgatgtgagatcaatgtgatgagagctcacctgagcaaagatgttaccagatcgagctccgttgacttcccctttctcgacggcagcgtcagtggtcgggtttccgtcatgaagatcacctggagacaataaggacagttgaagcaaagcaagttcaagaataataagaatatgatcagacgcagctatctcagggcgcaaacgtaccagagtcgaccaacaaaagatcgacgtccttttccacagccttctgtttcatccagtggatgaacgacgcaaaatctccgaaatcaccactgtagtttggctctgggaacgaagacttctgatgaccgacgagccatccgtgagtgtcggtggtagagatgaagttgacatctccccactggagctctctatcgaagttgatggcagatgtggtatcagtcgttgccaattcacgagacatcataacgttctattaacccgaacatgattgagctcttctacgttcaagaattaacttgccgtgttggataagaaatgcctgatacgtataggcgaagagaacgaagaagctcgtcgttagtcgtcagtcgtcagtcggccagcttacgataagcagttgaattaagaaaccaacccaaagtagagccaggctggatacgctttgcaaaaagcttgctaccggcgtggccaggatcacaggcggatacacccaaagcggagagagcgagaggaagggcaaggagttggccgagcatgaccgaaggaatagcttgcgtttgtgcttggtgaagatttgagaggaagataagttggatcaggtcaagcttacagtgaaccagacaaagttgtttttcatttcatcaacccatgtcttgttatatgaagcgaccagagaagaattcagagaattcagggtaaagattgacaagttttccatctgtttgagatcaatgatggggtaggttgaaggggatgagatgcaacacgttgtccacctcggatcaaaccccatagtgtcagcgtcaactgatcaacaacatggggaaatatgagatgataaatgatccaaaaaaggaaaagaaaaaggctgggcaagaataccaagttctgtgacgataggtcaattcagccatgagccctttttttagacccacgaggaaaagtttttggcatgctcataccttccgtatcttatggtcagcaacgtgttcatcaggaagctcattccctattgaacccttcctcaggtggtttgattgttttctggatatcacgtttgtgaagtcgtttgcacgtgctttctgttgagctacaggacttctcaagaaacaagaaagagaaatctattcgacgaagagttcagtcaagaatgaaagttatttacggtgacgagaatgaggagtaaaagagagaaagatcacaagcgaatatgaa

SEQ ID NO: 500 - DNA, 34423 bp, Xanthophyllomyces dendrorhous
aagactgttatccgtataagtaatttaaatagtcataatttctataatcgaataggctcagttaggactggtgtagtaatggagtaaatacaacacgagaaatttggaaggtacatggtctgacaagaacaaaacgagaataataaatgcttcagaggttgagaagagtgaaagcaagcgaagaatagtcagaagtaggtgggtttatgaaacagcgcaactccgttcagaaccacgtttcatcctctgtctcctcctcatccactacgtctatcaccgcctgttgcggcgtgcgtctatctatgtccgacgcaggattagcatgcgagtttttcaattcccgatggatcgctgtatttgagtctggtctcgggtctaatgttgacgctggatcgacgtgagatgtaggtttagacagccgggttcgggaagaaacaacagcacgatgaggcgtgagaagggtcgggatatgggttctgattggattgaatgtgggatagcgctttcggagtgttgaatccctggaggtagattccgaatctggtaatgacgacgaagcaggattggcggcaggatcactgtttgacgaactcgtcgaacacaaagccggacaagaagaccatggggaaagaaccgatgaggaatccgacgatgaatcttcatcgctcagatccgagctgtcatcgccccgctctccctttcggccaaccgccagcgcagagaccactggccgatctttctgctctcgggtttctccagcagctacccaaatctcagcaagtgccattaatcctccttcttgcatccacctctcatcttctgccttgttttccatcaacctctcgctctctatttgtgagagcatggagctatcgcaaggcagcggtgacgcgacgtcggtgtagagcggtgatgaggatcgtgagcagcgaaacgaagagggaagatatgactgaacatgtatctggatgggctccatcagatcagtttcttccaattcttgagtagaaaatgtttctctctttgagtcagatgagtgaaaaaatagaaactatcaatgcttgttcgatgtaggagacgattgcagacagaatacgtacaagagagaaagcacatcctcgaacaatccatgcccagatagtgtgaaattcaggatgagtacgagggaaagctgcggcttgaagggcctcatcgactagttttcgaagaagctgaatgagagtacatcgttgacggcaaagagagaggatttatagaaaagaagggcatgtcagtgaggaccacgcagcggataaccccaagagaaagacattgaacaaacaagtttgttgagtgcggcgtaacctgcttggagtgtttctctagatgcttgtcttcttcttgaagtagtttcgtcggatgttaatgatttaccatcttggttttcctctccttctctcactcttcgaagtcgttttgatcgctccttgatcggcttctcatgcatcatcctttttcttttcataaccctcatcccttcaatgccccttgctggactcgtgatgacatcttctgaatcctgttcgatcaatacatcgcctcttgagactttgtctttgaacaactcggatttgataggtttgataggtccttcacccacctctccatctgaagaaaacggatgggaaaacccaacgtctgggggaggaggagggcgagtggactgagttttcagctgagttcggatgttcggccgggtgtttacataggccggtcgggtattcgtcgttatacttgttggtttacgtagaggaaggatatgtctagatagctcgacttgagttttagaatttgaggagcgacgtgggagaggaggcgctactgtagaagggctcttcgaggaatatttgagcggcgaaagatctgattgaacgctttgtgtgttttgatgtatccaatccgttgatttcccttgattatttcctaccagcctttctctccttcccttttcttcaactctctctgctttcaaatctctttcctctctactctttctggcgctcgtgttttcttcctgacttccccctttcttctcctcgtccgcatctgagtctgaatctgatgatggtgacgatgacgatgattcactcgaatcactggacgggagtatgttcttctgctcgatgtcaccttgggcctgcgctgtctcgatgtttggctttgaagtcaagtacaagctagacttcttcaatacgatccgtttgatcgtagtcgatggagcgactgatctgtcagatgacactttagcagggatcgccgacggagcagtgaatgtgaatttcgatgttggaaaagacgtgttcttcgcaatgttgacagtcttttgcccatcaagagaggaagtataacaggactgtgtgggggatgtggtagagctggggacggatgttgaaggtgtcggttgtgagacggtcttgctggtagctaccacggggacatcagttgattcggcctctgttttcgagggccgaggaagctgcgccggactgactatcggtataggagagggttcccttgagctagacagaattgatgatgcaatagcgacatttgagagacgaggatgacgaggagagaacgttcctcggggtcgaagccgacaagatggagttgaaccaggggctgacatctggctatatgaagccgacaataaacaaggagtgctaggagcgctgcttgaaattgctgactcgatcgatgctgcagatggtggaggggaaagaggagtagtagacacaggaaaagggacggcgaagatgctcaacgacggcttcttggattttttacgctctgtctcggaattcaacgcaagcggagtggatttgatgccatatatcaagagggtgaggtgaggaacatcatgatctggatcgaagggcacaaagtcaatcaagagaccgtgaagagttcgaccttgagtgtcgagcgaaagtgacgcggctttgggttccgggatcagggctgcgtggaagtaaagtaatccagaaggctgggtggagtgcgttgcgcgtctaatttgaacaggaagagtggagtgttgtgccaaagcagaagtggggcaatgtgtcaaccaatcgacatcaacggagatagacgaaagagaatgaccaacatcttgtaaccagaacgaaggtcctcttccactgaatgaatcaacaccccagagtcgagatctgctaatttcacaaccgaatcaggaccttctctcaccacgaattcaccttcagaggcttcgttcttcaaacgatctatccatgattttatagccgcaactttgggtgccgctggtcggccagcggtaagattgagtttgattttccgaatttgtgttctttgtaccggcggggaagatgtttcggctgaagatggatgtgcatgatgcttgaattgtatggaacttcgtgaggtgatgagggatgtttgagcgtctaagtatgtcgagcttgaggaggtaggtggaggcgagggaagagcaacggattctccagaggaaagagaggtgatacatatacctggagtcggggtagaaagttcagcacacatggtcgggataactagatgatcaggaatgtaaggctacctaccatccagaggcttcgagggtgttctcagagaaccttgccagatgtttgtgcgcgccatgacccctaagcaagttgtgtatgctgtaaaaccaaggaactgctgaatccgatagatatgcttgtatgtgttctgatcttgacgttagtagaaattacttgaactcccatagcaattcgagcgccacatacacgtgcgcgttacgtcatcacgtattcgtcgaatcgactttcaccactctctggccatctcttcttcctttattcctagctatcactatcctttaatcaaaccatgacatccagagctcaacctgatactgagccacttcttccaccggcacgaggtgccgctgctccatcccctcgaagaatcactcgggcttcgatttacgtcctcgtcgtcgctttcatcctcctctttgccgcggcaatcacattgatcttaactggcaaagcatctccacctttctggaaagatgaagggccaagtgatcctctcgagagagctcattggctcctttctcggtaagttttcctgttttctattctggcccttcagaattgctgtattgatgaatgtaaatgcgctctgatttccacaactatagaacgaagaccccaatcatcgatggacatattgatttgccagaatacgtccgaacgacttattccaacaatgtctcagaagtccacctcgacaagaagatgggaggtcatgttgatatcaagagactaagaaagggtcacgtcggtggtttcttttggaggttcgtttctattgttttccttaatcacctctccacagtcgtgggttaaacccgaccgagagaatatgaacacgcggtactgaacaaggatgtatgaatccatgcgataaaaacgacagttgttacaccgactgcccagaggagcctctgttgggcaaaggccagttcctggatcctactaactctgtccgaggtaggtgcatccaatatgataatcatcagttattattatacgatcccactgctttgactgatctgtatctctcctttcatgatagatacccttgaacaaattgacgtttcgaaagtactcattgccaaatacaacactacattcgagctagctaaatcggccgatgatttaattaacgctcgaaagaacggcaagattgccagtttcttgggaattgagggagctcatcaactcggaaactccctcgctgtactgtacgcagcttctggatactctacctgctttgtgtgcagaaaggttgtagctcacaagggctgctttcttttgtcgtagtcgaatgtatgccgagctgggagtcaagtatatgacactcacccacagctgcaacaacgcatttgccgattctgcaggaatatttgatcagcctactcctgttcacggcggcctctctgagttgggtagagagttgattgtagaaatgaatcgattaggagtgattgtcgatttgagccacgtgagtgaccaaaccgctgagcaagctttggatctaagtcagtcattttcgctgcttgtacacaaaccatgtggatcaactcgttaatctacttcatgcatatgcagctcgagcacctgtgatatggtcccacagttcatctagaaagtttgtcgacattcaacgaaatgttcctgatgcgtaagttgcactcattcgcttcacataaacactgatcgtctccgtaatcatcaggctgaaatgtcagacttttcctctatcaacatttatcctcagtattcttcgtaagattggatacggcaaaggattggtggacggagtagtccatgttaactttgccccctacttcagtacgtatcatagacggtctctatttccacacatcaatatatgtacgaaacgctgataaagtacccggttgagtttccagttgtcaataagggacagccagctactgccgaggtcgttgcggatcatattgaacatatcagatctgtcatcggatggaaacatgttggtcttggctccgacttcgacggaatcggtacgtcttttgtccatttcaaggaatatagggtattctatcaagaacctatctaactttggcttttttctttcctttgcatgttttcttccagagatcgtgcccaaaaatcttgaaagcgtggccgactatcctaagctatttgccattctcattcgacgaggctggaaagacgaagagctcgaggcgctcgctggtggcaacaccctcagaattctcagagaagtcgagagtgttaaaaggcaaatggaggaggaacatgtgggcgcctccatgggccgatatctcaagcgagatgacctctaagtcgactggtttgaagatgagcagctgagaagcaagctatgggaatgcgggagcttcggaaagttgccgcgtttcagtttgggtttgaaaaggcgagagggtagtatcaatcgaatgaatattgcgtttataagatgtcccaagaaagcaaagatccagcatgtctgtcgaacggggttctgttcagacaagtcttgttgatgtattcacgtcatcagttgctttgtttggcaaatcctcccgctaacttatagaattccgtcttgtctctattcagagaccacaaggcctgtagttgtcaacgtgaagacatcgtacagctttcatttatattcatgaaaatatattgagcgaaccaaacaaagaagatcttcagagtggtgattttcatctagggaccgataaacttctcggtggtgtttgatgagtttcttgaggaataggtccgtctaattcctcagtttcgtcatctgtagatacaggggtccaacgatcttcaaccaggctttgtccatcaacaccgaccaccaaagagggtgttgatgagtagaattctggtgtttgaacgcctgtgtcttgaagatcttctacgatcaacgcaggagacccaaccctcctcggggtcagttcttggtcattggtttttctgattctcgtggcgggcgatgagggtcgatcgaactttcctgctcgaccacttttttcaccacctgtcatagtatgaagatgggcttgcctggccgctttgcggaacccatagtgggaattggcgctcccagaagggtgtaaagtatttctcaagcgggacgtattactattcaccgaattacgagcatgagtttcgattggtgaaacagagttgacaggatgatttagaggtggaagaaggagagaggaggtaggagaagcgaaagatagaggtctacgagtcggtgtgtaagtcgaatttttttgacgaggacgaggatttgggtataggtaagtgggagaagacggccgaggggttggatccaaggaagaatcttcaggggatggtgaagttggtcttttgatggaattcgagcgaaagattggcgaggctagcggaaggcagataagaaagagaatttagacagcaggaatggaacgtatacaggataattatgtcttgaaaatataaagagtaacatactcgctcttcgatatttgtgatcgaaatcttcgcttttgcctctccgatttcgctctttgctccttcctgaagtcttggacacaagatcaattgcaggcataacctcagccgacccaatttgtacagcgaagaagcaagcaagaatgattatctaaaattgatcgaaatgctttatttttgagttggagtccgaacaggagattgaaatttacatagctagatgaatttggcacataccataaggacaatagaagcggttaggagtttgcggtgtaggcggacttcagtctccaaggcttgcagccgacgattcaaatcagttttgtctcgatcgaagtctctgcgttgacgatcccaatctctcaaggtggatttcaacatcttttcttgttggcttctctagattttatgaaaattaatgacacagcgttagacaatgagcaacttaatctaggtcttcacgaaagagattcaacataccagtccttctaagccacccgcccatctctccctctctttgctatcgaaactggccttccacgtttcccagcgtccctctagaccgtgccaggcctcccttaggattctgacttgatcgtcgacataccatgtggcgagagatgtattgtcttccagagccgtcaatcttctgatgatgaatgcatagatagattcaccagaatcagagggagagggaggagcatggtggactgctgattgggatgaaggaggtttagaagaagaacgcggaggagaggattgagagggatacgcaggttgttgatgggcatgagaatgattaacggtagagatagttgatgagccagaggaaggggaaaggctgatggttgatgcaagaggagagttggctagcgaaggtatcgatgcagaggctactgtctgggcagaagaagtatgagaaacgaccggcacagcttgtttatgggaggcttgaactgagcctggcagaacagtcgacaccacctttagagttgattgttcggcctcggctgcactttttggcgatgtttgcggttttttctttttcccggttccaaatctagccttcagcccactgattttctcctctttcagcgtctcttctaccacctctaccctcctagtcgagtctcctaaactcgtgctggtaggcttcaaatgttccattccttttcctccgcttccttcttttaaatgtgatccaattttgggaataaatataccgacaggctctggaggaaatgcgtagtgttctatgaccggcgcggcctctacttcatgtccttcttcgtcctctttattccatctggcgagaagctcttgttccttctcttgcatatggacttcgtatcgatatgcctccatttggttcatcccgtaaactcgaagtaaagacaccggacagtagtattctgttccgtaatgggagaggaaatccagtcgtatgtatcgatgaaatgatgtaggtggatcgaacttgaaagactactcttcccacagaatgtttgtggtttgaccataacaagtgttctatgaatttagcgattatatttaagtagatcaaagaatgaaacacgaacctgcatcccccgaatgttagccaaccgaacggttcctaaatctttccatatatccccctgtgcatcctccctaccgtttccttcagactcccctgctctgatttggatatcttttacaacactagaaaagaattcaaagttcccgatctcgagagtatcgattctaatctcgtcacaaagttcgatgacgacataataggaggatgcctgacagggtgtcaacatgtatctgtctttagatttgtgaagaagtgcagcaggtgatcgggtctgtggagatgagtaactgttcatcagatgaaggtcagatcgttatccaaagaaccttcaagtacgatgtttggaaaattataaagataaagtcatgtaagaatgatacatactgaacccgggcggaacagtccaaggatgcataattgaatctcctggatggtgctcggatggaaactgaaggcgacggagcttctgaaatggatttagttgtgtgtgatatgtctttgaaggaatctgaagatgccgctgggtgaacagggctcgttactgctgatgtatttgatgacgataatgacgtgggtgtcactggaatccttgaattatgtgcatccaacgaggaagcagttggtaaaactgagctgtaaggcaggccagtagacaacacgtgtggtgcactggatgatgtatactccctgtggagagaatctgatgcattttgggtctgaagcagccgagaatcattcaatggcgggagggaagctgatggagaaggaggatgggtgatggaatgtcggttggcctgtttcgataattggagagatttccactcctcgaatgaaagcaactggacaccaagtgcggttctttctgcagacaaggttgctgttgaagaagacaccgggagcgagctcgaatttattttcgtaggtgctatcgagggagtaagattgagtgaagatgaggtagcctctgaccaagatgtctgccggggtttgtcagtcgaaaaagacgaggtgctgagcgaagtggtcgatgaagatgagatcggtgacgatgatggtgggctctcgccatctacctgctggtcgagagatatcgcttgctcgtccgtgtcgttttctagccaatcttttgagtttgcctcttcccttatctccccctcgtcctcaggatcatcgtcaaaacaaacatccttgcatccggcagagtgagcttcgattctgtagccgcaagattcgcattggaaccggtcagatccgagagctcgaaacggatccaccgcagtgaatagtgaagaagcagcaacgtctgaagatgaggatattaaggaagatgaaaaggtcgctgagtaaacctgactggtgaaggaatagagagcgagagcatggactatgagtctcatcggagatgttgtcgatgagaagaatcgagtgaaccaagaaccttgttgatcttttcttcatcttttgatttcaacgactgacccagctaactcataaagtcgaccatcatgtcaacatcccttccgttacgtctcccagacaacaaggattcacttccaatcagaattaatctatcagaacatcagcagacagagttgttctcaagttggaaaatggtatttgctaacagattatcctctccatggcatgtaaatgattgaccctgagactaaaaccagttcgtaccagatctgtacataaccgaggagtatacttcatcgctttatgacgcacagaatccaggactgaaactgaacgggcaatcagatcaagaatgcagtagtgatgatgatgatgatgatgatgatgatgacgggctggaagaaaacatttacggctgctcgtgctcgtcaagcccatgctgtgatctcactatatcagcctcgtctggaaacaccgacgactgccaatgtataggaaactttgtacgtcgttggctgcctctatctcattcatcactctgcatttcgaaatctgaggtagttgattgctttttgacactgaatcccagggtgaacatgccacttcaaagctgctgttcatgttcatatatcatttgcctcgaagctgatgtccctcccttcttctgtttcccaatctaggccagttcataagctttgacggctcgacaccaaccccaatccttcacctacctcatccagctcacttacctctggtggaatgtggaccgttatgtcaccctaaatcggatggaaacacgttgtgcaaaaatcaaatatccaagacaccgatctttcccttgtaaatcttctctcgtcgtcttttccctttcttcatgttcaccattgtcgtgagctcgtcgctgaaacctattgcgctctccttcacgcgtacatcacatccaatcaagccttgaactccgttcatcccccgtctcatcttttggtatattcacaacacatccgatccctaaaggtgcattcatatgcacctacgcaggtgaactcatcacgtcttcgtctgcgcggaaccggtggctcgctcggtcttccagaaccaacgttgctgttgatcatccttgtaagaggactgaggaaagttcagaagatgagaatacatgcatgaatggagagatgaactatatattctgtttgagattaggagtcaacgacgtctacatagatgctggctctataggtggaattgggtgagtaatcattttgtttcactctttgcacaacgatcttcctcttgctatatgcagataactcacactattttctctccccaatgttccttcctggaacaaagtcgattctttaatcactctcactccccaaacatcatacctctcccaacatttcagcctcccagccctagattccaaagctttagacgaaccggttccctgtcggtgactccgacggtgatgccagagacaaacgcatcaacaggttcaacaaagacgacgtcggaagcgacgatgactccacgcataggattctttgcaaatcgaaggataagtgttggtgaggagctatgctgggattacggagacggcgcgtctctctccgcttcttcctcgaatgttatctcttctgctaccgcggtggctgatcacaaatctgaaataagaagggagaaattggaacatctggatgctgacaggaaaggagtaacaggacggaaagttggagaaggagcaggtaggctgccgtgcttctgtcagagtgaaaattgtgacggatatctacctttcgatgataatttatgagtagattgggtacttccagccatgagcgaggtaggaagtcaaactagtcgagaacaggaggcgcatcggatcgagttttataaaacaatcacatagacaagagagagagaagaaagaaaataaaacaaatagagataacaaggcgtgaacatggttaaacatgcaatctaatctaaggtgtccaaggttgagtatggtttgaacggttagacataaatcagaagaccgatatgtttcactgatcaaatactctaagatgaggaaagaaagttgtcaagccacaaatcaaactgttctcttgacatcgcagccctcatcgaatccaccgttcttgagctcgttggaccatgtcctgacgcccacccagtttttagtaggtcgtcgagtaaggactgctcgagaatcttctgtagaatattgagaagacagaggggccagagcaaatgccatgacaagctgcgctgtaaagagtcggaggaataccaactgaaattcacaagagacgatttgttcagactggttagcttgcaaaagatacaaccatgattgaagaaagtgtggatacgacgaacagccatcttcagtccaaagcaagccctaggcccagctgcgaaagagagcattggtcccgcatctttatcgaaggtcccatccggacgcaaccatctgtcagggttgaacctatggatatcgttcttgtctgacctccagccaagcttaggatcatcggaataaacggcacatgaggtattaagcaagcacattgcgttaaccccggccggaatcaagtgttcctggccgtctggaccagtgacggtggtctctcgaatacctagtatccaggcgccaagatcattagtctcatcatccgtaatttcaccaatagatgtattcaacgcgagctacccactctgtcgaccaacggctcgaacggtttcgccatgtctcagactctcataaaccacggcctcgaggtctaacacgtgtcaaaaccacaacaatcagcgagcttaagtttgcctaccgatcacgccaatgttggaaaattgcactcacaatcacagactccattgccaacgatgtcgtcgtagtttgggtttcgttcatcagaggaaggaagcgatctggtcatctcctcatggagacgactttggacatgaggattctccgaaaggaatttgaggatctatatggtcaagagacaaaagtgttaaacatccagccggtcgattcgagagatttgagagaagatactgacccaacacattgtcgttctattttgagctcgtcgaagagaagtaggtccattgatcagcatcagcagaattaagcgtatgagaaagacacttacgaggtcgtttcttctccagcaaccatgactaacatgaattggactcatcgttaactcggtcaaaagagacactgctagaaaagaaagaaacatacaagtcccaagctcatcccaaagctcgtcttcaggaagaactgaaccaacgcccgctttggcttctttcgcaaggatcacatcaatctggaaagaagatgattggagacatgagagattagaggatagtatggacagattttatcaaatttcatactcacaacgcaagtaatctctgcgatctctcctccgttcttaatcttcttcctggattcatcgactcggccaattagccaacgtctaaaacctccaaagctagattgaaaagatcaagatttgtgagtactaagtaaatgaaaataagcgacatgtggcaaggtttgcgcaggcactaacgcccgttgataactaggcttcaagcgctgaatagcatgtttaagccctggagcaatgccagacgacaatgactgagagttttgatgaatttagaaatgatgttgaaaacaagagattgaacacacagtcagatatgacctaggaagacaacctggatatttaaagtgtcagtacaacggtcgactcacatggaagatgtcgtccatatagccagcgatctcgctttgacccttggatccaggcttcctattcaagtcctcaagtttcaggaaggtcccagatggagactcactgaagagctgaatttcccggggtagttgatcaaaagactctccaaaaacgatttgcgaaatagcatcctaaatttcaagatgtatgttggaagatcagatcaccttttttttttgatacaatgcacatataatgagacatacagtggtcaacatgtgtaagtcgccttcggcgtcccagaagacatcagcgatctgttctcctgctccgaatttacattctgaggccagttgtagcttgaccttccacaagctcatcagccgagccatatgaatagcgaacacatcggccgagattgagatgaaagcaggagacatggactatgttccgtttatttgatagcgtgaaagtttgatcatatcgtcataagtatcaaggaccggcggcgaattagatgaatgagctatcttacaggagccagggcacgtcgatgaagacgaagcatggaatctacaaaacaagtgatacgttaggaccggcaatcttcatgttagcacggttaatcgtcaacttatgagacgtacccgttttgatagccaacatgcccttgggagtcactccaccaaagatgccttgcatgagcgctcctcggtcccagtccttactgttcagaatctgatcgttcagtctcttgtcggccacaatcaagactggttcatacgcagacttcatgaactgcgacaaaggtcctaaaggcttgacgaagctatctacgaaataatccctgtagggtttgagtgatttgaatcgagttcagatgtacacatatgtatatgtttttagaatgaaaagtagactcaattgatacgttagatgagattataattttgcacaccagatacaaagttactaacgagacggtttcatgataatacatatgccttatgagctcgtgagcatggcccaggatgggaagcatcggcctggagggaatattcttgatcattccagggcgaagaacatagtgaacaattgcggcggcgaggacacagacggcagcggtaatgaaggaagtctgaagagaggacatcctgggtgtacgaggagaagagatgcaacggaaggcagacagaagtgactgtttgaaatcaacgagagatggttggctgtagtgaggaggactgtcctgaaacgactgagatatagaggaggatcaaagcggaaagatagcaacaagagaaggaaggaaggaaggaaggttggatgcttgaaagtgtatgtatgtattgggtgcgcgcgttcttggtcgccctgttgaacaaagaaccagaaaaacacggatatccctggtgcctgtatgatggacacagtcaagcctggttagtcgtcagcttgttcctgttcctgttcctgttcctctctcttagctgccatgcaggtcttggttagttcgaagcatccttgttgtgcgcggggtctggcgtgcctgtgttcctgtgttggtgtgttgatgtcaagctggtctgctcaggaacgaagggcgctgaagcgacgagtcggttagggttacatgacccggtggccacacgcttacataagcagtaaccagccctcgcaaccaacaccttccccctgcttgctctctcattttccaccagtacacaaaattaatcctaaagctatcaacttttcgaccatctgagctctcccttctcgcacttgcacatcctcttgatcacttttgattgcgtctggtcaaacaggaacctttttgatatactggtaagtatcgattccaaatcttcttgtcattttaatattatacagggacctagcggaattacagatggggcaaatgacagtggacagacatcatccctttttttcctcttgcttcttttttttcttcttttttctctgccatgcttctcttttcctatatacctccaaagccctgcccatcttggacagatagcatggttaactgattatgctgctctcttgctttgttgtacacgccttcggtcgccctgttcaacacacgcttgtccaaataattccttttttcttgccttcgtccatcctggttcaatcactactcagatacatcaaaaatccctttggtcaagcctataaaactataaatcatccctcttcaccacaaattctttcttacaccaagtttatctcctcccatgagctggatccctaacgccgacggagtccgtgaactcatctctgtccttcgagattcgacaagtgacgacagtgccgtccaggcccaggtgacgaagagactggagtcgttcgagtcgatacctgactatcccggatacctcgtccatatcctcacccaggcttctcaggaagatgaacgattccgagccgttgccgggttactgctcaagaacaacctggcctctttgagctcgtcttctcctcaggtggtcgcctacgtcaaggccagcgttctctctgctttgggcgacccgaacgcaatggtcagacagaccgtcggcacggtcatcgtctctatccttaccgctgaaggtgttcaggcctggacagaagcgcttggaacgttagtcgtctcgttagatagttcgaacgtcgaggagcaagaggtaagtctggatatctctcagccttttcttcctttcttgaagtccaactccgtccggttatctaacctattagatccatatccattttttcgatccgtctcttagggagccttctcaaccctcgctaagatctgtgaggatttgccgaaacagctcgatcttgaaatcaacggccagcgacttctcgactttatgatcccccgattcatcactttcactgatcacccgaaccacaaattccggtctcaggccattggatgcctcaactcgttcgttgtcacgaaccccccatcgtttgcgaccaacatcgactccttcttcactgccctcttccgtcgagcgtctgatgaaaactcggacgtgcgtaaatcagtctgccaggccttgactttgctcctgactgccaggccggacaaggtcgttcccgaattgtcaaacgtcgccgacttcatgatatattcgatgcaagacaaggacgaggctgtcgcgctcgaagcctgcgagttctggcttggatttgccgagtctgatgacctcaaggagcacttgagaccgtttttgagcaaggtcgcccctgtccttctcaagggcatggtctacaccgaggccgatctgatttggctagacggagaggaggatgatgcggcagtgcccgatcgagcggaggatatccgacccaaacactacggaggaaaaggccatgggttcgagcatgacgagtctgaaggtggcgcccttggcggtggcggcaagtcgagagcgcttggagaggacgaggatgaggacgaggacgaggacgattatgacgatgacgaggacgacgatgatgatttctcttcggaatggaatttgagaaaatgctcggccgctgcattggacgtgatgagtgtggttttcgagaccgagctactcgagatcctcctgcctcatttgaaggagaagctgttcgattctgattgggtcaacagagagtgtggtatcttagctttgggagccatggccgagggtaggttcaatgctgctttcaacagacttatatgcgtctcccctctgatcatattttccaaatatactcgaatcatttgacctattcaaaatttaggttgccttgatggaattaccccccatttgcctacccttattcctttcttgatcaacaccttgtcggacacaaaaccccttgttcgagctatcacctgctggaccatcggtcgatactccagttggtgcgtcaatgctcagactccagaggagcaggcccagttcttcttgcctgccatggagagtgtaagtcgttgttctattgatgtatgttggttacgaggaacacggacatgcgttgattgagaaacctcttatctcccatatcctcatattttgcagctcctcaagatggttctggacaacaataagcgagtccaggaggctggttgctcagcctttgctacgcttgaggaagaggccggatctctactgcagccattcttggagccaatcgttcgaaacttggtctttgccttctcgaaatatcaacagaagaaccttctcatcctctacgacgctatcggcacgttggcagattccgtccaggaaggtttgaacaaccctggattgatcgagatcttgatgcctccgttgattgcaaagtggaacgcgttggacgatgatgatgaggatatcattcctctcctcgaatgtctctcctccgtcaccattgctgctgccgagtcctttgcgggttacacaattcctgtctatgaacgatgtctgaagatcattcagaagtctctttccgactactggcagatgcagtctggagccgctgttgaggagcccgataagactttcctcatcgtcgctttggatcttctatccggattgactcagggcctgaaggagaacatgtcggcgcttatgagtccggcaggaactcccgagggaacgatgcctttggcaatccagcttcttgaaaactgtttgaacgtaagtgtcatatctgtttcgaacctttagtcatgaacacgttctgattgtatgtgaataattctcatgaacagcacccggaacactccgttcgacaatcagcctacgctctcctaggtgatatttcgatctcttgcccatcattaagccattacctcccgttatacctccccaggatcgccaaagaaattgctgatcaggtccaacacccgaagtatgaggaggtcagcgtgtgcaacaatgccgcctgggctttgggagagattgcgatgcaatgtcgacaggccaacgaaggtttgtctttttatatcttgtttgctgcaacaaatgatcaatcagatagttgatatcaatctttttgttttcttctatgtatatttacagccgatcctgctcctcctcttcgggctcatctcgagcctcatgttcaaggtcttaccgagtgtctggtcggtattttacttaacacaaccactcccaagtcactacttgaaaatgccgcggtaaccatcggtcggttaggtttgatctacccggagatcgtatcggtcccgttggcctcattcggaaaacagtggtgtactactctctgggatatcaaagacaacgatgagaaggcatctgcgttcctcgggttctgccgattgtgcatgacgaacccgcctgggatcgtgcccgatttgatctatctctgtaacgcgatctgcaaatggaccactccttcggcccagttgaacgataccttcagacaggtccttacttctttcaaggaaatgctcggagagacctggaacgccaacttcccgacgtttcccccagcgttacaagaacgactgcgatcgcggtaccaactttaatgattggttcaaagcatttccattctcttgtcttattaatctttttggaactttgaaaaaaaaaaacccttcctttcctttcctttcctcccttcatatctcctgcacctcgcatagttagctctttcctttttttcttaatcctctatacaaagtagcttagtttagtttagatcatacccactctcttcctttcttgttgaattattcttcctcacgttttatctttacctcttggtttttttctcgttcttgtttaaacaggtgatcacaatctgcccttttttccattgacgttcaagttttacacatttatttcaacaataaaaacactttccctcttcttgattctacattcgttctcaatttatgcatagtttagtttcccttatcttcaatttatcaatctagtttagtgtacctttcttcttctatatacgcttgctccatcaagtccatccttctcttctacttcaaatctgcactgaatgactgaaacttgaaattgaaattacggtgaccgaaaaacaaatatcaaaaccaagtctacattttactgttcaacggcaggaacgacaatggcggcaatttgggacttggactccatccgtttgtcgagaaggccggtcagaagacaaagaatgagctgaaggacacagaaggggatgaatgagagaaaaagtgataaatcgttctatccaaccatcacagatgcggccttccttatgggttccgccttcatttcaatatccccgtcctcatcttcatcacccaccccattgccttcagccgacccgccgatagaaccattgacagacccagaaccagttgtcggtttgattccattcgtctttgtggtgatatttcgatcggctaaggggggcggaatcacaggttggacgggtggccctttgggtttcttggctttcgtcttgatagcattcggatctttggccggtcgtttccagtttccttttccaattccttttgtttccttcttctttggtttcttcttttcctggggcacctttggcacgttggtggcctttgctcctgagtctccctttcccgccgacttcttctttcctgtgacctgctgcaccacaggcggaatcggaatttgagcgagcgagcccaactttcgaaggatggctgggtcgaaaggttcatccgccaagacggtactcgcaggcaagtcgctcaacgttggtaccgttgccgtgtttgagatggaatcaggttttgttactgtaggtttgagctgagatgcagttccatcggtagacgcagaggcaccgttgatcgttggtaaaacaggagtgtttgaggagagaactgtaggcgtggatatcgaaagagggtctgttgaagaattggcagctgcatcattgatagcaaacgatgatgaaggaacaagcgtctcaggcatgactggagcaggcggaggaggaggagggggcacaagtttctggaagcaagcttgatagaaagattggagcaatccaagctgtgcaggtacagtgcccagagagagaggaaccaaaggtggtggaagaggaaactcgagttttggttctttgttgctattcaaagtagaaaagattgtacgggtccgggcaaaaatgatgcaaggtcgacattagaaagaaacatgcatataaaagaaactttgcagagaacttacatattggacaatatgggtcgtttctcccttccgtgaaagagtctggaagggacagagaacgaagagagaccgaactctttgtcgaggcccaactcgcggaatccaaagaaatcttcgcccagatcctcggtgaagtttctattgccaacgatcagaaaagttagccatgttgtcaagtaagagtttcgacataaaccaactcacgacatgaacatctctccatcccctgcgaagagtgtatcatcttccagcgccgtggtctcgagctaaatttatagatcaaccccaagatgagaacaaatgctcaacaaccatcttgccaaggatatgatagcagatatggaaacaccgtacagtctcatcataagcctgctgcattttctttgctagatcggagattttggcaccgtaacgttctatatcttcccgaacatgtctctccagttgctcgaccttagtcgtgccattttcgaaaagcgcgtggagaatcatttcctttgagaagagagacgaaacgtcagcaagatacacgaaagaaatatcgtcttccaaactatcaaaacagaatcaacacttacctcagcagacatgttccgcgcttgggtatctaggtagtatcgcatcgttcgaccaaggttcatcagataatccgacatatagcttgtcagggagtccaccgccgtttgattcccgcctaccagaaacagacaacagacaacagacaacagacagaatccaagaagaaggacgaaagcggtgactgtcagctacaaacctcatctcacgaacaaagaagggcaaacatgatggcaattaacataccctcaaatccaacatgagccaacaccgtactagtcaacaatttcattccctccagtgcctctctactcgagatctctaatccttccaaagactttcctcgtcctgcgtcccctggcccaccgtttacgggtatcctcctactctcttccctcagaattcgtttttcttccctctttctatttgactcgacgtcatcttcttcttcttcgtcctccgtcgttgttgcaatgaccatctgcggaatttgatcacctctccaggagctgttgcccccctgagttcctccttgccctagtgagttgtttgaagagagataggttggcctggaaggcgattcgttcccttccggatctttttgaatgttggagagtttactgtgggctcttcgaattttttgtaaggaatggatattttggtcaattaacgagggtaaagaattagggtatatagaggaaggtgcggcggtggttgctggagtaggttgagatctggtccagtgaagcgaaacaggtggaggaggcggttgtggtttcattgatacactgaagcaagtatacgcaatataaggtcatgagtaagagaaaacgaagcaggtcagcaggaattgcacactttcctctctttctataccacatcaagtattgaaatgaacctctgcttacctttctctttcctttcctttactcagtccaatcttctttcgccgacgtctccgaaaatcctgaaccataccgatagtgctcggaagaccagatcgaatcatttccggctttgaaacatgactccaccatttttcatctagatcgtcatcaacacttcctcctgaggttgagccagtgccagaacatgcaccagcaccagcaccagcaccagcgccaggcgtcccgtcatatccagcctcctttgatcctatagataacagagagacatccttggttgagcgatggtcccatggcgctttatgaccctcaagaacctccctggctttcctcaaacccgagcttcgagtctttggaacgatatacggggaatttcgagtaggaattcgagaagggccggcgacaggttgagacgtatcaagaagggcagagtcgagttggtaaaaatcgaccatcgaggtggacgtcctctgaagtagtggttgggatgaaagaggaggagacatcgggcgggattgtgaggtcatctgacttaatccagactggtcgtcaaaagaaacaagtaagtgttctcttccggcgggaatatccagaatgaaaatcgaacccactctagcaggttttcttcctcttgccccatctttgtcccgctttatgatagctgctgtcggttctgcagcacctcctgctgtttttgatcgcttgtttgcgtgttcgtcttcgctatcgtcttcgtctttgaaatctaatccagccaacggatctggcttagaagccgctgcatcgatgaggaagtccaggtggtgatcggcttttcgtttcatcagaatagcattagatcgaatgggatgaacctgaatgattcgggatgtcagtacaagaaatcatgcgcgacttctattcagtgctaagcacggtggacaaggaaatgatagttgacatacggtcgacgtgttgtagagcaaacaattatcccatataagattcaaatcgtctttgaactcctgtttggtcttgtactgcttccccttaactttcttagcgactgttcctagatccattgggtgtttgacaactaggtttccgaaagacatgcgtgaggatgtgttctacgagacatgaaacatcaagagcagagtagaagggagaaacaactcactggtgtgatagtctggcacgtccttcttcgacacaggtttgagaaaccagtgaccttcaggctgtagaagtgcgcatcaagtggttccgtcgtttcagaccaacgaatcagaacaaagtcgacgcgtcgacgcacatagatatgatggtagcacggtcagcggcacgtcacgggcaagatccacgacatgagggcgtttttccgctgaaacattgaaagacggagctacgtacggttgatctcagttcttgaacgaccttgtctaaactctcgaaccaatcatcgcttcccctcgtttcctttggtcggtcaaaatatgatatcatgtcagttcaacaggaccagcccagctgtgaactgagagaagaacaccttacccttccatctttcacgtcgcttaggagttgtttgagatcttgatcgctgattgaaagccgactatgccggctttcgagcgcttgaagaagatactgttgcgagaaaaagatgaaagaaacgtaaaaatcaaaccgtgttcaatcaaaaaaaaaggctgggctcgaacgacccatattgggtgaagggctgaaagaacttgtgtcgatgaacaagtaagccagagacaaaaagattgttgggagcgaaccttcattaggcgaaatcgatgaagtgcgagaaatctttgaaacgtcttgaggcccagcgtctgtgggtttctgttcggacgggaagtatgtggaaagaggaaaagaacaaaaagaaagttcggaaagggagatgttgaatataaacagcgtgtgtatgtatacggatgctcgtctgctgcgcgtctgggagagccatcggcgagaagagcaggtggacgggaccaaccaaggcaaacacacagagcccgaccggatggaaacgataggcctgacgggaagaatgctggatggcctataggtgaactgtaggaaggcaagataggggatacaaacgggtgaaggtcaatcctgggtagtggatggatggaaggttggtgatggttttcagctgaaaagtatattacgaaatttattacagttttccaactaatttcccaattatcttctcaaaagtctagtcctctctttttgtcaaggcttagccatgagcgcatacacttgagacacaccaagcaacacaacgacttcctgatattcattttatcccagacacttgtacatatgtgtattggcccgaaaaacagattcgtctattatcttttgggagcaggagtaggctcaggcgagcccgcggctgatcggccactcactggcgtgggagtggccgacacgggtgaagggacatctccttgggagccaccttcctcaaacgagctgatgtaatctctgaagaagtttcggtagctggcttttgaggggacaaagtgacctggagaggggacgaaggtttgtcgtaaacagataaacaatgtaaggtaagaaccgggtatcaaggtgatatgtaattagcagttataaaacaaaactcttacctccgtcgtgatactcgaccctctacaatccgtatggaggttgaaaaaaagcagtgagtggatgatgtattggacgaacacattcgaccgaggcgagatgaaatactgaccgaatcctcgcaattgtctgccagagcaagacttctggcctcgctgatgatcacatccactttgccgatgatgtgcaaggtagctgtatttccgtcgataggaaagtacttctcaagaccaaggttctttgcattcggcacaaaaccaccgacgaagatagcgactgcattggcaatcgatcagtctgactccttctctagaaaagggtagaattgctgaaagagacaaacatttgaaagggttgatcttggaggtcgaaaacagcgggtgaacactaggtttgttgatcagtgaacacagcagagccttgagaaccgtttttatataagatcgatcagtctcattgtacttatatctgaagctagttgtttgagatatgtgtacttaccgccattccagcaccctatcgtttcaaagagaacagaaataaatttccaaatcagacggatttaatcccaaactgctatcagggcgatagatttatacatacctgagagaatcccatgacaccatcaaaccccttctcatccttttcgatgaagtccctcaaatatctgacagcctcatcatagccgacaaagttttccttcttgtccggctcgacctcccaccaagaccgaggagtcgtctctggggtcatctctcccttcgaggttgtagcagatgagtcaaagtcggcgagcgttccgccgaacgaagggttcagcacgatatgtggaggctacacggccgataagaacatcacggtgcattcaattaaagatctaagagcaagcaggcgcttttcgaaagaagggtagagacacttacatcgacaaaaactgatggacacagtgaagaatgtataggtcagctcgatgcgtctgggtcaccttcgctaggtaataaccctttgaaacgaaccaaactcaatgttctttccgcatgtctttcggagtgcgcccatacgtttggaaaggatgattgcattctgatgtgcgttaagtatttgtgcggtcaatttcactgatctatacgtgatctgctgatgaatgaagatacctacttgggtgtacccagggagggctgagctcgcacgagcacgaatatgatcgcaccgaaggtatgacgaatcgtcaacgtcggaatgacggatacgaacaaccagtcgtccacaactcacttaaaattcgcatcatgttcactatagttctactgaatctcaagaaaggaggcagtcttcttcccgttcttgttcgctgtgggtgtcgttggttggaaagaagtagcaagagtatgttcaagaagaaaaaagtttgagaacggaagtccccgcattttctccgtaatcttcggatctccgggtttatgttcaacattcgacatccaacatcatcgactacgatacattcaatcttcgacccaagttctgatggccacgttcctctttccgattcccacgacaggatcgcttgcgttttcttcttttctcatcaatggatcagatcagaaccttgatacccatcttacagaggccaccaaccatcggactgcccttcgaggaattctgaagacagagagacgaactggtgatggagagaaggatgctttggccgtattcaacgttcgttcttgttgttctcgccaatatccgtctttttgttcatgaaagttcagactatccatgtcaaaagtcacaaactgaattaatctttggtgatatccatgctcaaccaggctgttgagaattacctgccttgtttgatttcgatcacgaattcccttaaagtggatgatctcctacttggtaacgaaccaggcgagtttcaagtcctatggtttttgctcttcacacctgacgatacacttctgataagctatctggatcttgttatcatacttcgtttcatagtgttttcctggcgagcgacgtgtacacagtcattcagtccgaacccatcgcgcctgagcctatcatcattcttggcggaggagacttttgtcttgttgacatacacctacgcgcttgccaatctatcaacttccatcgttctctcgcttgtttcgacgacggcatcaacattttcctcatcttctgcatcttcccgcgcttatgaactcgacttggcgttaccgacggctgagcgaaagaagaaggacgaacggctgggccaagcagcggatctcctctgtcgagcagccggagtggcagagtacgccgcggagaacgtcgttggcgaatgggagagggaccgagttcagagaggaggttcagggagggggaagggaccggtcgaaggaagtaaagcgtttgctttgggtctttccaagtagggttttctgtccctttttgttttcttgttttcgtcatctcatgaacatcaactcacctttccatttggttcgatcgtatgacttgcatgtaccatcttttttgtaggatgcttctggctgatgcccaactgctctctatccgtaagctgttggcgccatcgatctcgagtgtccttcatattggccctccccttcctaaaccccatccatccccttcccttctcgcaaagctatacctcaacgtcctctccctttattcactatcccacacgcttatcctctcttcttcatcttccttgacatcatccacctcttcttcccttgctacggattcaccgatcgacgagctgataaaatacgtcaaggacgggaaatcgttcgcagaagctatgagcagaaaatggttaggcatcgacgctggtgaatttggtgatcacaaacggatcggagaagcaatcgtctggttaagggaatccaaaaagatattggctgatggctcttcagaggggagaggcttgaacgcaagtggaattctgggagggatcggaaaagggaaagggaagggaaaagaagaaaagaaggagaggagagaaaaatgggcggatgaggagatcatcgttgagtctttcctaagagcttacgagaaagccaaccaaacggttcgtccgctcctttcatcttgcctgcccagtagctttctattgcatcacatatttcttgataaactaacagcaaccgttctcttcatcgatacgcgccatttgcccaaatataatacaaagatatatttcgttcctatcccaactttgtcttcacttctttctcagatccctacaggtcgagccgtcctctcgctcaaaaagtttgttcctccttgtccgacctttggacctggaagtcagggatacatctcaagaagtggagtggatttggaaggggccctggataagatgactctgagaggattgaaccaggatgcagatactggaggagtgacaagtggaggatactattaacggacagtgcgcaggagacgtagcccccttgtacaagatctcatggatttgttgtatatatatatatatatggatgccaatgttgaggatgttatgtcagatgctttttgaagcaggcgcctttcgtgtctcattacaacaacgcaggcttggtaaccgaaaggatgatgatacaggagaatgtagccacgttcttccaccaattgctttttcctatgtgagcattatatagctggtctagacctaacttgatccggataagcatgggttctttggctttcagctacgatcaaaacctctcgccgcttacatcacccatcccaaaaactgcttcctccctccttcttctcattagttctttctcattcagatgagaaaccacatcgcttagcttgttttcacctcctccacttccaccgcctgccccgtttttagcattcgacagattcaagggcgtctgaggtgtgatcgaaccagctggtgtgaacctgggagcagagataaacgaaggcgggaccgatgaagatcggaaagatccagttccagatccatgagttgccgaggaagaccttgagagcgccgaagccagaatcgaaggaaacgtttttggaccaggtcgattcctttcattggcacggccagggtgcgcttcttgatctgactgttcatcaggggttaacttctgaatctcggcggcttgtcgcgccttcttaagtatagaaactggagtaggaggcgtccgacattgtttgggagtgaatatgactaggtcgtcttctgtcatattagacggatcttgagaggacaattcaccagggtctgggtaagaagaagatgtggtcggaggaggaatgacgagaaacgtcgagggctctcttcgcctcggtgtagccaaaccaacgacagacggctccctcttcagaggactttttcgggatgaaaagagagaagcgaagaaacctttagacgattcctccgatgcaaagggggtccctggaccaagaggcgtaaccgattgtggcgaagccgacaagttggcaaacgtgcacgccatccagtctgcaagctcagtgtaaacttgatccatttccgacactttttttccccgaaagaccgtgtgtgagtaagcgattgagagtgcgatagagtagagctgaacaagtatcatgaaagaagaggaaaattatgtgggctcactgagagtagccatctgcaaaaaccctgtttgatggaaagaaagcacaagttatgagctgggtatttactttcgtaatttgattgaagaaatcagtgtttaccatgacccctgaaatcaatatggagaaagtgagttagacaacatccgaccgagttctcacaacatgaatgtgaaaaatgaaagaagcgcaccatccttcaaagatcttgacttggacccaatcctcttcttcctcctccaagattgtatcctttaccgccgaggcaaaattctgatcattgttcacatcgatctcaacggagccagatcggctgcgacctatcatgagcgactcttggtctatagcatctctagcttctgcctgcctcgcggcttctgcttttcgcgcccgtttagcttccctgatccggcctgttgctcataaaactagagggtcagcccttgaacttataaagtgagagatcaagactacagtaagattggataaggctggagagactgaccagcccagatgacagtatcatctacgaacggatccttctcgccacagatcatgagcacgggcggaaacaaagcaaggagagctgagggagcaagaataggagaaatatagtaatctgtctggaaatctgggttctgttttgggccgatgtagaggatagccattgcccgcatctgtcgtcataccacaaagatcagtcgaggttagtgggcctcagctcgagattggatgaaggaaggagacggaccatagatggagagatgatacggtcctggaaataaccacttcgactggtcatagtcaatcttgtcccaataggtgcgctctttctctgctttcgaaccttttcgttcgtaaaacttggccgattcgcctccgagtttgatttgttgtgttgtgaggtagacgttccttcctgttcttctttctctgtcaacgttgatcgcgtcgacctcgacaattccgtctcgctagactgcgtttttataggcctgaggtaatcctccccttcattctccggagctacgaccataggcgttttcactctttctttcaatggcctccattcgtcctcaagatcgtcttcgactttttccgaggagttcttctcaatatcaaaatctgttttgttctccaaggaagcgatagatgaccgtgagaatgagagatgcgatccgattgagcgagaccaggacttttttctactgagtcgggttctcgtccgatcgatatcatctacgactgcaagtggtgatcggtgcgcctgtcgacaagcaactcggaggatttattaagtgaggggaaataaaggtgaactcgaacaaaagtctcctcaccaggtggtctttaacctcttccataccaggcaaatgagtagagctctgctcggatctcaacactcgcaaattatcagggctcatccaagctaaataaccagaagatgggggttttagtcagtgtttgcaacttcttgtcatagtaaacctagatattggtatgagaaccatcatacatgtgaagttgaaatccaagcaggcatatgccagtaagagtgagactggtgtaggaatcggatcaggatgttccaaaatcttgagcatcacggtagctacaatattggcccctctgggatttcggcaagagaggtaggaaataaagagaagaaaatcgatcagtacagagatgtaagctttaaaaccgtcagacaagagcgaattgtaccaacgcagagtcaccgcagaggaccatgttgatttctccagatttcattcctatgacactaccttttgacttgacgagcgcaaggtacgcatcaaaacattcttcgatagcccatgggtatgggtctataggctcaaaacatgtcgatcaatatgtagttaagcatagaatggaaggttgagcggtacgcacattccggactctttccataatcgatactgagcaccactatctttcctcgtcctctcgcctctctgccgactcttctcgaccatcttctgagtcgttcctcatggtgattcggtcccatacagataaatcctccaccgggaaagtccaagatcacatcccggcacctagcaagctcgtctacagttccgtcgaagaacaggagcgccttgataggtggtttcgagccgcttggacgagcgagaagaagggacctcacaatcggaattgacggacgacgagacgcggagatcaagcggagctgtttcagatgtcggatggtgcaggttgatatgtgcatcagccgactgacagagacataaacatgaagacagacgccgacgataaagatgaatgcatacgtaagggttcgtttgcttctcccagcacgctctgagcatctcgactgtggctaccgctctgaatttgcgaagctgtcatttgtcgtgtgcgatggtgagccagatagtgcttctgaccatggaggatactaggagacagaccttttcgtcagcttcgtcggcatacaccgcgtaatagcacccaaacagctgtcgggaagaagattagatcaagctttcggttggtcaggtgccctgatctatattttgaagaacacattcaatgaggtcgtcgaggggactactcacaaatccgcatagatccctgagccataaaggacggacactgagggcggaggaaatgccggcatcaaaagcggttgctatccatgtcgctcggtagaacgatggagcatacttgaagcacattcaaaggaagaagttcaaccagccgcgccgaaagagacagcttggttaaacgaatgatgcttaccagccgcgcgaggggttcgggtgctgagtgacgatgatgagaggtgaagggttgcaaaacggtaagagactgacgcagaaaggcagacaagaccagacgacttgaacgaaccctctagaccgatgatatgatccagatgacgaatggcatatacggctgtaagcgtgcagagcacgatctggtacggtgtgaacctgactgaggaacggaatgagacggcgttagctgtgagtggtgttcaagacttatactacattgcgaacgagagttgaaaagacatgtcacaaacgaaccgagggctctgttgaattttctgattccaagaaatcttggtccgttcgctggtgttctggacaacgagcctagccagaagaacagaaccagaaacacctgggtccgtctccacttggctgacggccgacccaacagatgatctatcatatgaagtctgtgatgatgtgtgtgtgtgtgtgtgtatgtgtgttagtaagcttgtaagtgagtgagtatgttcaaggatatgtggtgagtggaatgtctagtgagggtcagtgcatgaagggcatcgtccacactgaactggatgtcttgctgggctctaagagacgtaaggacgcgctgggcgttgagaccggctaactcgattgggctgaatcatgtgatataaccgaatgctcgagcccgtttggttgttcgtgtaccaggcgtgatcggtgatgagtgatacgttcacatcgttaccttgttcgtctcagaggcagacatgttgatatgcacagtgtctactggagggtatgtagggtgagagatacatattcaggcagtcaagagagtttggtgggtaccatgaggttcacgaatcatgtatagatgatggtttcgagattggtcggtattgtgaaaagttgagctgcatatatgctgctttcttttgagacaggccacttgtgactttcaacgtggttgtatgctatcgcaatcagatggctcacgaatagactcgtagagatattgatacatccaaacagaacaagggaggggtacgacatgctgggttgtcatcatcacagagatggttagatggagagcgaaggagatgtatgacgtcggttagaaattccatccaacctatcgtgttgcttcatccgtcctcaagttttctgtcacctctggctgttttgactacagggatcatcaacacacacacatatatcaggcatctgctcttcctacgtatccgacctttcagtaaaaccatactcaactcagggtcatcctcttgctagatttgcttttcgccactacagactttattgtccgaatcggaaggctgaccgaccaagatcttgtaggcgagatatactgtacataaccttttcttcttcttcttgatggctacgacgcaagctccgagctctagctttaattcttccctgcacttggcccggacgttgacgacccaagcgcatgcccatctgtcattgagtccggaacgagcgttcccgctttatctccaatctgcccagctgtattctttgctcgtccgacaggctccggcttatggattgacccaacagatcaagaaagaatgggcagccgtgttggatctggctgggaagaccaaggcggtgatcaaacaacgggacggacagggcggtgtcagagcaggaatcgggcaatggaagagatgtgatcccagtgggtttttgacttccgtccgagcttgctctgtgtacttggttgaatctatgcagacaagattgggctgatggtg

SEQ ID NO: 501 - DNA, 4082 bp, Xanthophyllomyces dendrorhous
tactctcaaaatcggccgatataagtactcctgtaggaaatcttgaactgccggtatggaagttacctccatctgtatctatcttcacctcggccatctacacgtgagctattcaagttcatatctttctttcttttcctttgggacgaattgcaatcttgattgtttcctatactcacaaacaacaacatgttaataatgatgtgcgaagcgatccatgcccgccgtcgataccctcatacttgaaggccgcatacgttctgccctcagatttgccatcactcgacaccctctgggaccacgacgtccgaccagagatgatcatccagagtcatgttcggaattgtagtctggtcgctgggatccaagctgccatcggttggaacaaccgattcggtggggttgataaaaaggtgagtctgagcgaaggttcagtaatgagttgcacgagaactcacaaacgagctaatcgttgtgggctatgttcatagaacctgttggcgcctacgctctatccgacgtctccctcgggtctacctgtccaatcgacttccggtcggtatgtgttcaaaccgacggtcaacggttccgcccgatctttaactatagacagccagctgctattttctctgcgtggtcgagaaccgataggactctccttgctctcactgcggtcccctgcgctctctgcgaccgagatcgattgcgtccggccgaggactcgagggatggaatacgcgctcggtttgatcgaaaaaggatggatgaagttgatgggcggttgggattccggagggagtaactcgagtgtggacctggctggtttgacgggatggatcccggaggtcgtcaggtttcatgagcgggactttcagagggagaatgtatggaagcgggtgaaggacgggttcacgcaaggtgagtgacatggtttgactcgatgtatttgtgtttttatcaggggaagggggggggagagtgtttttcgtcaacttgccgtgctttgctgataccctctcttgtggttctctaaaaggaacatgcattatgactctcggcacgggcgcgttgtcttctctggttgaacgttacaccggtctaattagcagacacgactacgccatcaccggtaaattctactgaggatatctgctgtccagctggtcgttttgatgctgacgctgatggtctcttttacttttgtcatcttgaaactcgatcgtcgatgttgatgaaacgaaatggaatcaagacttgatcgagagagacggagaacgttttgttcagatcgtcaacccttggaaccgacctggcgaccgtctttcgctcagtacacccccaggcgccggggccggatcgggtgcagtcggtctgtcattggctatagaagctttggagatcatccatgaagggtctgaagaggaagaagagaaagatggaaggacgtttgaagaagaagaagatctttctgggaagaatcgtatgtgaattgactttgctctgaatatgttgtgtcctcgggctctcagagtactgagagaccatgcttgctgcactctctcactctctctcactctctctctctctttctctcttcttcactcaggtctgttcgttgtaccgtgggaaacggtgatctcgacgttcgacgctttgtacctcaattgggatccttcgatctttgactcgagttgtaccgtccattcgttcgttcttttttatttaccaatttgtttccacctttggttcgcgcgcgtagacacattcgcgggttaaaatctggaagctaatgccttactccttcgctggttcacttgtcggtctgtccttctttactgacaatacagatcgtggtcgagagaggttaaagaagcaccgatggcatgtctgacgactccacggttcacactagatttccaagctcaaggacaggaccggggagagatctggctctggctcactcgacatctgtccgccactggctttgaaagttttaggaatagacacgaggacgacggggacgtggacggggacggtgagcattccggcaggaagggtgggaaacagagagaatggataggactgaactgtatggaggatgacccggacgggacggccttccggacgttcggtgtcggtgatatttcctcgtcgaaagtggtgggtctcttttttttcttttttggctttggcttccattgtttcaatcgaatcaagctagagagaaaaccccccgttggctggcaattttcgacaaactgacaggattgataatctgacttggttttgttgtttcgttttgcttttcttcattcttttcctcttcttctgatctgccgatggaaaaaaaggaattgacggatagcacccatgtcctcgtacgttctgtccaatctgtatgattcattttgggggggattggactatatgatcgttcgcaactgacaggatgaggactcaaaccgacagatcaagatccaaccgacgaaatcccactcgagacacacactctttgtccttcgagagggatcgacggacgagacaaggttcacgctgagtgctttctcgaccgggctcgtcggcttgtccgatgggccgccggatctgcctttttcgttggtggttcgtttgtttctttctctcattttcaacgacagtcctcacggcaagagatttcacaaacgatgaagctgacgagcgttttggattgaacgtgcataacatcatcttggataaacaaaaaaaaaattactacgaacaaacctcatcaggaggaaggagaattttcaccgaggtcagcaggcgggaacgttcggttttcaacgttcatgaacaacccgatgtacaaattggtgattcatccccggtctgggaatggaggtggaagcggaagcggaggaggagggggaggaggaaaggacgagagggcagaggttcggatgatcttggagagtaaccgaacggagcgcgcagagggagcggacgaggggaagggtatcggcccgatgaacgtgttacttgtgtggggaaagggcgaacgggtcgtcaggttagtgtttgagcatctatttgtcccaaaaagcaaggggagagaagctcggagaggactgaagagatgttcgttctacatgcagcctggtccaagcggatattgtgggaaattctgggccatacagagaaaagacgactatctgtcgaatcccttcactcgctcgttcgttcttctcttggtcgccttaccttagggaagggcttctgttctctttctattcccttacctgtgtgcgcgaggctaatttgatgcatgtgttttcaatcatatgcatatgccgtgttgaaaaaaaaaacccctccctccgacgacagccggtgtgtacacgttgattgtgtcttcgttctttccccgttcactcggctcgttcaaactgggagtgcagtgttcgtgtgcgatcgacctacagccgatcgctccggagggagccgggatgtttacccggactgtgcgcggcgaatggtgagtgggatgaaagagggagagggggagagagtggacagatgatgagaaagaggagcaacatgactgacgactgtttcgatacgagcaggaattcgaacggtaacccggtgtatagactgtcgttgacgaaagcagggtcgatattgtgcgtatgtctgtttgcattgtgcgcgttcgagcgttggtctgaagaggcgatgtctgatccaacacaaggaaaaaaaaaacttgtcccgtttggatgaattaaatataaaacaccgattgatggtgggaaaatgttcgggaacgatcagtctacgattacaaccggtatcgctgtcgactacaaagccgcctggcgtgatgcccatcaggctctctgtgctttctaggacaaaggatgggacgacgggggagatgacgaattctggagcgttcacagacgaggtctctggcgcggtgacgccgagggtgaaggtggatggtggggagtacgacgtggtggtttgtgcctactctcctggtcaccacgggcgctttgtgttaactgcctatggggatgtcaaacttgacttggcgccca

SEQ ID NO: 502 - DNA, 1442 bp, Xanthophyllomyces dendrorhous
ggctgggctgtgcagatctgtggtaagttgagttgagattagacaagcatggctagttgattcagggatcggtctattctggcgaagggacgagtaccgaggatctttttagcgaatggtcttcaacaagcgaagggcgggggagtggagaggaggaaacggacgggaagagaagggaagggaaaggaagatcaggcaaggggaacgatataacgatataacgatataacgatataacgatataacaatataacgatatagctgagaacactcacgacgttgatggcaaagtcaagaatgtttatcgtcagagagtgttgctgcgtataatgaaggccgactgtgtggcaggacgaaagcttatctggccgagggggaggaggagggggaggaaggaggaactgtgtaggtgagagaagagttgaagctagcgtgtagtcggtgtaggtcggatatgacatgtgcgttcgtgtgcgcgtgtgcgtgtgagatgtgtcgatcagactggaagatctctgccggctcctttgagagagagagagctgggaaagagctgagagaggagatgaccagcagaacacaacgagcgcagggaggggaagagggacgcgtgagtggaggcagcagaagagaggaaacattgttttgatttatgtaactatctagctagttgtttgtttatttatttatttatccatctgttttattattattattatctattgatcttctctcttgtcctttgggcgctctctgagtgatggcgtgtgtgcgtgcgtgtgtgcttgctggctgccggcaagtgcaaccaagggggagtttgtgctctggcaggtgcactctcagaggcccactcgagcacctgaactgggcggtgcagtgtgccttgattggtgggctctgtgtgtttgcgtgtatcaggtgagctttgaatgggctctccctggttatgagtgtgtgggtgtgtgggtgtgtgggtgtgtgtgagagagtgagtgactgtgggtgctctgtgtgtgtgtgtgtgtggcttgtgccttcggtagggtctgtgcgctctttctctctctctctctctctctctctctggctgttcccgctggattagatttccccgcacgcccgcccttccgccgtacaaggccagtacactgtgctgcgtggctctgtctctgtgcctctctatttctctggctttccctcttggtctctgccggctgtgtgcttgaggacgactctctctctctctcgcatagtcactggcccatctttctttgcttttgccttttgtccttgcccttgcccttgcctcgctctgttccctcactgtctcccacgcactctcacgcccccagtgcctgttcctgttcctgttcctgttcctgcctctattgccctttgctcccccctcccctccctctcccttcatctcgctcgctcgc

SEQ ID NO: 503 - DNA, 61067 bp, Xanthophyllomyces dendrorhous
tctctctctctctctctctggcacaattcaattgcaaaatcctaaccatcattgccttctatcatcgttatcttagggttccgagactacggtcgaagtgtcgcgtcttgcgtgtttctttgggtcggctgggtgtttacagtatactccaccatccttctttggcaatcttacgcttacaacgctcgatggggaagtccgaaagccaggcacgtcagagaagctgagaagggattttcacctggcgaggatggggcgcatgatctttcgatccctaccgagtcatccagcaccggtgctttgagagccgaagaggctgtttgaggatgaagacgctttcttcctgtagaccatgttcaaaatgcttcctctcattgtttgtctcgctcacacttcccacaatcgttcttcgtcggacttttgtcttgtcatattctccgttacgctttcccatgaactaatcctcctagatttaatttatactgttctacggttttagatatccttatcaacctcattagatattcctcttttgtcttatactaccttctctttacctcgctttatttctaacttctacatactgatttctttattgaaaatacctgttaccatagtacttgttcttggagccaagaatgatagttacactcagtcagaaaaagaatcgatgcctttcgcaacatgtctcgacgccagtttcgaaaaattattccatatcagagtatcagaagaaaacaacccggctgatcagccatttcattccgtcattcgttgagctttcaggaatttcagtgtgaactttcggacgaccccgattgattcctcgatatgttctgttttcttattatagatatgtgtgttgagtgatccgatgagcgctagatcactatcacgatttggatttggtgatcggtggtgaatatcaagagcgagaacaaacggaaggatgctcagtacattcgagaccaacttgccgatacagtcaaatgaaagtgtgaagagagggacaaacggagtgatctcccaatacccgtatgtgattcctgatgaaagcgtcaagatctgagacggatagtcctcataatcttcattcccctctccgtcttcgtcctcatcttcgtcttcttcctcgtcgtcgacctcttcgacttctccgtctatcctttcttcggattcgggtcctccctcggattcagaatcagattcagtctcgtatccatctatagcatcgaaaaagtttccagttcggtcggacgcgtctcgaaacaaagcctcgctcttctcgtcgattgtcttctgtcctacaggaacgacagatctgtattgttctcgaacacgggacaaatcagatgtagcgatcagtcagaggaggaacgttgagatcgagacgcatgccaagatgtctagcaagacggacgtgtaaagttcctcgtaggcgatgattcgagtgacccagtccacgcaagtcgtgtagaccgcgttttggacgggcgctccatcggtcgcaacatacaactttgtctttttatcgatcaagaacgatttatccatttgggctgtctaacgttgttgttgtgtacatttccaatttccccatgatatgattgaaacaagtcttgttcagtcagaatggtaccggaaggcgcaccacacgaatcaaagatatactgaccacgacccaactgttcatcatacccgataagaactgcgcgaccataagactttgcctgatgacttgtgagaacgcataagcgagtcttctatcgtagattgaagtgagaaagaatgagacttctggaatggcgtcgatttcctcgttcgaaaagtccgtcatgtcgtcttgaacgtaatcctgaatttctcggaacgtctctgaattgacaaagataacagcaggcaaacccgagagtacaacatgagggtagaaggcaaaagaaagaagcgaaagagaaagagaaaggcagagacgaaccggtgagtgtatctttgccggtgattccgtcggctttattaatgaacaagtagagttgcatatccgggttacatctatgggctgccaggaaagtcatcgctatactttgaatttgttcagtgtacccctggtaagaatcaacgagtcgtccataaacgcaaaggatgttagccagtgaagatattcattggatggaaatcattttggatggactatcatcatagatagaggggcacgaaccgaaatcatatctacgaaatagatcaataccgagaatttcttcaggttgtctccgaagttctcggccgtgatggatcctggagtatcccaaatctgatatggtgcgaatatgctgttggaaagaatttatacaaaagattaccatccagagaatttagaatcgttccaagatagtacggatcagttcaaagactctatcgttctagaaaacgaacagctgtgcgggagaccgaaacaagagatcggcattcagatccccctctagaactgacgtacttgacattttcaatcttgatatcatgagtgggtgagaccgaaggaatcgtttgcctagcctccatgccatggaacagaacctccatcgcactcgtttttcctgatctttagacatgtagaagacgcgtcgaattcaataaaacagacctatatcatacgaacgaattcgaagagaaagaggtagagatcagaaggataaaaggtcatggaaacacgtaccttctggctcccatcaagaggattttctgcgataaaggatcctcatcgtctggaacgggaatccattcggagctgtccgccatgagatacgagacgagaaagaaagaaagcggtttggtagctctttgagattgttagtcgacaacggtactggaacgatggtctgcaagatcgatgaggctgttgagtctgatgccagggagttggtttgaggcgagggagggtcgtgaacaagatggtcgttagtcgggtatatattcaaataaccagaatttggatggtgttctcttgatcattatatccattcatttttccttcctcggctaaaccctgtgcgcgcctgttcgtgctatctcttgaaacagagaccacatcctatgtacaccactatgtttgttatactgatctctcaacaagcttgggcctgccggtgctgctttcgaatcgattcacagtcacactatgacgatcgtttaggactagctcagagggtattctggcaaaacgtttcaccatattttctactcgctgttcttatcattcggcattgccatattctcgatgctttcttgtgtggaaggcttgttcgtggaatgataactcagcgctagacaggcaaatgattgattaaataggattaagaatccttctggcgtttctttcttcgattcttcgccttttgctccttcttctcctcctctcccgcccagctatccttccaagcctcggacattcgtctcaaaacacttctcagcctactcttcccttgctcatttaacagtcccatcagcttttcttcaaattccttcaacgcaatctcgtcaatctcagatcctgtgctcttggttttgccatcaacgatcgaccgtgcgaccagcaaactcttgctcatcatctccaacaccttatcctcctgaacaaacggcaaagccttgtgactaggccattgtggtctggaagatatcgaggaagggacgagcgaggcaagatggacgacagcgatcttgagagatcccgtacggaggagacactcaaggtaagattgggtgtggctgtcggtgagtggttgtcgagcataaagttgggttgtccaaattttggttgctcgttcaggtgctccactgtatccacaggcatctaaagcctaggttaaggcaagaacaagaaagacagtcaggttgcaaggattatacgatgagcctgaatacgaggacacaagacacatacaactgataaagcaagatcatctcttgatctccggccggatacgaatactctatcatacacctcaagcgcacctgtataatctccgcaccaactgagtgcattgatcatcaagcctgcccacgtgctatcctccatcttatccttcttctctggcttttccacagctatctggcggtgatctttatctctcacatcagtcttgtcgatggatagatcgacgttgatcgcaaattggttgagttgccggacgtattccaatgttcgttctcgatggtcgaccggacaggttcctaagttggaaaccagattgatcatctcttgaacgtacgcatttagaagtacccgaatagcttctttcgctttcattgatgttaccaaactcggtgaccctgtttcactccaaaagctcaacagtggcccaggcggacctatcggggtggtctttatagttttgtcgagtatgatatttgcgctcacgatcagtgacgtcaaaggtcgtggccgaaggggtgatagtcgattgaaacaccaggcgatctctgatgtgtcagaaacggatggggcgttcatcataagtgaattgggcagatgggtcaggaaggattcctccagaaggctcgacactcgtggttgtttgctcagccggtcaaatatggatcgaatgtgatgcatgtatgacagatcggggagagcaggtgtctgtgcgagtagtcgaaggacgagaatgaggatctggacgatctgagtcgaataagcggacagtgattggtcgggtcctttgggcagcgctgttcggatctgtccttgaaacttcctgagggccgatcgatccttgttcttttcaggcttcttgtgtttgggctcctgcagtttgccgacattctctgtaagtttgaccactgcgtcccacaccttttgatcgatctcggattctttgattgctagcgccgatttgagaatatggatgatcatttgtcgatgaacgtctacgatatgttcgaattgtaacagacggtagatttctatactgagccaaaagcagtcgctcgatcttgtttggcaggagcgagcatgaagttgctggaagatgagaatccagggaagtagataaccgggtggaattaaggagtcaccggcaggcggtggatctgtttgcagaatcatattgaaggcagacaatggaggaagaggttgtgtagtctgattgatagcagccatcacggtgtccacagcaggttgaaatcttttcgataaattcgaacgagattggccagcgacattgggatttggaaaggcggaccgacgcggtctggtccctttcggtttgggcggtgagggcggtaggctgagaaaagcagccagctcacgtgaactttcttgctgagttctagataaccaacccaagcgtgaataacgacgatgaatgaatgaatgcacgaatgatatgtacaagcaaacggacggacgaacatacagaactgaaggcaagtccctcgagcgactggtcaggcgaagagctcgtcttgatgatgtcgccgcttttcgtataatttggcctgcactcatctgtatattccagtatgatctaagtcagcccgaccttcagcgaacagcacacagaagcgcgtcgtcgtcgttcttgtacagctccaaaagtagatgatgatggttcgttgctgttcaagccgttctctgttcggacgagatgagcatggaggtgcagtgcggggttggttacggctgatagctggttacggttagtcacctgtttagcccgtaaccacttctgcacaagaattttgagccttcctctcaactttcgctttcccactctgcttgaccttaccctcaaccctttcctcccgtttcccatatacatccttacctacagcaacgtacgtgcacgtatagggttgtcttgttgtgtgtgtagaatgcgtagtgctgacagagctcatatcttcttgaatctcacagaatggccaagatcaaaagaagaggagagtccggagcggccaagaactacgtgaccagaaatcaggctgttcgtgctttttcaattctttctactcgttatagatgaggtcgaactcgtaaagcgggtatacgagtgtgtttctgaggacaacctactcacattaatgggcttctttcttgcgtctcgtgaattattcagatcaagaagcttgtacgtacagaccttcgttgatcgtgttctctctgcatcaagcttacactccttccttttccttccgtctggtctcaatcaatctttgtagcaagtttcccttgccgatttccgaaggttatgtattcttaagggaatctgtatgtgtttcttccgttcgacttgtcagtttttcctcatttcatcgctcacatattcttcattccttctttctcagtcccacgagtgccgaaacatgccaaacgagccaacaagggttccaccgcgcccgcctcgttctactaccagaaggatatccaatacctcctccacgagcctgtactcgtcaagcttcgagagcacaagtcgttcgccaagcacctcaagaaggctatcggccgaggtgaatgggctaaggctaaaggactcgaagagagcaggccggtctacaggctcgaccacattctcaaggagcggttagtcccagcatgctcctatgtttttcttctccttttctgttcgacggctttcagctacagcgaatcatggcactggaagtctcaacgagaatcagcaaactgatcatcgtctgccattcactctatccgcctatatcgtctcccgatttgccaccatcagatacccaaccttccctatggctcttcgagaccttcccgatgctctctccttgatttctctcttctctatgctccccgtcaacccaacacccacctcgaccctccctaaggatttgtcttccaactgcgccaggcttatggctgagtggaagctctacatcatgagggagaaggccctccgaaaggtgttcttttccatcaagggagtttactaccaggttgagttacacggcgagaagatcacctggcttgaggcctacggtttcacccagcacgtatgtcctgttttatgctcctggtactaggcgctgatggtggtagactgaggcttacctttcatctatcctcctttcttctgaacaggtccccaccgatgtcgatgtcagaattttgatgactttcctcgagcttcaccagaccttgctcggcttcgttctcttcaagctctacaccgacgccaacttgatctaccctcctcctctcgatcaggaggccgacgaatccggtgccggctttggagctttcaccctcaaggagaacaaggagactgccgcttccgatcagattaagactgaggccgctaaaccgtctgagaaggccgtgaagaaggtctctcgacaagaggtcaagaaaggaatcaagaagatcgaagcctccggaatctctaccatggaggttgacaacgaggaggaacagagcaaaccctctgtctcccaggacgctgaggatgctgaagagttcgtcgagcgagcttcgaaatcaaccgacccggccacaaccgactctgctcctcttcctacactctcttcgttgactgagctatccgctcaacacgcgttggccacccagctcttcaagccctacacgatctacatctctcgagaagttccccgacagactttggagttcatcctccgatcctttggttgtgctcgaatcggatgggacactcaaaccctcggagccggtgccgatttcaccgatcccaatgatccttccatcacccatgtgattgtcgatcgacctacactcgacaacggtgtcttccactggtccgaaggtggaaagaagcaagatccgtcgtccgataagcgaacattcatccagcctcagtgggctgtcgattgctccaaccaaggaaagatccttcccgcaggcgactacgctcccggacaggtcctccctcctcatttgagtccgttctacaacgatcaccagggtggaggtgtcgtcggatttgctgctgattctaggaacgcaggttcggcttctgccggtggtgaaggtttgttggatgaggaagacatggatgaggacgattccgaggacgattccgaggatgaggctgccaaggaggaggctcccaaggcctcgacttcttccgaagctttcaaggcgctctctcttgacccgactaacgaggttctcagacacgaggccgagcttgaagccgaacagcagggtgttcccatggccgctttcgaggctgatctcgtcaaggccacgaaggctgccaagaagtccggtcagaccgtcaagagtggaaagagaaagggtgtggaggaggaagaggaggatttgaggatgatggtcgcttccaacaagacgagaaagttgaaggagaagatggactactcgaataaggagaagagggacgaggtgcgttttgactctattgctctctgtcttcacatctcatgctcaccgattctgcactttttgtcttcatacagattgagaagctcaaagccaagaaactccgaaacgagaaggaagctaagaaggcagcagccgcttcttccaagaaagctaagaagtcaaccaaggcataaacaccatttcgatatccttacccagatctcttgatctcttgacatctatatttttggtctttcttctctattctctatcgctctagtttggttctgtcaactttctgattccattagtgacctctttctctctgggttcgaccttttcctactttttgtctacttgctcttcttctttttcacttctttgtaatacaaaaaaatccaagaggacgaatctttccacccaaccttctctcggaccctttcctcttccgctcgtacacttatcttgccaccctctccctaacgtttccctcttccatcttccgttgccctgatagaaagggtcttttcgtgtctatgatccggtgagaatgtaacttcgtttcacgttccagaagagaaagccattgaagatgatatcatgaagaaagatgccatacataaatagagatataaacataacacaggctaacaggctaacaagatagccattaatccaatgagatattgtatgtgtgagaagtcgaacaagagaagtaattcgatacaagccgtttgtaaggaaactctgccgagggaacgtgctttcaaggtttcacaccacaccacatcgactgaaacagacaatagaacagagaggtcattatttacatgaaaaaggtattatattgatcttgtatatggatgttcgtaaatatagatgtgaattaaaccgatagaaccccctcaatacctccctccgcctctcctgcctcttgctctcgaagcccaaccgccatctcctctctctcgtcctggtcccgcagttggcgctccccaatctctctgtctagaatcgtgacctgagtgtccgccgggcggttgcccgtagcctgagttcatcggcggtggcggaggttgtctatcccatgagttagcagaatatccccgcgacggttgatcccaagtatctctcggcggtgacccgttcgtttgtggaactcttctcgaaccggtgggataggactgaccgttcccgtaaacgggcgatcttttgtcgggttcgtggttccctggtggagggagtggaggatgaggacctgatgcataggatggggtttgtccaccgctagaagtataggaaggggtatggccaccggtagggtagctaggtgtaggcgtacctgtgggtgcgtaagtagagtcagtagctccatattgaactggagcagtagacgatgacggtggcggagatggaggtggaggtggaggtggagggtaataccctggaggaggcatccacggttgatggcccaatgaatgtggcggaggatatgccggggaaggattcggtggaggtgctggttgattggagatagtcggtccaacagacgtcccaatatcaggcatgggtgacttaacaaccccttgtaagctagccaacagattagctatcgaatccgaggtaagcagtggtgcaggttgcaccgtcggaggcggtgctgccactgacgggataggaagtgtaggtggtggcatgggcaaaggcaacgtcggcatcggcatcggcattgggactgggaaaggcgtggctcccggtggaagtgtaggcataggcatcggaattggcatctgcatcgtagcagcaggcgcatcatggaccagagcagcagatgtctccacaggggcgtttgattggatggcagcagagctgtagtcagccactggtgtagtaagtcctggagccatagatggtagtgctgagggaggaggagaaaccactttcttcgtagaagaccgagtggaggctgaattcttttgtcgaatgaatactccaagaagataatccttcgttcgtacttctgggaccttgcacgagtccaacaagatgagaaactcgggcatcggatccttttgccgaagcgagaggatgtaaagatctcttgccgcgaataatggaagcgcagaagtcaacccatatggatttatcaacgcatctcgactgatcaagcaacaaagatgataggatttcgatatgaaacgattagtgacctttctcgaacaagaacaagactttgtctgaagcttgacacatgaaacaattggaaatcaagacgagaaaactcactctctctcgctcaaaaagtccatcaagctagtttctgcctccttgttttctgcttccccttccttggcctcaaacgaaaccacgataacttccttgcttgggcttagatgtgtttgcatcaaatactttctagaactgtccgttttgactcgaccggcgaatgtgatagaagatgaaggtagtaaagttggccagccgtcggatggaacgcaaggtccacccacttgccgggcgacaagcactccggaggagggtgcgtccggattgttaatctgtgattcaaggaagaaaaaacggcgcacacgttatgagtggatgtaagaagatagtctcgctagttagatgagagatgtatcagagaatccgactaacctgcccttcccaagctttctcgatcgagttgagatctgcttcatcgatcgacttcttctcttcatattctagaggtcccgagatggctggtgcctcttggacaccctcaatcttcttagctccgccgtccttcttctcaaggtctttggcctgatcatcgacgaagaagtcaagcaccaagtcgtcgtcgcctgagcctccttcagttctagcgggaagttcatccctgaatggtgaaaggctatccttatcctcgcttcgaacccaatcaacatcatctaccatgaacgcgtccttgtgtggattttgtagatcatcttccgccggaggtggcgtgcgcgatccttctcgtttcttgtctgttgttggaggcttatcgccccagatggaatcaagagagaacttgacaggtgaaggagggacgacagcagatggattgcctttggtgggagaagaggccggagaagatacagagcaagaagaaagtttcctggtggaatcagatggactaccaagatcgttatgtattgcatcctctgtttctaagttagatgagaaagagctgttcctttgtttcttggcacttgacttggtgtgtttgtcttccgaccccttttctaccgtttctcttccatcctctgaggacaggtcttgtagttgttgcccttcattctcaagtttgcgagccaaccctgccgaatggtgatcagcttccgactcccgcttccgtttgtttcgctcagactcttgcaatatctgttctcgctcctcctggcgctggagctcaagcctggaatctgaaacctccatcacgcccttgtgattctgaaccactaaaggttgagatgcagtctcgggtaaaactcgggttcgaagagcggtatcggctgcgtcttgtgtgagtagctgtagagccggatttgcactatagattgtagattcaaacaaagcatcagcaaaggatcatcagatagcttgagagaatggtactcacagatcgttactgctcatcttagagagttcgagaggagagattgttccttcttttatcccagaccgtaacgctttacggtcctccttactcaagttgaatcttaacgacctcatccgatcgctgaaagacacgcatggagtttgcgagtaagtattatgttcattcttacaggaaccctatgtcttgatgattggacaactaaaaggcgaaaatattagatgtgttacttacgtgtactttctgcgtcctgtcacacttcctccatcctccgcgttccaaaccaactcctctaattctcctgcgtacgccgtagctctgtcttcggcaagcaatgctttgagtacagttgctatcgctgtacttcccgcctttctcaacccctcagttgcttccttctccttctcctttgaactcttgacaggagcagcaggtacagcaggttttttggcaacttgaggtgtcgatttgataggcacaacaggagaatgttgacctgccgagttgccgacagatggctttctggcttgggaagaggcaggatcttcgtttctgggtggactgtggtgagcaactgggtttgacgagattgatttggcactcgacttgcgttgttgtcgaggtttggatggggtctgtgagtgaagatgacgattgattagaaaactcacaatctcttccgttacaagccaatgacaaaagcagagaacaaggatgggaaaagatattactcacatcgttcgaggtttgttctgctttcgaaccctttcttctcttcttgcttatttcctcttctgtccattcagtatctcctgccgttcctttccctaagcgagcctgttgctgatgctgtctcaaccgagcgtcgttttcatcgcccgcaggttgatcaaaagcatactcccgagcgtggtccaattctgagtagaacccttgttgagaagcatcaactgaggcctgggatatatgttggctggaagatagaggattggccgggtagaacgatgcatatcctgcatttggggttgagtcggtgtaccactcgggttgtcctcgagagacttgatcacctactgaggagctactgccacctccgaattcatcaggaagaggatacggatcgataatgaacgaaggatcaatggtagagttgatatagttagcatctgggtatgcttgggaggttgaaggaagagaaggatcggcgaatgtatagagagagggatgacctatgggaagagaaaagaagatcgaataaagtcagcatctgatcaggcagacatggagcactgcaagaattaaagtagtgagaaaagtacatgacaaagccagaagagaaagacgaggagcgaaagaagaagagagttggatggttgggtagaaaggaaagaaggagaaacgtaaaggaggaaaacgagaagagcgggttttgccgctcataaatccttcaacttctccgtctgccggtagagaaatccttaaatctacaaagcttatctctggattggatcctctcgaatatatcccactcaaagccttctgtgttgccatcaattcttttctccagagacagagaaaagaaagaggaagatctatgcatatatgcatacatcctaggcttgccgtcgtatggaacgcaagagataaaagaagagcttgtacgtaggaagaagttctcaacggtgaaaagaagtaaaggacaggacaggacaggacaggacaggacagagcccagccggcgtctcgcaagaaaagagaccaacgtagctcagaaatgcattgtgtggcctcaatcaagagttaagaaagaagaaaaaggaggaggtgtagtgatatcgatcgatcatcttccttgacctcggtcctcgtgcgggctcaccctgtcgcaagctcgatcctattcaagaaacgactaggaaactactactcttcttcatctttgttcttcttttcacgcagttacgagcgaagagtatcatagatctcatcaagtggctccagagccggctgatgttgtctccaagtcgaaaacacatcgagagcaaacgaggacgaatcttgctatacaggcatgaagtccagctgatcaagaacaaaaaaaaaacttacgggtagtttgccggccagtagctagttgacagctgccacatatgtagatatctgaagagtgaaagagatcagagaaagaggaaaggtcgagacatggaacattcaagaagagaacaacaggaggtgatagatgatattcaggagcagaagagatatcccgtcaaaagcagaagaggcgagcggatggttgatgttggcacacagggataatctagtttagttttattgctcggttcgatatcggagaacaatgaactaaagagattagatagatacgaacgtatgttttgagcaatcacctcatccagtccaacacagtcccagtgatacctagttaagcgagcacacgatagaaggccgattatccatccatccgttcaagataacgagatttcaacccagtgtagaaacaggaacaagacacaaaacgtagagtgtaggtgacaacggccaaaggacaaaagaaagacgaagctcagatgagtgacagccagacgaaccattctccacatgaatcacacgcgatcatattcctcgatggcgtatcaggctctctacatatacaatacaccggctctggaggtggtggtggagccggctgagacgacctcgtctgacgtctgtttgttgtatcggccatggtccttgctgcaacttcttttctccttacaaaaggattggtaggatgaccgtttgggttgtatacacgcacaggagtggccagaggaggacgtgtctttggttgaacttaattttattacaatcaggctggcatcaggttcaggtcaagactgatgtttgttacgtaatcgattctcttataaagccatgcatatatattattgaattcatccagccctcaaccgacaaacttggaaacagcgttcttgacaagagatctatcaagtaggaaagaaataccagaagtttagcactgtcgctcacaagaatacaaatgatgaatgtctcgtgcgcacctcgcatatgggacatagctcaacgagtaccctgtgagaaccaaactccgttttgatcagccttgaggaatcagatgctggcaaaattgagatgtcaattatgattttgaaagcaaaaactcacaggcgaatgccaagtacgaaatgatcacaaagacgatgcaaagtaccgcgttgccgagaacgaaagcggcaatgaagcacattactagcgacccgaggaatatagccgtggctaccaaacggacaggagcgaacatctttgaggcggacacccagagagcagcggtatagatacgaacggtcagcgccgtcttctttgaacatcggtgaaagcaaagggggcaaagatagacaaaccatcttgaattgcttcaagaatccaaccaggaatccagttccgatcagagagatgatgcatcctacagcatacaagactgtccaaccacaatattgatcagctttgaaacgagcgaaaagggcgtcttctcggattttgaagaacatatcctcacaagcaaatgatatagtcgatccaataaatctatattgagcaatattttgcgacagcaagagttaagcatagagcaaacggtgccgttttctgacaagacatgctatgaacatacagaaggactgcgccaatcaatgacacgacgaaacctaatcctaggcctatccatgcgcggaccgtcaatgaaggttggtcgaagacagtgatcaacagctagcgagacaacgtatggatagagataaggcaactcacaagctccgaagctgattacaagtttttgaatcgtgttgcatcagtctcgacgcgttgccaggtgaggatatcaaacaaggccacaaagaggtaactactcaccccataactgtgcacgttcatagcgggaatggccagtcctttcctagtcagtacttaaatccataacgcaaataaaatgcttttgagacgaacgtctttgcgtctgagagaccaaaaagtagcaatgttcatatctgagtaacaggaacgtagatgacattcgaattgctaaagtcaatataactcacccaagttaagcccataaactcaaaggcactcttttcctaaggcgacaaaaatctcatccaccaacagaaaccaatttgtttagaacaagccagagaaaatcagatgtagcatggtcagtggctgagtacatgatacgatagatatttagagaagtctcagactcctttgagctgagttgggctaagcctagcacctgcaaagagaagatcagaacgaggacgtacaggagttaagttcaggtcgatccctccagtacctccagatcccaaccgacctgtatccaagtttctgaaagatcatatgatgacaagccagatcgtcaacaaatagaagacagtgagtcttgcacacccagtctcttgcataaatcaggaagacgtacagccatcctgacatgcttgtctttgttcgttattgaaacggggtagtgagtagaaggttgaagagctgatcccagatgaaaagattttgccgagaagtacgtatgtattaaacagtaagctgtgtgctatacaagagtgaggcaaggacgaacgtacaactgctgatatctctgttgagtttgttgcacgagaacttgaacatagatggaatcgatctcccagcggatggcaaaacttgatgttagggttaattcctcttatggatgtatttctcagtaatctcttgactcacctcaccatctgattaagtatgatggatggatgtgctaactaaccggatccgatttatctttccatatatattctcgccatcgagctgacatcccttgatatctgtttactcactaacatccataattcgcttcagttcaccaagactaacctgatggcacccacaactcgagcttcttccgtgaaatctctagtccggctcggctctcagctcggcagccctccttcgactccgccacctgctctcaaacggttcaagtcagatagagagctttctactctacggggtccagccaaagccgagctggcagctgtaatttccgagaccaagactgagaatcttgattcatcgtcatcgacggtaaaaccaggcttgaatgaggatcaatctccaacagctccacaaaccattcccgccacattatcgttctctatgcaagatgcgaaaagacatctcgttggaagtgatccaagatttagaatcatgtttgagaagtttccttttgaagactttgagaaaccgcgcgaagagaactgttataaagccctgattgggatcttgtaagtttgcttccaggtgttaggcctggccctcggggagaacaaagtgaaattgacaagctctttgtcggatgtacaaaaggatgggccagcaactcgcaatctcggcggcagcgagtatcgcttataaattgtgggtttctttcggagctgatgtatattgactttggacttaacaagaaagcttatcgatcggtgtctctatcgtatatatcataaccaaatcagtacccgactcttttttcctgagcagcttccggaaaaacgtcagattagcctggaaaggtgcgagctgatgcctcacttctcctcataagatcttcacatgctcccatatttatcagcctattctttaacgaccgactaacggactaatacagtactacaagatactttccgactcctaatcaggtcctcgctctccctgagcctcagatagaaactttgaaatcggttgggttatccggaagaaaagccgagtacatattgggtatatctgagaaatttgttagtggagagttgagccaagatgtgttgttaaaagcatcggacgagcagctcaacaagacattgatatctatccgaggagttggtccggtgagcacgcttcctttgttccccgtcagctgtcaggcacttgatggatgttaatcttctttctggtaacctatagtggacggtggatatgttcagtctctttatccttcgacggccaaatgtccttccatggtaagcttagagttactctactgcatgatctttctcttgactcagagggtttgatatcgatatggacctcctctctcttcgactgtaacagcggtgatttagctgttcagaaaggccttctcaagtgggtcatcaatggacagatcaacccaaatggtccgatcaattttaagcagaccgtatcgcctctgcctctaggctccacgtcacaagagcctggcacatctgatctcgctgctgccgttgcccctcctacgccctctacacctgctggggctaaacagtcatctctcgcgttcgaaactccgggctcaccatcaccggcggtcaagaaccaaccgataacgtacccgctgacgcctgctcccgaactgccgggcacgctgacgatagagttactcaagagccgattggcaggcaagaagaaagccggagcttatctaacgccggaagagatggatctgctgacggaaagctggaagccttaccggtcgatcggaagctggatgatgtggcagtatctgaaagtagaataagagagatgtgcagactggaagagatgttacgttgtattctgattaacaccttggatgatatcatttgtttgatcgtgacgcgcagttaatttcaggggttaacgaaaaaaaggggcaaacggagaaacgtttcatgttctttcattcttttacttcttccctttgtgattttcgtttcaacttcattttcatttcactctcgaactcatcggacaacatgacgaggagagaggaaagaagatctcctggataggaaggcttttttgaatgtgtcttgccttctggtctgtgactctacagcagacaaaagaacgagacgagaaatgcacacttgcactactaacatcatcttctacctatccctttctgttccctcttttgttttcttccttctttcagacaatggatacccaggtcgtcattcccctttcatatcctcaaatcgtgtctttacaggatctcctttcctcgctctctcttctctcttctctcttccctcgtctgaaatactccaatctactttctactcacttcactgaccataccactgctcatccacttatcatcctgatcagttcagttcagttcagttgattcaagagggttgaccaaacatgcctgcaattctactctcagcatatcaaccttttcccgttctttcaccaagatacagtaaagcctcaagacgaggcctccagagcggctcaaccgaagcttgtgcgtcgacatgtatggcaaactcatctgaagagacgtgtaaatcttcggattcgtcctgcctttgtgcgtcctcagcctggcagaactcgatcgtggtgtgtgtctttgtttgaagttgatgggcaagtcgagtggcagtagatagcacaagattctgtcgattctctcgttcactgaataagcctgcctctgaactgaattcatcattggttggtttaggtctgtcttcaacaacaatgccaggcccaacagaatctggataccgcatacgatcagtttgtaacgttctgcacccaatcggtacgtgtatattttaattttcgtgaatcaaactgtggaccaatcgcttacagaaggctaccaaaacgtactactcgatcccacttgtcgatagtataaaacgttcacgttggcagaaccatcttttacgagaacaactgctaccccttcggctacgagcacttcatcagggacctccagtcagcccatggtcatcaacgtgagcgctatcgtgagtcgtgattccttcagagtttttcctacactctgggcatcggcctgatacagctcgttctgttgcatcatgattctttgttgtgacatttgtctcacgaagatggccgcagtgtgcagcctgttcttgttgataggtttcatctttggcgtgattggagtgagagacaagctgaagcatcagaaacagatgctcaagagtggtagtttgcggtccagaggttcgtctctcctttaccatatccttggggtttcgaaaagaatagaagatgaatgtatgaatcactcctctatttgctctccatatgtgatggccatgacatgtgggcgatgcagagaacggcagaagagtcgaactagaagataacgcgaaatccaaggtacagatggctcaaatgctttctggagtgggttcgaggaatgatatggtgtctgttcaactagacgaagatacggaggaacgcctggagcgccgtatgtatcctttcctttcaacccctcccccttctctctttgagattcatcattctcatcccttctccttttcttttgtatggaattttgacccaaagttcgtctggctcgaacggaacgtgctgaaaatgctcgtgtgattagagtcgaggatatggatagacgagcgagtggatcatctagcgcagaatcagtcacgatcccgtccgacttctctcctacctcatctttctcgtcttaccatcctgatcctcgaaagagcagatctataagttctttaaggtattcatcaggctacatggagtatccagactgcactcgggatctttgttttgataacaagtataacaatcacaatcgcgaccaagaggaagaggaagacgcagtcgaaggattaaaccaacacgtctggatgccctcagccaatccatcaagcgatccccggccgttcttcagctcgggaggggttacgcttatgcgcagtgaagtctttcctgatgctcgagagaccgaatcaagtgatacgatcgagggagacatctcagaatttttgtatgatgatgaggctgacgatgagaggttgacgtggggtgggagtttgccagccggtaaaaggaatagcctatggcgatcggcattttagtttttcctactattctgctttacctttctgcttctcctcctgtcttgctgcttcccggctgtttgttcttcttcctttggacaatctatgttccaagctttgtctttatgatgtcttgtcgcatctgtactctagacttctatctagctccaaaccctttcttcttcttctctagacgagacgattttgatgtcttcggagaatacaagataggcgtcacaggaaaaacatatgcatcctttttgaattttttcctttccaagtaaaaaaaagggggatcaaacaagaaataacgataaagagattacgaagagtagtgacttcgaaaagatgtgggaatctgattgactggtcaatcgtcctactcagcggcctggtcgacggattctgtaggatgagcaggttcaacatcttggtttccgattcgtttgctcgcaaattcggactgcaattaggaaagagagcgagaaaagaacgttttttttttcggaggtgagaaactcagagtgctttcgagaacaacgatgaaatgtgttgacagaaacaagaatgcatgatctcacctcgtccagagcagcacagatgatctgtctaccaccgaattgccttccggcgatcgcagccacaccagccctggcgccctctaacgtcttgaacaagacataaaccctaccgacaccggcttcctcgtctctctttgcggcctcgatctctgcagactctgccttgtcggtcgaacctgcgtattttttctctttctttgtcggtctgggaattcgaagttcctccacctctccatacttggaacactcctcggtgatatcttccaggatatcaacgtattcttcatcgttcaagagttcttcgggagtaaccatgttgagcatgacgattgctctagagctgattggctcgttgttttgggcggtagcaaaagcggggagggggaggttcatcgggtttgtcgagccgggccctcggggaccacctagaggagcgttgttacctccactgccgaacgagccgttcggtccgttggaagcacctttaccgacggaagctcgttggacgacgaggtatcgatcgccaagctccatgttgttcaatccttggatggctacctcggtcaattcgggatcgacatactcgcagaaagcaaagccctatggaagcaagaacaagggcgatcaggcgccatcgacaaacactgaaagaaagcactgaaacatttaaagagagagaaggaaagagaaactggagaaagaaacccagaaactagcaggaaaagataacctaccttggatcgatcggggtctccgttctccttcaccaagttgaacgccttcaagtctccgaaactcttgaggagctccatgacctgttcgtcgttcaggtaactaggcaaaccaccgatgaaaatcttgttgggcgaatccggtacgttggaagagacgaccccagggatataaggcgcgccttgttcggaaccttcctcgggcacgtaatccttgggtcgacggatcttgagaagagtattggcgaacacaatgttatcaaacaccatggctgaagtggcctcctgaggtgttcggaactggagaaggcaaaaagaggaagagagaaagggagtgtatgtggttgtgaagcacacatcagacaccatcatgatgtgatcaagaagcacgagaaaagaaaactaacctcgacgaaagcgtagctcttgtcatggttgatcgagacaccaaccaccggctcaccctcatcgttctttgcaaatccaatttcgtgcatcttttcgttgaagagagcgcccaaattttgctcgttacagtcgtaagtgacgtttccgacgtacaacctcttcctctgtctagccatgttgagagacgaggcggacggaccacccgacacacccggtggaccacctggtcctcccgaagttggcccaccgaactgacgagggcctccatgagaaccaaagttgttgagatgcatgtgagggaacccaggtcctcctggtcctcctcctcctcctcctggtccacccatcggtccaccagggaacccaccaggacctcctgggccaccggggaatcccattcggttggggtagtgtccaggacctccacccggatgagggtgcagcggtcgaggggtaccgtccggatcaatcacatactggggaccgtgctgtctgttgggacccggagggtggtagagacctatttcgaaacgtataacagggaaggagtttctcagtcggaatgacaagaagcaatgagataaacgtcagattaaatgaacaaacccatctgcttggcttgcaaggcactcatgttctccaatccttgcccgtggatgtcccacaacgtctttcttcgaactcgcttgctcagggggatagctccttcgggagtaggacttcgcctgtcgggcgaatccctagagtaaccgtccctaccgtcacctcgacctctgtcccgtctacctccgtctctgtagtcatctcggcctcctcttcggtagtccctgagatagaaatcaagatggagagatggaccaatatgcggttagagatgttgggaagaggaacaagaagaagaaggaaaaagagatttgatacatacctgtcgcctcgaccataatcgtcgtcccgccttcttcgatctcggtcgtctcgccggtagtcagatctatcgtctccatgtctagcagatctatcatcatactcgtctctatggcttcgtcttcggtcatccctgtattaaatgcatcggaaagaaggcgaaagagacagaatagatagagagaaagggaaagaaaaaccagtccagaaatgaaggttaagacgcgattttatctcgactcggcctagggaacgagaaggaaaagaacttgccgatcatcataacttcgctgggatcgtctgtccctgtcatcatcgcggtgtcgcggccttcggtctgttcggttgcaaagagaggcggaaaggaaggagagaccaagggaagagaaaagggaaaagaagacaaaagtaagttacacggatgaacgtcaaaggcaggccaaaacgaggtagaaccactctatctgttgatccagacgcgaccgatggaaccaaaacaacaagaagccggccatgaatggactgaccgtaatctgattgatccattgtacacgcacagatagacgtatggactgtctggggagatggtgtgtgtgctggttagaggagtcgtgagaagaaacagagtggatggaatagaacgaaaaaaacgaagagaaaagactagaacgatttgtagtctggactttgagaatcgactagaaagtttcctaatggtttttctgttcatcgccatctttttctcccacgcgttttcaacctttctcttcacttgctaccaccacccgaccgaccatcaacctttctctttgtgatccttttcttttctatacatcatggccaatctcggaggtaagagcgtgtctattgagtgttcggaacgggcagttaatgaacgagagggagcttatcaatccgtggtttttttcctcgtcaaatctttttctctttggactcgtcggttgaacgcttcaatttggccctctctcatcggtttggtttcttggaacagtccctgttaaattgcttcaagagtctcttggacacgttattaccgttgagctcaagacaggtcagacgtacagaggaaaactcatcgatggtcagtttttctttcgttgtcgttcattccttctgattagattgtttggatgtccttttttccgttcttcttttctttctcttctctattccgaatgttcttgttgttgggacgggtcgagtctaccagtagacttctgaataggacatagacaacgaggactgatgggtcagctggtcggatggtggctctttatgaagagaagggcaagcaagctgcaagctacaatctcggaggacaataactggggaagaaagtatacgatgacaatcgagatctaccgaacactgacatgatgttggtaccacttttgatgcgttgatcaaaaacaacgacgtcggaacttgggttccccgaacaaaacaacagccgaggattcattgaacatcgctctccgggaagttactgtgaccgctcgagatggtcgagtgtctcaacttgaccaggtctacatccgaggaagcatggcccggtacgtgacgtgtttcgatctgtttgtgtgtgggcgtgagttagagttcggagttttagattgagcgtctgctaaacatacatacaaacccaccaacagattcttcattgtccccgatatgctcgcgaacgctcctatgtacgtgattgacgttggtcaagagtacagagatagatacactccggtgctaactgtttctttgttttcttccttgtactttatcgaacgtcttgtccaactctacttgatatccatcaggttcaagcgtgtcggcccgaatggttagcttgtgtttgggaagattgactctgatggttgacactcgatactgattaacgcgggctttcctttctctttccttttgcaataaaacagctatgaagggacgaggaattggaacggcgagaggacgagctactattcttcgaggtttgttctcttttctctatataagctaggagcgaacgatgctgaaagatgtttatttggtgtattgaaatcttgttcagcaaacggttagacctctttgttttcatttattctggtgagagtgcaaggagagagaacactaacaatcgcgatatccttcccctttttctctcgcttttgcgcttcggtacttgacaatcacagctcgacgtggtcgaggaggaggagatgccaaccagcgaaaacctcagggtgtccgacgataaaaacaaaagaaagagggccagaccaccttttttcttcttctttcttcccttcctttccctccgttttctatagcatctctttccccttctttcgctttcttttcttttgtttctttcccgctttcatctcttggtcaattgtcttgtcaaataccaaatcccgtcttctttctttattcgatacggatacaaacgctagatggaaagaaagacaagaggaaaagaaaccgggaaacgctttcatttcttccaacttctgcccttctttgtctttctctctggggaatgaactaagagaaattcacttgaaaaacaagatatgacgatgcttctttgtattttaaacgacattgtgttgaaagagagagaggagtctgttcttatggaaaggggacagaggaagaggggccaagaaaggatgtactgttggaaggagagcaaacggactgttcgagagtaccagggcgaaactagaggggactgtgaaagaatcaggtaacacactagagaagactacaaggggctacaaaaagactagtcaggggactacagaagactacagaatgccaggcagggaccgataagacgaggcacaaacgatcaccagagtccgtccgacgggggcagatggcagaacgaggacaggcacaggcacatacacaggcacatacacaggcacatacacaggcacatacacaggcacatacacaggcaccactcaggcaccactgtcaacgcagccagcggatcacctctgtggttacaacccccttatgtcttacgtaatcgtaacccaccgaggggaaaaaattccttgccttctcttctttgcctcctttctttttttttttttctcttctccttttctttcttctacccaaaggattcagccttcaaacagtcttctcttccatcccatcgacctttgtatccgtctgttcatcttagaactagacagatcttcttcagaaaaacctttacacttttaaacatggcgtgagtgtgttctttggccttgcttcgtgtgtttctttctgtctcgtagtcctttttttccttcttttccccacccggtctaccatcacccaaagcgaaagccctcgcctttgcttctgtctcttccggacgcttcttctcccgaccctttcgtatacgccagtggacaccacacgcatcagaatgtcctctttcggcttgcgtttcgatcgattcgtttatcaacctcctatcgggcctgcgtcaaacccggtcgacgtgttttcctatcagcaaagaaaaactctatcaccttttttttcctcttcgtctcgccaccgtcggcctttttctaccttccgcttatccattccttcttctttcatctttctgcctcttttctttctacccctggcatctgctgcttcttgaactgacatcatgaatccgtcgtgctccgtctttcgttttctagtgacactaaccttgagcttgagggagagaccatcgagtccaactgggaccaggtcgttgacaagtaagtctgaccgaaagaaacctttcggctcaatcatccagactgaccgggttctccttcgttcttgttccgaactatcgctcgccctactcgtgtgcaccttaccacccttcttgcccatcagcttcgacgatatggacctcaagcctgagctcctccgaggagtcttcgcctacggtttcgagcgaccttccgccattcagcagcgagccatcatccctgtcgtcaagggacacgatgttatcgctcaggcccagtccggaaccggaaagaccgccaccttctccatctccatcttgcagaaggttagttctcaatgtgcttctggctcgaaatatttctcgctgacattcttgatcctgttctcatcacatttcgtccaacaaagatcgatgtctccatcaagtctccccaggctttgattcttgctcctacccgagagctcgcccagcagatccagaaggtcgtcatcgctctcggtgactacatgtccatcgagtgccacgcctgtatcggtggtgtcaacgtccgagaggatatgcagaagcttgctgagggcccccacgtcatcgtcggaacccccggtcgagttttcgacagtcagtccacgtgtatgcttgatttctgtttgttacagacagctgacaccgattttttctatgtctttccatttcaccctccaacacaaacatctcataccccacagtgatcaaccgacgagcccttaagaccgaccacgtcaagatgttctgtctcgatgaggccgatgagatgcttggtcgaggtttcagggagaacatctacgataccttccagcttcttccccaggagatgcaggtcatccttctctccgctaccatgcccgccgaggtcctcgaggtcaccaagaagttcatgcgagaccccatccgaatcttggtcaagaaggatgagctcacccttgagggtatccgacagttctgtatgtctcttttttattcctcttcttgtttgtcccatggctttccaggaggctgactcttcttcctcccctcagacattgccgttgagaaggaggactggaagctcgacaccttgtccgatctttacgagaccgtcaccatcacccaggccgtcatcttctgcaacacccgaagaaaggtcgactggttgaccgagaagctcaccagcagagagttcactgtctctgccatgcgttagtgtttcttccttcttttctgctttgcaaatcatccttgtactgatatatcgactccactttcttctctacagacggagatatgcagcaggccgagcgagaggtcatcatgaaggagttccgatccggatcttcccgagtcctcatcgccaccgatttgctcgcccgaggaatcgatgtccagcaggtctctctggtcatcaactacgatcttcccgtctccaaggagaactacatccaccgaatcggtcgaggtggtcgattcggtcgaaagggagtcgcaatcaacttcgtcaccgacgaggatgtcggtatgctccgagagttggagaagttctacaacacccaggtcgacgagatgcccatgaacgtcgctgacctgatctaatttctcttcaactaaaaaaatcggtttgaacaagtgaatggttccttccttctgaggcccgttcgctctttctctatgccttttctcgcttcccaacctcccttcctctctgccccttatacacacatctccctccttcttgccttccttcctcccttgcttcttagctttctcccctcaagttgtctgtttatgtccgctccctattttccctacaagcgggtttgactctttcaaactttttttttgacttttcatacattctcctccccctttttgttttattggctcggttgatttgatggatcctttttttccctcttacacaacaaacgtctgcttctgtgaacaactggccgtgcatcaaaggtgtggatgaggtgtgaagtgcgctgaaaggacgctgaaaggatgatggttgcaaagtgacgtacgctttggcgaactcaaggaaactaggaaatatgatgacacgtcccatcgaaagcgtttacctcccacaccgacgacttcggctgccgtctgatatcgacactcacgccctcagcagtcttgatctattacccacgacagaggacgttttctcttgctctctccatctcccttctacgctcgcgagtctctggagtataaaacaaaggcaaaggaaggaaagaagagagtaaagaagaaggtagaagagatcgttcgtggaaggaagtcctcagaaaaaagaggaactcttctcgaatcagcccagttcagttcgtctatagagtacattccatcgaatctatccgtctatctctcaaggtcaccacacccgtacatatactgcccttcttactcggaggagaatcaacgggcataggtcgaacaagaagaaaagatgatgcctccagtggtccgaccgtccagagtgacgatcctaggatcaggcctcacctcgctcgccctcgctcacagacttacctcgctctccccgctcacaaaggtgacgatcgtcgattcttcagaaacagtgggaggatggatgaagtcgaacttactcagtcttggaccggacatcgggggacagaaggtggtgatcgagcaaggcccaaggagtgtcaggccgaaaggtggcctgggcgcggtcaggttattgggtctggtatgttttttggagacttctttcttgttacttgccttgtctttcgtgtgcgcgtgtgtgtgtgtgcgtgtgtgtgctcagaatctgactctaagccttcttttgatttcttctctctctcggcttgatatcgtgatccttcaaaaaccaggtcaaggatcttgggctcgatcaatcaatcatcacaattcccaccacccatccttccgctcaaaaccgatttctccttcacccatcgacaacattgacgaaactcccttcgtcgatcaccacagctctattcagtacctcgcccatcacacactcgcttatcaaatccatccttctcgaaccgttccgaaagtccctcccggcaaacgaggcgcaatcggatgaatcggtcgactcgctgatgagaaggcggttcggtcccaaagtcgcggacgacgtgatgagcggaatgattcatggaatctacgcttgtgatagtaggcagttgagcgtgagaagcacgtttcctttcttgtgggaagcagaacagaccagagggtcgatcgtcaaggccatgttcctcggcctcggcgggaaccgtgaggaggtcgccgagagaaggaaggcgaaggaaagagaagaagccgcgtgggaggaactaggagaatttggaaagacttttagaaaggggatcagcgtatggggtctcaagggtggcctgggcacgttggcggacaggctgaaggtcgttttggagaaggagagaggggtcgagtttttattgggccatactgtcaaccgggttgatctcgacggcgacggtgtcaaagtgaggtttcttttaggtttcgttatcgtttgattgttcccacgttcattccactcttcccttcgctgataacaccgttaatttattttcgcgcctatgcttgtgcccatgttacagatacaaacgacaagccaaacgattcattcgccttatgtgatctcgaccttacctccaatgaaattctctcagatcatatcctcccctttgccctacctggaccacaatccgtcgactactgtaacagttgtgacactcgtattcccctcgcccaaaccaggcgaacgtccgtactaccctgccgggttcggataccttgtccctcgatcgaacgtgtcgaatcctgatggcatcctcggttgtgtgtttgattcaagcgcgatgggacaggtcgacgaacggccggtcgcagaacgcacagtcaagctgacgtgtatgattggtgggcctcattattcctctggacggtcaagtgttcctctagacgaaaaagaagcggtcaggatcgcgttgaaccatgtgaggaccaccctgggtggcgccgagggagagacgtctctgccgagtaatctggaaccagtggtctcgttcgcaaagactcatgtaggttgcatcccaacttacctccccggtcacggcgaacgcatgcaagcgctcggccaggcgatcgaacgcgggccgtggagaggaaagttggcactcgccggcgctggttacggtggtgtcagtctgaacgattgtgtgaactctggaatgagtctcgcagaaggtttggtgtcgaacggagtagaccaggtgaccgggctcgagaggtggaaagattggaagacgtacggtcgtgcttcttcgatgacgaccggcgggcggatcggacttcgaccttctcatagaaattattcaacccttgctcctgcttttccgtcccgtccttgtcggttttcgaccggtcgaccactcaggccgatcttaatttctaggatctgcctcttcaagagaacctactcgacacgtctttcatcacctgtttctccctcctcttcctctggttccacaaattcatcggcctactcgcgtagagcagagtttgatacctcgggggagagagtcaatgcgccgcttgctgccagagtcatcgtcgccatcattggaccactcatctgttcgtctccctcttctttctccatcattgtctcttttgtcgcgtcttctaaatttctgctttgtgcttccaacccaactttgtagtcttctatattctctactacttcaccgtgtttttgaacaacacgtcttacttcctaagagaggtttacggaatgatgaataaagagggtgtcaaggagtttgcgcctgcaaaaggcgacaaaatcattacattggaggacgtaaaaggtgtcggagaggccaaggatgtatgtttcaactcggtccttctgggaacgacaagaagaaaacagagagtattgactgacgttttggtttggatgcggttgttggacacgctttgtcatgacaggaattgaaagagtttgtggaattttgtgagtttttgtcttttcctgactaattttctggacagacaacctaacgacgaaggactgatcgaaattctttttttcccctctatcgcccgtgttttcttcatagtgaaggatcctgaaaagttttcttcgctaggtggccgacctcataaaggtgtccttctttccggccctccgttcgtaacataattcttcttcgcgtctagtttcacaaaactttgcgcatttgccttattcaaaatcattctcctcttctggttcctgtgtttgtcatgtatatacatagtggaacgggaaagacgatgcttgctagagcggtagctactgaagctggcgtcccgttcttcttcgctagtggatctgagtttgatgatacgtgagtgactttctgttcttctaattttgatcatctcttttgccacaatcaaccaaacgtctgatttgatatatctggaaacaaaggtatgtgggagtcggagctcaacgagttcgagagctgttcagtacggcgaaagagcgagctcctgctatcatcttcatcgacgagttggattctatcggaggtaatagaagtgaaagccaggttcgtttcagcccttcctcagtactccgttgtctcctttttcttctgctcctgccttctctgacaactgatggtattttatgaattgctagacggacgcgactagcggaaactcttccaagcgtcaaactcttaatcaactcctaacagagcttgatgggttttcgagtgggaatgatctcattgtcattgccgctacgaactttccggaatcactagatccagctgtcatcagacccggaaggttcgatcgacacatcaatgttcctctacctggtcggtcctttcagacatattctttctgtttcaatatttctatcgtagggctttttgacttatcaagtcacttgtgtacttcattgggttgattgcctcgaaccctagacgtacagggccgattagagattctcaaacattacttagtcaacattgtggcagatccagaggcggatttaagggtgatcgctagagggacttcagggttgtcgggagctgatctagaaaaccttgtaaaccaaggtgagtctcgtttctcttcttctctgtcgttcatgagcatctttggctgatttcatgttcgttctttggtttaaactttagctgctgttcgtgctagtaaggaacaagagaccgccgttcgattgccccactttgagtgggcacgagataggtacaatattcttcctcatctctattcataatttccgcaatcagagctctgatcgatcgcgcttctctctcgcgttcaaactaaattcacaggattttgatgggagtcgaacgcaaatcccgatttgtaagcgccgagagtctgattgtatcagcctacaatgaagcaggccatgcccttgtcgctcttcatactcccggaagcgtaccattgcacaaagtgtccatccttccaagaggctccaagctgtcggtaacatctcaagttccagggatggaccaagactcaatctcaaagtcagttcgacgagtaccatatagttcataactctcatcttgatcagacggaagagactgattgttttgaagcggatctggacatccgaactgacaggaaagaatacctggcaaggatagatgtagctatggctggacgagtagccgaacgactttcgaaaggagacgacgcgacatcagatcggacatcagaagaccttcagagagcgagtaatatcgctagtgccatggttaaggtaaatccttaccctcgtttttttttcttgatttgtgattattacctttctgaaaatatgatatgttttgtgtcttttctctttaaaccattagcaaatgggattcagtgatatcatcggtcccgtatcgttcgatagagatcaagctccgtttctgagtaaacgacgaaaggatgagatagagagtgaaatcaaacggtctgtcctgttcacatatattcagattcctttcgatccagttttatcacaagtcttcttgatttactcacctacttgcctgtttctcttgcttctcatgaccatccacatgataccagaattgttgaggagggagcaggtagagcacggacgatccttcagactcatcgatcatctctagacctggtacgtatcccacctcttatttttctcattcaagacctcccaagtatcgtagacttcattgacgacatgaattttctttctcttctccttttgcctcctttccaggtggctaaagcgctgatcaagtatgaaaccttgacggccgatgagatcaaaggcctcttgaagggagaaccgatcgttcggaagaaagaaaagccaaaaccggtggctgtacctgtagagctaatcaaaccggagagatcaccgaccgtcaccgaaggtgtaaagtctgatgacgcggctggtggtcctaccaccggaaaggcaacttggttgtaagaaggaaaagaaaagcagtgaaaacgatagtgattcaaatggccgattatatggtgctctcttagaaagtccttaacaagcggctcccaatgtttcacgcatccaagatgattaattctaagttcattatcaatatacaacaccaaacccatctgcttccgtcatgaaggacttcactcctgatcggcaatctctaagccgtcagaaacaaacaccaagcactcttcttcctcaagcaaaccgttttgttggaattgaactctcgttctcgaccagattggttcaacagcctggtcttcatcaccgctttcgatctcacctgtctcgaccaccagcgtccaagaagatagattatagacccccggtacaggagcccagaaggttgcaggaaaggaagtcgaactagagggagggaggattgactgatggttcagatcatcggtatagaatccagatgcgtgtcgtgaagagctgttcgtatcaaacacatggagagttgagacagcaatcagtaagatagaaagttagttcaatgaaaagaccgatcgaggagggtcagaagataaaatcgtttagacgacgccttacggatttggatcaactagcttcaacatcacccgcgtagccaagtttatggaagtgttatgaatctggatattcactgggattcggcatggtctagattaaaatagtaggtaaagatagagtttgtaaattactgaagccctttccctccttctagctctattgtttacttgtatgaacagaagtacgtacccctgactaaaaggatgcctggcaaattccgagtcgacctctatagcaacgacaacaggatcatcctcgatacccagtggtccacttagaacgcaatccatcaacgctctcttggcgttgtctgtcgcctcaaacatactcctcactactcttgctccatcctccttatcctccgatctcaagaatatggattcagaaggaccaaccgaggaaattgggacaactacgtgacccgctcggttttgagatgagatctcccagaagaccaacatcgaaacatcactaggtccaaagagggggaagattgcatgaaggttcgtcgaaggtatgagtggatactgagagacgagcgactggagcttggaatgtcgtagatgagatagaatcaacggcaagagatcggagttagttgtatcgatgagggacgttggaatcgaggggctttggagaagagaagtaggcgacgggatcgatgccaaatccgatgaaccggccaagagttgttgcagctttcgagcagtgaaggcagttgatagagacgactcattgcttgaagactcaggtgtcaatgccatgtcaaagcgttgtgattgattggcagataatagatcgtcatggctttgaaagagatgcatcgtgtcgttggttaatgcgaacgtcaataacttgagatatcagttgagggaacttacggtatccatcccgaaggatatgatgctttccacaacggactcagcacacgaatctgagagatccgaattggttccaaagaacgagattcgatctaacaaattcaaaggtttaaaattagtcatcaacattcttcagaaaaggttgtaagcgcgaaactcacatctacagacagaagctggtttctgggcgatgctctacttcgcgacaaggaggccatcacatctatcattggttctactctaagagagtgcgttgctgtagaagagaagtaattattagaattggcctaattcagaataaggtttcgttgattaggatattaagtccatcagtaatatgagtatatatatacgaggtagagtcaaagaactcgggatacacaaaaactcacagacgattgatatacaaacagcaacagaagatcatgtagaccggcggagcgaccatagcagagaaaaggcacagagatggtctgccccggagctatagagatgcttggggtatggatgctcgtaggaaaagagggacataggtcatttggtaccgaaagattcggaagtccatctgcagccgtggtagaagtagtggagtataaagctgacaaagccaagaagcggagatgattgaggatcaggcaggagcacagcgatatcaattctaaaatctgatatgacttactggacatcgatgagacacttgccccatcattttccttcggctcgatgtttgctattctcaatactgtttcctcgttggccatcattcttaaatccgtgagctccgctgatcccttgtttgttatgtccaccatacaaagcacactctctccttccccaatgaccaacggcaattcttccagattgatgtttaagattggcctggctggagtaatgtcgatagtaagggacacatccggactgtatgtcggagtgagtcgctgtgccctggttacattcagtcgcttccctttccgcaaaagggattgtctacaaggtagaagattgtggaaccggaagcttgcgtgggtgaaagagactttctgaatgaccgacgaggtaactttaattggaatctagagcagccacaaaacgaattgagaataagataaatcaataaaaatagcaatggtttacaaacacggttcgatcggaagatttctaaaacgaacgaaccatccgaatctctcttggctcaagcaccacttcagacacaacctcaatctctaggccttcaggtgatgatttggcatctttcgccccggtaattgctgcctcgatcgtgatatctccgagaatcaactgggcatctagtggatttcgagcagccaactccacgaagaaatgatctgttcgcaatagcaatgcccaaaaatgatgaaactgtcagcacacatatagatcaatggtaaccggaggacagacgaagacgatgatatacctccaatcggtacactactgtcctcatccgtccctaatagactgcttggcttatgtctcttttctttggagttctctcgttcattaaatccattctccaagaatgccgattccaatttggtccattcgaggcgcatactgttgtgtgtcgattcccgtcctagcagacggatcacggtaaaatcgcgctggaatataggttcgggtagcctatccgaaaaccgagttatcttctcaggatgagaagattgtagatgctgttagataagatgaacaccgattagctcaacacatcctcggtacgagtatactgtatacatcaaatatcaaggatagacaaaccctgaaagcaagtacgaaatcttccaacgctccctcttgcctgcccttcatcaatcgtacgaagtgatccactgctacttcagattgaccttgagagtaagcctgtcggcccagggaatgttctacatgatcctgtgctttagtccaagtttgtttccgatacaacacgacggcctgctccagacaccgtcttgagaacgttttctgatgaaggccgaaataaatcaatagaaagatttagaccgtgaatatttgtagtcgatattgagtaaaagcgagctgaaaacgaacctgtcccgatttttcatatcttgatgcggccatgaccaagtgcccggcatatcttctcgtcctggccttcccaggccccataagagctcctagcgccgcctgctcgataagcatcgcgctcgatacttcctcgacttcccctgctgctctcatcaacgcgggtacgatatgggtatattctcccaagaaaaggtaggtctcgtagtagagtatcgtggttcgagtcgcatcgagttgaagcgtagggcgtaaggcatatatctgtacggcttgttggaggtggatgtcgggatgggcaggcctagaggcaggtggatataggagaagaagagtaaggccatacatttcctatgcattaggattatttaccaagtggatatgtttcagcacaggatgatggccagaggtttgaacgacaaaatgaagaataccaacagtagcacccgcttggtacttccaagccttgtctgttccgtagtccttccggatagaatcataaactccagaggcaaaccgatagtcccggagcatgaacgcaaaatcagccaatcttcgtgagattgcatctggtgaagtataagggtagctgcgacatcgaacgaacaatcaattaataacatgcaagagagtcgaacattcaatgcatgacgatgtaacgaagagccagttgatgataagcactcacattcctttagaagggttgtatccagcaacagatcctgccggacttccaggtcgggaagggttcgtgcttccaccaccaccaccaaagaactttcgaccagctccaaacagtctgcccgttatacctcgtctgctggaagcgtactgtcatccagaccaataaacagcgtacgccagaatccggatatgtcaatgacacgttgaaaaaatccaacctcgctttatccgaggctgacagagatacgatacatacagtctcattccactctgccacacacctctccataaaaggaaccaagcttcctcctaccagctctttcaggaacgctctgatctttccaacatccacgtctgtcaaccttcctccacgcatttgcgcgctctcgtcctgcgtgccagtctgttctagacctgtctgccggattggaggtgacttgacaccttgggtgaacgctttgatcgggtcatggggtggaaccgagttgtataattcgtgtagaaagggcgaaggtggcagggatggagagagagaagaaactggtagaaggaagacgtgtggtccgtacgacttcttaatctgggatacgagtttctcggcactaagaaggttcaacgtgtaaaagaacatataaactcgaagttctgcataggccgctcgatgtttgagccatcagtaatataacaaacgatgatcatagacttactcctcgagactgcctcctccgccaacgtcatgaacgacaacaaatgtcttgagcacggtcggatcgataaaaggtctgtggagataaagcttgctcgcgtttgaatgatcatacatcgccgagagtatgctcattggatccttgtcgtcagatgagattgcaagcagcactatataatttatccagagaagatttatcgtcaagttctgaccaacattcacaaataaaggagtgatgatgacgaaaatagggtcacttactagcaacagggtgctcaaacgtctcgtgctctcccatcggccgtgtagccagcataatttctctcaagaccttgtaccaaggtgtcaccttctcaacgtcctccctcttcggcttgccgtcctttcctgcgaaggcttgtttggcttgatcttgactcgttccatctatcttcaataacggaacctccttttcccagcgacctgattttgcagagattgatgaagagagtgcgtcaaggatgagatcggaccggtcaaaagaagatcccaatggaagagactcgagtgattggagtgacgtcagacggataggaaaagtgctggctgttatggtcgttagctgggttgtcctgatagggactgggattatagacagaagttacaggcaaacaagcacagcgtcagacttgtaagacctcaaaggatctctttcaacagtaaagacgagttggaagcgtaccgcgttggatatcattttgaaacggtcgcagaagttcaacgaaatcgtccaagccgttcgctctacatatctgattgacagccgggctagacagaacggcgactttgggagccaaggattggacaagagccgggatctccatctagaatgttgatatgctggctctgtccgaacgacgaaagttgatggctgatgtctgtcgaaggtagatggtgtgagcgagcttgtttgatgtctgtgtggaataggaaaagtttgtagttgatgattacgaaacttctacaaccttgttgacaatgtcagccagtcttacccatcatcttgtgaacctcgatccatctatctcgtgtcctactcatcgtatagcacatagtacggacaagaatggcctctacgttttctactcctccatctacaccggagattcctcagttatcgcctccaacgtcccgtccaacaacaccggcaacatcaaattctgtagccggccagacacctaccggaacggcccgatcatcccgagcgagagatctcctgagggcacactacaagctcgacgggagtggaagtccgaagaaggagggtgagcaggatgatacggatttgggtaagcctttgtctctgcctctctggattaacagacacttgggattgagcgatattcgtgttaatcaggctgctttgctctagatcagattcccgttcgttcaatccatcgaaatactatgcttctttactatccagctcgtcactccctcaacttctcaaaatagaaaatgacctttcagaacgtacgatcatcattcaccaccaatctcatctcttgttgagcctgcataagctgaaaatcctgatgcctcttacttgacaacagaaattcgtttactggattctgaacgacatggtctggtgtacaatcaccatcacgaacttgtctctgcatcgtccactcttcaaaaggtaatgtttagaatctcttcagttcgttttgttgtctcttgatatgttctgatgtcaaaaattctccgctactggtgcgatcgatggaccaaacagatgaactcgcagacatcaccgttggcagactcgcttgaccaaatccgatcatcattctcgtccatctcccaactcacagcctcactttcccttccttcggaagtcgacaaacctgcagaaatcagagctatcgttcgagaagtcggcgatctaaaagaacgtctaggcgatctgattgaattaggtgcgatcatgttcaatccgctcttccttcatacgcatccatacatatgaactcaatgtttcatctacataaactacgtatcacccacaaaggccgacgatcagacgcccaactagcgctgaaggctgctcggccgttattagaacattggatctcaaaaggcgtcaggggggccgatcgagtccttgcagaatgtgaagatttggtgaaagacagttcgtgtccgtctttgaagacggacgttcaaccgaatgggacatagatttcaaggggtttgcccttctcgctctttcttgaccctttaaatattcatatgttaggtgacaacctgatatccgtgactcatggcaaattttcttcagagattttgcagaagaagtcggcaaatgaaagatctttggattaggcaaagtacctgatttttgatgagccatccgaatatgcaaggaaccaagaaagaacaacgtcgatggcgagtaactatttgagaaaagaagaaagagcgagggctgatctgaagagaaaagagaaaaaagatcaaggctcaagacgaaactgatgaaaaacgggttatacgaggcagtgcgaaggaacaacgagagaagaaggaacgaatgagtcaagatcaggatgtaaggaacaagagaaatctcgtcaggaagcttgtcaggggggacagagcagcacaaaagatgatgaaccgacgtagtcctatgaagtgaacatgaaaagatgagaaagggacaaaatcattgctgaacaatggtgtgggggtgtttgagatgagatcttttttgatacaaacggaattgtttgaagaaaagtaaaagagaggaaacgccaggcgtttcggatagaacaaacgatgtcagagtgatagttgagttgttaacaagaaaacagagggaaatgagagagaggggaaagcttgaagagtttgtattgcaaaacgaagtttgagagaaaaggccacagtagcgcaaccactaggcggaagtgcacatggtcaacagatgaaaactcatgcaggtgccgaagtcgagaagtacggatgtaacagcgctcgcttggctttagatgcaaacaacacaagagaaggaagcgagttagaggtggtgagtaagggccttgaagccgaagcattgtctcgagtgagcggagaatgtaggctaatgattgacactaaccagagattctgtgggctgggtcgtaaaccagtgtttgctgttaaaccagtaaatataacattcaaagtaccgtcagataaacgatacataagagcatccaagtaaactctgataccagagagatgtttggaacaaaactaggcgcacctgcagaagatcaagtccgtttcgatctaacccggggacgactgtggcgaggtcctgaggatgccattgtgggaatgacgttttgtagtccggaagggacttgacgccaggccagatggtctcgtcaggcgtaccgagtaacctaggtttgccatgcaccagcgaatccatgtggatttaccagaaatttagatgtgattgatgagctgctgaagacacatcctctatgcaatatacaacacaagcacaggcagatcatagagacacgatgcgcaccgaaaaattctgaagatctcgtcgatctcagagtcacctgggaaaagcggctgtcgcataaccatctctgcaaagatgcaccctaccgaccacatgtcgagcgcggtgctgtagtgtctggatccgagaagaacctcaggagctcgataccagagcgtcactacctgcacattttgaaaacgatcggatgacacgcacagggccgatttgttttaaatggcacagatgtgtttgagatagatgagtgaatttctcaatattcttgcattcacatagatgctttcacaatagaagaaagtgagcgaacctcgtgggtgtatgttctgagcggaattccaaacgctctggctagtccaaaatctgcaagcttgagatttccttccttgttaataagcaagttctgaggcttaaggtctcgatgaaggattcggtgggcatgacagtagtaaagtcctttgataagttggagagtaaatctctgtggtgttgttgtgatgtcggccaacgaagggatagagcgatgatgatcaaaaatcagacatgtcagcaacacatgcatggttccgcactctctgcctttaaatctcctcggtcatttcgaaaaatgcgtgttacacatgaagaaaggtcatctcgaacaaaccttgacgagcgcaggtcccaatccctcatcgtgcccgatggtatccatatatttcttgaggtccatatcgaggaattcaaagacgaggaacaactttgagtccgagtgtacaatatccagtaaactagtggtcgtagaacaaaattgtcagaatcaagtttgtttggcaatagagaatgaaaagacaccaaaggagatagaataaaatgagagaaacaacaaagaaagtcgatagagaccgatactttcagaaatgacggcattatctagctgatttctgggaacgcctgatataaataccagaagtcacgatttgtagcatgcacatcactccagaagctagacggcaattcggacattctcctcgatttactcttgagagaaacccagcactgtggatttctatctctacacgtacaacgtcctcggtccagcaaacaacactcaaacaacacaagcagaaagaggacacgaaagcgagattgaacaacaaacgaaaggacgaagctcacccgacaatgttttcatctttgagctctttcaacagactgatctctctgatggccgtactcgggaccccctcgtcctcagcctccaatcgaatcttcttgagcgccacataggtatttgtcgtcacatccttcgccttgtaaacgactccgtaggtgcctgttcattgttgtttgtttgatgggttagagggagtttgaccatagatttattggttgaatatccagaagcatagcagcgaatgaatgattgaaagaatcgttaagaatatgatcagttaacttgtctcttggacccgacttgtgaatatatcttgtgtcagaaagacaaaacagagagaaactttgaacaatgcccaaagagatgatgagaagagatgggtcaaaccttctccaatcttctcgagtttcgtgtagttttccaagctcatctctggctatatgtaggtgaccggttagaggtggaagggagaaaagaggacagaatatgaagtggttgaagagagaggttgagctgatcggcagaagtctctgaatgcagcaaggggaattgtcgacccaagatatgtatgttgtggttggaagcgatcataaatgaaatacttagacaacaaggtagatcaccttggacatacgcgttcaagtcacgtgatgcgtacgaccctcacgcgtcagtcaacaacttggaatgttgatcattcaacttcgtttgatgattctcatgatattattattattattattattaatttatttttgttgctcgttcgggaagatccagggttcgtttttttgtttgctgtgtgtatattgtcgttgccgaggtgatcgttctgctcttgcttggtatacctgatagacctttttatgctaacgcacttctgatctcattcactcacccacaaaacagaagcacgaccatacatatctccttcctactcttaccatcttttgaactcttcctcctttacccagtgcgatctatacaatgagctacacagaggtactgtactgtttattttcttctacatttgtggctctcgctcggtactcgctgctgacctctttctgcttcttttcatcttttctctcttctgcgatcataatccttcaccctgattcaaaacattgccatattttgacttcccttgcaatctcgtcgttgtcgtctatcctgcgttccacaacataggcagacaaggtcagtatatctttacatactcaagtgctgagaacgaggttcttctcggacgcgtccctcaatcgaatttttgcttatcaaaatgcgtgggctgaaaacgtgtttggacatatcgatgaaatctcatgaacgacagcaacgagcgatcgagaagtacgcagatcatatcacttactctgagcgatattccggtacgtttgctctctacataacataccacagattcattgttctctctccttttcttaaatggccacctatatgggtcaaacaatcactttcaatatgcacaaactgatgtgtattttcttttgttatcaaataaattcaccttcacagacgatcagtacgagtacaggtgaacacgtccttctaaagacacgcatactatgtcgactccatcttctttgcaccaactaatcttatccgctgtttgtcattgtgtacttctcgcgcgcgaaacagacatgtcacccttcccaaaggtctccttaagttcatcccagatgggattctagacgaagcaacttggcgatcgtgtggtatcagacagagtcttggttgggagatgtacctccgacatcaacctgagcctcatatcttgctgtaggtcttctaaattcattgctttatagtctttctctgcgcaagtagagaaaaacggttgaggagcacaatcaggcgacgtcatgaattgacactcacatactttgcgtttcttcttgtttgattgaattttcttggtcaatctcttatagattcaagagagatgtaagcatgtcataaaaatcttttttgttcgtttcagtacatgaacacaagcttactttgttctttctttacgttttcgccatagaaagatttcgatatgaaccattaaaccacatcccagacataagattttccgctccatcagttcatgcctctctggacaaccacattggttacattccattcacatataccatcgcaccactctccgcttctgttccgttcccggatcgttgttcttcgatacactagcttcatcagctcgctgtctctgtatccgtatttccagttatttctctccacatatacctgcctgtttgctcgcttttgaccaaagtctcacaattttctcatatctggttcttagaaaaccacaaaacgttcaaaggtttcatctcttttatatttccaaaggaaaaaattacatatgttcatccttttcttcttttggagatgcgatgagattttcacatctggggctgatgacgacaggttgaacttgagtggttcttctcaagtctcgtctgattgaggctcagagggaatataagggttttaaatagacgctagattgcttatgctgaatgggtccaaaacagattacaggagaaaaagggcaaaagaaggatttgttacgatctgtgaaggtgaggtaagacgtattacgttgaaagagctttacgaaccatccagataatcagcggccatcaacctaaacgaagacaaacaggaggatataaaggaagaaagtcttagcaatcgatagacatgagaataagaagaatttatataggacttacacctccagcgcgatctctggttcctacatatataagtttcgtatgataagcaaaaattccggtacaaatatactgttagattctctcgactatatcaacagagaaatttattcagatggctaacgagaacgaaccaaacgttccgtaaaatcaggaacgaaatcttttgcggtggcaccctgacgggcaaacgagatgatgagatcgacgaagcatgcttagttttgtgatggttgacttggcaagttaaggatcaggacggatgaacgaacagagtactgggctttgaaagcgagatattccaacactttggcaacgattaccctttattatcgacactcaaaccaaactgtcagcgcactcttcgttagatcacagaaagttcaaacacgttcgcgatgtccacggcactcatatttcagactaccatgacttacccactggtgataaaaacgaacagcatcaaaacgaacaagacgtgagtgttccatgtgccagagattacggaggaagatagggcagattactgaccgatgaggaatctcgcatgtgttatttcccacttccataaatccggctagaaatcgccaccgtaccataagataatccactcagccattagcttctatgtccaacaacagaagcagagaccgtttgatgaggacaaagatcggacgtacagtccgggtcgaatgagctcttaagtgtaccgcttagattggcagtttctctctggacaatgaaagtaaactgatcggaggagaccactcggacccattctgatatctttcatgtatgtataaagaaaagatatgagtaattcgatgagtcattgatggggaagagagaatgatcgagacgaaaatcatcgtacaggttttgacatgctgagacaactggttgatcagatgaaggtggatgagggtacaaagcctatagattgtcgaccggatgtagagtaaaataggcggacgattccaacagacggagctgtccggtatatccgatttccactttcctaccgacaaaattcattttctgatcactctctccattcttgacaaaccttttgttttgcagacaaccacatataggctcagactagtcacccaagatgcatcctcctttacataaacccagtaacatgaccggttcgttcttgtattctcttcttagatttcttatattcttcgattttacttaactctctatgaccgtctatcgctcatcctgtccttgcttggaacacacttgatcgaactagcttgtgaggatgtgatcaaagcccttgaggagtgtcatgccacaatgaagaaatggtggggtggttgtaatcagaacaaggtcgacgtcacgctttgcttaagggccgaagtgagttttttctcttcccttgtggtagaatacacttctttccggaactcgacgcaagaagaaagagcactatgtcctaggacgctgtctgagattaatcttgtactctcaccaagaccattgagcaggtcacatgagcctgcttgaagaattgagagttctaccacccctctgaagagaaacttgcagaagagcgatacagaaccttcctgtttcagcaacttctcagttttcaaaataatttcttaactatacctcaagatggctgaccatcccgttctggttccccattttacatgtaccctcttcaaacgcagagagttgcacgcacacaaaaccatcgacaggaagcaaagacaaagaatgcagagaggaagaagaagatggaggcgatcatgcaagacttagatagagagtaatgaatgggtcgaaaaaggacaagaacggatcgtgtctacgtgtatatataataatgatctcaagagaaataatgtagagttcaaaacctgttacttgtttagagccgcgctcttgagcgaatgagtcgccagcgatgatcatactcagttgtgtcatcaatgatttatgcaacccctaccggtttgtcagactgatcttctcggctatcttcatcatcgagtaaaccaacaataagagccatccatggaatatgtacacggatgatcatttcgacgttgtttgtctttttcattaaagggctccgctcaatccacctactgcgagctctgccaagccggtccactccttctcttcccaagtgccttttgagaaaccctcaaggactcgttttctgtcctcccttgtggacgcctcaccactgtctacgttgtaaaacctttgaaggccgagaagcagcaactgagcttcctccaatgtgagcaggtacttttcaccctgggcagtgttgatatcggtcttgatcggtggagaagtcgacgtgatctctcccctcatcagaaccactccttctgcctctgcttcaggagaaccctcacccattcggctcaaatcactccagtgggtgactgtgagaaacacccgagcccattcgcctttgattttgtactcttcaagagaggtaaatacgatagtgctttctccacccggaaagtgttgccattgtagaaagaagaattcttggcctccgttcgagcgaggaagaggcagaatgaattgtgggtgggcgtgggcggtcgcaagaatcttcttgtacaccggggtcggaatcgtagcagaaacatatcggtttggggttgagatcgatttggcgaggtgcaatgtttgccagagagttgccaacgtagttggaggatggggggtctctagcaatggagtgagattaaggatagaagacaagggctatttcggatgacaaagaggtgatggttagtattgaagaagcggacagaagggtgacgaagaagaagcttggcgaacaaaccatgattggggagctagaggtggttttagtctttgcgctcttggaggaaggcaaggtcggagattgtttagcagccgaggatgagttagcagatgccatatctgatgagatcttgataggggccttcttcaccaaaggtactggctttttcttcagcttaagctcctccaacgagccgacgccttccctgaagatgttttgagatgaacacgatcagcacgccaacccctaatctcaatggaaaataaggaggagagaaactgactcttccacctttttcttcagtttgtctccatactttgcctcgaaggcctttctcttacgctctacctcctctcggaagttagggatcgacgccagtgtcctatccacttgtgaagaatcatgcctgcgaagagacggaagggctgatcgaacaggcagagctgcccggaaagatctggacgaagcgattctgagtgatcgaagcattgttgaggtaatcgttccgagttgatctctgaaaatgagaaataagaagtgtaattcaggttacaaccctggtatgcgggttgagtatcacgtgttccgaagcgtgggtcacctttcaggttgttctttctatctgcttctttatgcctcttcattcattatacatcatgttctagtttgcatggctcgtgcttcgttctcagctctcgtgatcgcgagcccgtctggcttcgccatatggatatctatagttgcagatcgaatgcgcgagacgttccgatatataaggggacgctctcgcgccttcttgattcgaaaaacttctcaagcagaattcttgtcgagacctcctatatcgagtaagtttttagtagtctggtatgcttcaggtgttccctacagaaactaagtgttcatttttgttccaagctaataaaccttgattaaaccccgatcaccgagccttacacaagattcgggtggtagcggggaaattacgaaggtcgtaaccagacaggaaatacgactggcaaagaggaagttcaggctctcttgctcaagtagttgtaacgagggcgccatgcgaagagactgacataacaaggttgagatcacactgggcataagagtactagggggtaacaaagtatccaggcttgggagactgtgctatgggtggcataggaagcccttcctatgtgtcatcctcagattccaatgagtatgcataaaaaataaattaaagatggtgctaaaagcacctgcgctggagaactatatacacgcatgttgaggtaatgagagggcataaggaacgaagaagcaggagaaggttgcaggtgttcaacactcaggtcacgtttctgacagcatttccccctccaggctaagtggaaggaccagtaaaattgtgaacgtggtcaggctctgatgatttgaagaatgtgggttcggctggcttcttctcagattggatcgttaggcgcgtttgagatcttgacgtgaaactcggtgatagcagagttgtcgtcaggtaaattatcacaagggatctagatgtcgcagttagaatatagatctttgatcgaaccaggtatttgtgcttccccctatagatccaagagttaataacctgttctggaactattcccaaaccatgttctgtctataagataggagaaggcggagacctttgtcgagccggttttatattcctatggtgttcctcgagaagggaaacgtgcaacgttgggtgatcgttctaatagttggcagctctgatcggaaagttgcgcggcccacagcccgaaggatcttatatcatcgcaggagcttggtccgaatcacagacaatctgtcctctacctaccttgcactcctcgactcacacgaccaacttcgtaagtcccgtcggctgatagactggttttcttatggattcagatactgtctatactccttgagcacgattatccgctcaggaacgagatcgatgctaccgactgagattgtgcctgtattacgctgaacccggtcacatctgggtgagttgccctgtccggccgcaaaacccccgaaccgctagaatatccgaactccatacggactctacctcgacctcgacctcggcctccgaacatacaaacgcttcggctaaagacagagctcagtacgaagttctctactaagctgtcccttgtctactgcgaccaggccaagtgatcaagatacggtttccacgcgttaggcctctccttcatcgtctcattctgatgtttcttccgttccgtctctataataagtgtcccatctcatcaatgccttccactttatctgattctcttgttgacactatgtcccccatttatcctatgtcttctatctgccgcgcgcccagtgaacgaatcgctcttccctctgcgggtaaccctatggaattgacctctttgagcgatgactcccaaatgcaagtgtctaaatagtgaattttttctgaaccacatttcagaaagagaatgactctgtctccgattgagttctgctcgactcaggctcttaaacaaatatcattcatgaatgtttgcaacgtggctggtgctttattgagttcaaaaggcataacgcgggtttcgaaatggccgtaccgagttcggaaagcggtctttctttgatcacctcctttgattcctaccgggttgtaggatctgcggaagtagattctggtgcgactcaaaaaaggcgatgaatgagaaacagccttttgaattcagtacggccgtttcgaaaccctcgtcatgcccttcggaccaaccaacgtaccagccactttccagaccttcatgaacaatgtttatctggaagcctgagtcgagcataactcgaacaggaaggaagctatcttcttcaagacccccaagcaacaatctgaccatgcacgaccacttttagatggaaatcccaagctcagactctttgttacttctcgttcagtccttcccttgtcctagttctcttgttctcgttctagtagttttattgattccttttcccatctgaaagagcctggacttctctctgagacataaaagccttgtgtgattacctcaactgtaaatcttccgttacccgcccagcttccgttcttagcattgaccctatggcttcggagttagtgagcttacgtcatgaaatccatcatgtatcggctaactccgaagtagatgaagagacacggacaaattagaagacgctcggagaaattgtatcgtgtgaggtagcgtgtacgttggaattgggactaatagcatcggtgacatcggatgaaaagttgattatcgcaaacaaggaaaccatcggataaagaatatattaacagttgatgatcaatgcgtttatatacctcaccgtcaatatactaaaagacgacggatactaccaattctgggcaaacttgatgttaaacatcagcgtatacttgttgacccacagcctcctgatgttttactccactcggagaaattatacttttctttttgaataaagcccttctcaccttctctgatcaatacctggttggtgcttctaacccctgttttcatcaaccggctattcggtccggatagactgatcatttgacactctgaagcgcccagccaagatgctcataaaggcgaccgattctcctgtgctctcgagaaaccccagatatcttctcctcctgctcttcttgatcctctcctttagtctaatatcgacaagtcttcttttctcaattcaggaacagaagatgcctcctctaagtctgactcttctccttggtacagctgccatacaatcgtttgttgcacatgcgctcccgcccaagttcttcgtcttctctgaaagacagactatcgctactgtcaacgagagctgtccaatctattctgaatattccacagttcctcatgaacctgcgtccggtgggccattgggccttccaaccatgcgacctgatgaaggatgcaggtctgtatcgtctgcccttattcttcctgttttaatttgcatatcatgctgacttctgagatatatcttaggacattcacatctactgcagtcgaagatctgctcaacgactatacccctcgaatgaaggatcgtgacctagccatgcttttcaccaatgctttgcccaatacgcttggttcgttcagaagctcacatgtctcttcctaaagactcacgagtgtcactgaatatacgtccgatccatgtaatgtttagacaccacggtccgatggcagtctgatgaagaccaggagccatcaagcttcatcgtcacaggcgacattgaggccatgtggatcagagattcttgcaaccgtcagtttctcatacctccgctcttgattactacagagatgctgatgacgttgtgtaagccacatctgtagagcttgcaacctaccaacccctggccgtcaacgattctgctttacggcgattgatcaagggagccatcgttggtatcattttctctttttgagtctcaacttattatcactttgggctcatcaagctcaagttgacttcttatacgatcaggccattcaagccgactatcttggagagtacccatattgtggagcattccagcctcctgctgcctcgggattggctccgacattcaacgagtgggcgtacggggtcgagtaccctttcacagtcgacaatcagacagtatttgagtgcaaggttcgtttttttttctgtctttctaatagcgtgactgaatttcagacttttgaaggctggcacacgaagttgatcacttttttgatgggttcacagtacgagttggactcgatcgcaggcttcatgaagttatcgagacaatattacgaatatcaaaacgactcttcataccttacctccacttgtgcgcgaatgttttttttcctcttcgacttttcacctgactagctttctggaccgttatcttaagttgacatcttcttgtcgatcatatcaataaagggttcaacacgttggacaccatttttgagcttctagataatcaaacggtctcgacagtggacgaaaatggtgaagtccacgcgacatactctttcgactcggataaaatccctgtcgtcaacggaggagtaggacacccggttaaagagactggtatgatcaggacctctttcaggcgtaagcgtttacttttcctggtccctcaagatgttccttggcgttaaagatgtgggctgatggtgaacgtgcggattgtgatggacaactatatcgaatagcctcggatgatcttgtcatctatggattccatattcctgacaacgctcttctcacagtggagcttcgagggtccgttcttttcatagcatcacaacctcttcttctcctcatgctagtactcactggttggcatatattgaaaaaaatatcgtatatcacacagagtcgccaagattctaaaaaccgagggcttgcgggacgatctggtcacgaaggcaaccgaaatagccgatagggtcgaacgagccatctgggatcacggagtctttgaccaccccgagtttggttatgtatttgcgtatgttctttgcctcgatcagtgaaagtcaacagaacgaatctgactggagatgaatgttgattttgcatccatcaaaaaaatattgcaggtacgagatcgatgggttcggaggaagagttttcatggacgatgcgaacgtgccaagtttgatgtcgcttccctaccttggattcttgggtgcgcattaatttctttatatgttgtttttgattactcttctggcacaggggctatttggtttgacgactgaatatcttttcttgggggttcttctcatatgaccagacgcggagaacggagtttacaagaatactcgaaagatgttgacgtcgacacagggaaacccatagtaaggatttgtttttctatcaacatttgacttcctacgtgcttgtctcgagtactcatagtgtttaatgccatgtcttctagctttgtgagagggaaagaattttacgtgcgtttcctgattgatctgtatggttccagaactacgaagattattgcttttctgattctttgtctttactcgctgaatcttgtagggaattggagggccacatgtagatgtgaccaaaccgtggccgatgaacttggtcagtgtgatggtgacaagtgacgataaagaagagattaagaacacactagcctggttgacgttcgtctgatctctttcgttgtccagtcttctatgatcttcttttgtcctctcttgctcacaaggttttttctttctttttggatatcgttgtgccagaaactcgaccggcggactaggcctgatccacgaatctgtcagttttcgttccctttacccttatctcaatatcgctcgactctgatcctaaagttgtatccttatttatattgcgccttcaatcatcaataacgtcttccaaaacacaggtcaacatccataattcctcagattataccagacagtggtttgcttgggccaattcgtactttgcagaagccgtgatcaagatcgctggcgagtatcccgatttgcttttctaagccaagtcaaatcagaatggtaagatcgcagatatggaacacagatggaacgaagaaaatatgagggccagaagagaatcgtaggactttgtatgctaaggttgttgtatcttgcttgattccttttgcttgcttcatattgcgctgtgctatgctctgttttacaatacaggatgaagatcgttcgaaattgtctgcggcgagacataccttgaagtgtgcatctatagaaaaacaaataaacaagcaaatcggaatagaaataacataggacagcgtctatttcgacacggctaaatcttgaatggccacgttccaccagactggtctgtttgtcgttattttgacgacaggctctgtcgagacgagttgattggacgtcgagatttgggtcgaaaatgacgtttcccagttttctgtcaggaagaaaggttgaaggataaatacattggtataagaggggaaggacagaagcattgcagaggagagaaatgatggaagactaaccgacgtcccatcggagtcctttggtggaaatcaccgcgtctgtcacacccaacggaagaatcccacaagtcggtccaaggataccatgatcaatcgggatctcatgttcaccctagacggcccaaatagatgcgcggtgagaaaggatatagagttgaactcgatagaaaaagcaatttgaagaaggacgaacagcatcgagacaccaggcgacctcgtcgtcgcttacgacccagactttgtctcgttcggtgcgtaacttgtgaagataatgaagggtatggatcgtttgatccaatctgccagtaagacctccaaagaggatgatatccaactatacacaaaacgaaaggcggaagttagagtaagttatgtgatgggctgctgagaagaaggagaagaagggaatatgctcacattggcagagatggccttttcgtgagcttgaatggaagagatacatttcatgagatctgtcgaatattgatccggatcttcaacgactcgaacgccctgcgcagttgttaagagatgatcggatgagcaagaagagtaacgtatagagggaatgagagagaagaagaacatacggcttgttcgtaccatgaacggacgtctgatcggagagagtcgagatctcctttgatcaagtcaggaagaaacctgagggaagaagggagaaggataagaatcagttgaacgaaacatggttgatgagacgaatggacacctcactcactggcgtctttccttgtcggaatcaaaaaagtcgtacagccggtttgctcctccgtccgcacaatatcgaatctgacctgtgagaagaaggaggaagatctagaaatgatggtgagtcaagagatttggacaggactcaaccctaccgagttgactatgacttactcacatgatcgccatactctgtagaagatctctggctttgttatcggcagatttagaacgatgagtgccttggaggattctgtacttgagtttgaggctgctgagagaaagctcgaggtattccagatggtcggcatggtgggtgaagggaatgtttggtgtagtgtgtggtcagaaagtgtaatgagagataggggatgtattaggaagtgtgtgataaaaagatgtattagggaatgtgcactacaaagaagactacaaagccgactgtaaattcgattaggtggttgactacaagaccaactagagaagtgactaggcgatgtactagacaagtgaataggcaaacgactacacaagtgactatacaaatgactatacaaatgactaggcaaatgactaggcgaacacaaaaggaccgagacaagaaaaacatctgcctcataacatttggccttctttctcttctcttcccatcagccatcacccttctgaacgctttacgatccgatccaccacacatactctctatctcaaatcaacaccatcatgctttccatcagatcactcgccaacaagacttccagaggacctaccatgcttaccagacacgtctcagtctgggcaaacgtcaaggccggtcctcccgatcccatccttggtacgtttctccttggcgttctccctctgcctttcgctctgtcacagtctgctctgcatctcaatcgtactgaatgattctcttccgtcctcttgtccttttgttccttcacaggtgtctccgaagccttcaaggccgacacgagctcaaagaaaatcaaccttggtgtcggtaagtgtactcttttttaaatcgtcgcttaaacgtccgattactcggaccgatcgaacgtttcagccgagactgctcttctcatcttctttctccgacgattctatgtttatctgttctatcaaaccagtcgctgatggctgatgatgttctctttctgatccattctgctctcttaggtgcttacgttcgtagaacatcttttcggatatcatgatacgtttgatctcagctcgggtatcatcgctaacctacacgagattcaatttcatctcgcgtgctctttcttttcctcatcccatccgaccttcatcggataaaaccggttagcgagacgccaacggaaagccttacgtcttgccttctgtcctcaaggtaagcatgcccccgttgcttatctccggaaaatcatgctcatccttcgataatttgctgtctcactattcatcgccacacaaggccgaggaggtcatctacaacggcaagcatgacaaggaatacctacccatcaccggtctagggtcagcagctttgtttccttccaagcatctcagcaagcaatcctaaacacatatctccttggtcgtatatacagagactttactaagcttgccgccaaactagcctacggtgctgactctgcccctctgaaggagaaccgagtgggtccttttttcggaacatactcaccatctcggaccttgatgctgacactcaagctcacattagattgctatcactcaatctatctctggaaccggagcactccgaatcggaaccgccttccttgcccgacattacccaggagctaagcagatctacttgcctactcccacctgtgagctcttttcgcgaatctttccggctatctgcagctcgtgcccatactgattcactgtatgctatgttcgacacacaaaagggggaaaccatatcccgatttccaaagatgctggtctcgaggtcaagcagtactcttactttgacaaggacactgtcggactagacttccagggtatggtcagagacatcgaggccgccccaagcggatcagtcatcatgttgcacgcctgtgctcacaacccaactggtgtggaccccacacatgagcagtggagggagctttccaagctgattaaagagaagaagcacttcccgttcttcgacatggcctaccaaggcttcgcctctggtgataccgactatgacgccttcgccgtccgacacttcgttgaggaaggtcatcaaattgtgctctctcagagtttcgccaaaaacatgggcctgtacggagagcgaaccggagcgttctcggttgtatgcgctgatccagaggaaaaggctcgggtggactcgcagctcaagatcatcatccggccgctctactcgaacccgcccactcatggtgcccggttggcggccacaatcttggggaacgagaagatgaacgcccagtggttgaccgaggtcaagggaatggccgacaggattatcgagatgcgtgaggctctatacgagggcttggtcaccaggcacacccctggagactggacgcacatcaagaaccagatcggaatgttctccttcactggtctgtccaaggagcacacggtcgagctcgctcagaaggcccacatctacatgaccgcggacggtcggatctcaatggccgggttgaactcgagcaacatcgagtactttgcggatagcgtctccaagaccgtcaaaggagacttgtaattgatgtgcttctgcaaagatcgatgagctttagatggataccctctctttttcttctatctggttttcatcggcatcttggagcatgtttctcttgtatcccttttacatgttttctgaaaagaaaccttcccaattgtagtagttttgtctcttgtcatcttatgctgttcattacctttctttctcttccctcctcttgttcttaaatctttttcgggttataaaagtctttatgaatgtgtgtgtgtgtgtgtgtgtgtg

SEQ ID NO: 504 - DNA, 1122 bp, Xanthophyllomyces dendrorhous
accatgggatgctcaccatcagcacccgacaaaaccgaaagagatcgatcgttccagatcgataaacagatcgaagaggattcaaggagtctgtccatcctctttcttctctcttctctcttctttttctcttcttctccatgtccttgctctcttctcttccttcaactctcctctttgcccttgctccgttctcctcggacttttctcctgttcttgcctttcccattcattcctacagaagaattcactgacgcttgctcaaccctctcgcttttcgttctcatccctcgctactcactctacggttcccattcttccctctcggcttcctctcctctgctcacgattctcttcctcacccgatcctccctcggaatcgttcccaatagaatttcagaaagaatggcaagtccgcaggatcgatccttgtcctcgtggttctttttcctcctcctctttctcttgaacaccgagacatccaaatctcatccttgtctttctcctctctcccccttgcttgctttcttccttccttgcctgcctccttatacccgtcctcaccctctctctctctctctttccctcgccctcgccctcatcctgttctgtggacgtgtttacctcagtaaaatactcttgcttggtacgcgtctccttctctcttcgtcttccccacccctcccgctcaccaggccttctgctacacccatcaggatcgggagagtccggcaagtcgacgatcgtcaaacagatgaaaatcatccatcaaaacgggtacactaaagatgagcttctgctcttccgtttgatcgtgtatgtgcttcccctgccttcgttcctcctcctttgttcacatccagctcacgtcttgtttcatctttcgttcctttcgaccgatctcttccttctcgcttcgttttccctttcgaaccttcctctttttccgctcaaaaaaacaaaaaaacgcactccagttacaaaaacttggtcgactctgcccaggcgatcgttatggcctctagaaagctaggaatcgatccagaacagccagcgaacagagtacatctcttcaggtctctttctgttctctcgagattcacaactgatctcctttcatac

SEQ ID NO: 505 - DNA, 2870 bp, Xanthophyllomyces dendrorhous
cccccttcttcctcctctcctcccttccaccaggcctatgcagaaaagattctagactaccgaatcgacgtagacccatcactcgtcctgtctccagaaatcgcgatcgcgatcgaatccctttggaatgacccaatcatccctctcctccttgaccgacagagcgagttttacctcatggattcggccacctagtaagtacaccctcctgccttgtttcccctctctccatccatctgtcgcccttcgtccagaaaaagagagagagagagagaaaaggaaaaagaaaaaaaaaaacaaaacaaaaacaacaacaacaacaacaccaccagcaaaggcgcgtcgggctgacgatacacatttcccaaacagcttctttggcgcggtccgccgtataggcgcaccggattatatcccagacgaaagcgacgtgttgagagctcgaacaaagaccaccggtatcagcgagaccaggtttaccatgggccaattgagcatacagtcagttctccattcttttccttcccagagcccttgatctttagcttttccgctcaccggtcgtttctcttccttcttggcttctgcatttcttctccgcccccctcgtcatcctctttcctcattctccgcccgcttcgttcggctcctttcaccttcacttttccctaccccatagtatgtttgatgtcggaggtcagagatcagaacggaaaaagtggatccattgcttcgaggcggtaacaagcatcatatattgtgtcgccctctcagaatacgatcaggtgctattggaagaaaacggtcaagtcggttgaactttcctcctttgttttcacactcatgagctaatccgctgcttcgacaaccaccgccacctcacaaacaaaccaatagaaccgaatgcaagaatcccttgtactcttcgaatcagttatcaactcgagatggttccttcgcacgtccgtcatcctcttcctcaacaagatcgacgtctttaaagcgaagctctcaaaagtgccgctcgaaaagtatttcccagaatacaccggtggaccagacatcaacaaggccgcaaagtacatcctttggcggttcacacagacaaacagagccaggctcagtgtctacccgcatctcacacaggccaccgataccagtaacgtgagtcgcctgaagcgcaagcttccacatagccaacgagactctctaacctttcttgtccttatctttcacgctccagatccgactagtctttgccgccgtcaaggagaccatactgcagaatgctcttcgagattcgtgagtctttggtcgtcttgttattcctttcaagcgttccttacccgttcatcaccgctgaccagagatgtctgctttcttcctcttgtcacagcggcatcctatgagattggctggctccttttcatatctttccctctctctccatccttttctctctttttggtcctctttcgcttccttgtcatgcccggggttagggttcacctctttcttattaatctgtgtaacgacctatactgtttttccctctttcctctttttttttctttcttttttcgtcttttttctcttttccctctcttgttccttcattccttccgccttctactcctttttttcggtccttcttgtttttccgaatccttccttcttcccattcaattcagacatataagccttccccatcaactgcagtgggtgcctcttgtttttctccggtcgatacttgcctctccccctcctctttatatctccgttctctctgtctctatttaaaagctctttcagatctagacgtccgtgccatggattccatcctcctacccgttcctcatttcattccatttcttcctttccctccttctcctgacccgcctcgaccactcagacttctcggatcctagaccctagaacccttcgattcttcttctcttgatccatgcttccttttctctcttcttttttcttctcctttcatcttgttatttctatttgtgtgaacgtgagtgtgtgccaagaggaaggtcttgccgatgggcatttcgattctacttctttgactttttcttttcccgctgctgtcgatatgatctccttctcttcctctgtccatcattcggcattcaacatctgacgtttctcgtccgttatgtttcctctttgtcttgtcgatctctcttttctgctgtcttttcgaccttgactcttgcctcgatcaagatctttgtttgatttgactgggaacatgtcaatatttgttcggtcattctctccttgaattcgatcggtttcactttttctttcacatttttttcttgtcttgtttcttgtttagtatcctatcttcggtctccaacttcatttccagtcctaatcccagcctcactcttccaattcctcttctcttcttctcttcttctcttctttttcaacggttttcttgtctctttttttgtcgcctctttttcctttctttctattctcatctcgtacttcacggattcgtttcccattccttcctcactctatctgatttatatatatttatatatattctttccggatgcgttcttgtccctccttgtgtttctcatgccttcactcccgagcacgtcggccgagattgtgtgacggacgatcgttctcatggtccccacaaagagcaacagaaagaaagtccctgtacggagaaaaaagaggaggaagagtggaaaaaaaaagaagaaaaaaaacgaataaatctaaagaaaacgagagcaggctcatcgagcgactcgctcgatcaccttaccggattctaaacgaaggatgctccctgtattacgatccgacgcgtcatgtccgat

SEQ ID NO: 506 - DNA, 51629 bp, Xanthophyllomyces dendrorhous
ggggagggagaccatatatacatatgttgttgatgtgttgttgttttttttggttcagaagcgcagagttccggaaacccgttgttgtgtttggaatttttaatttgagaggaagaaaaagtagctctcaagtcagtgagatgcactcaatatggatggcggtgacgaaagaaaacaagtcaaagaagaaaaaaaagaaaaaaaaaggccttccccctccaagaacgcacctctatcttcggtccaaggacgttcgccagcccagtggccgacccagacgacggccgagcgatcacccagtcgatccagatataacctacaccgttcgatcgagtcctgctccataaacgcaaacggttcgtccaggatcaacagctcgggtgaatggatgatggaccggatgaacaggatgacggattggtcgttcgggctctgctctgcaaacttccggtcgcccaacgagctgtcggccggggaggggaagaacgatcggaggaccgtccggatccgggtcgtttgctcgtccgagagcgctcggcgagaatagatcccaaggtagcccgtcccgatcgcttcctcgagcgagagcccggtcgaacgggggaacgatttgaagatctctggggagcagtgtccgatgagcgatcccaggatgggcgtggcgatctgtcgtctcggccggccgaacaacttgatcgactgtgcagggagcgagaacgaccgggggtggtcccctaggatcagcgacagtagcgtcgtctttccggacccgttcgaaccagagagatgccatcgagttccagtccggatggtccaatcgacagagtccaacactcgcttcggtccgtaatggatgtcgacgtctttgagttctaccaccgtctttccttgcgcgctcggtgtttccatcgatgattgctcacgtcgttcttgttcatcgggtccggctttcccgtcgatcaaacctatctcagactttatccggctcatccgttccgcccaccattccttttcgtctccccgtacaccgaaccggacctgaccatcggaaggcgactcgatcacgttcgtcacccaggacggtaagctctcgcctccccgaacgacgaggatgatccggatcgtctcttgtagtttgtacaggacgtccgagatatctttacggcctgcagggtccaagcccgcgaacgctttgaccggcataaacagtcccgaacaagagggaggagaagaagaaggagaagaagaaagatattagtctcgtttatgttcatcgaacgtgaattaggatgaagaaagaaagaccatgttgaagggaacaaaaataaattaagaaaaagcccactcacgttcctccacgacgaggaatttcggatcagacaacaatccaagcgccatccttgctcgtctggtctgaccgttactcaacccgacgaacggagtgtccaacagatgttccacccctaccagcttggctacctccctcgctcgctcgcccccctttttcccacccgtgagtgggtccgggtcgagggcccacaacatcttttccaacagagtcagtcgatccgattcgtgtagggtatggtatcgagcggtgtagtccgagaaatcacccgaaggagagggcggggtgctgaatttgaggtgatagatcgaggacggagacgaaggctcggtctcggaatacaaaaacgggtgacgtccaggtggaccgacgtagggtgatagccggtgatgattaaggagaacctttgagggaaaggttatccaaagatgcaaaacaagaagaaagaaagaaaaaaaaaccggaacagatgtgttcaatcgtctgttctcatatcgcttgacggttgactaaaactcacctcgactagagatttcctccctgacccaccaccgacgacagcccaacgctcgttcgattggattgtccatccgagatcccgaaacaacggatgagtccccttatgatcgccaaacctatgaaccgctgtattcggtggaattcggaacgtcggcgctgtagaattgatggagatcagacggcacgatgggctgtatcgaggggttctgagtgatcggatgagcagccggttgaacatcatgtgccgatccgacagatcagacgagatggttagaagagagggtgaagactgaaggtgggaagaagacctcggaggtgaaggaaaaaaagaataattaaaatcggatggagattcggacttaaccgcgatggatgacgttctatcgcatctgcaccgaacccaccatctacatcttcgtctacatgatccatctgctgttatatctgctctcgtttctatctcctcaagagccggaggaggttcaatcagttcctatcagtctggaaagatattttaataacaaggcagcttcttattctggcgaggctttgaacggcgggttcgacggcgcaggtcggacgtacccatctgaggaaaactgtctgcctactggctcttggaaggacaaaggcgtacaggtaaagagcacagaatgattgaaaccgaaagtcaaggtatgagaaacgaacatgttgactcatcagatgggtcttatcgcagtttgatttgccgagattttgggcgggtcttcagtacgataacatcgtggctgaatcgcaggtgagactcgagggaatgacatagtgagatatcaacactgtcctgatcacacataaatttgctcttgctcagactatcgccttgccagaaccggtcgaggtttccagccttcatcttttggttgcaggcgattggtctgacggtgagtgtagttcgaaatcctacaagggaacccaccgagtactaacatcctggttcaggagcatcgaaggaaaagatcctggctgagttcactgacggctccagcgaagagctcgagggtgagtggctctggcttaactgactctcaaaaacttgatagagatcctgatctgttatttatctaatgtgattgatagtggatgtcaagaattggtggtccatacattggctcaaccaaggtaccattcaatggtatgtagcgcacctcatcttcatacagatcttgttctgatcaacatatctctgcaacatccgaccaaacaaacaagcccataccacttcacatcttacaaacaaaagtcatacaattccacccagatacattctgtcacacttcccgttcactcgtcggcaagccttggatccatccgtttgcctgcacgagcgtccctcaatgcactccatgtgttcgcagtcactctaactccgtctttacgttctatagatccttaccgcgcagtcgaagtactgaacgttgaagccacaagcaactggatcgacgatcatcaaaggcgggctcagattgtgaaggtctctctcagaaaccctcattctatctctgcccactcggacgttcgagcctggatacacgaagcgattagcatcgatcttcgagggctcagacccggctgggaagtcgtgaaacaagtaaccgtaacaaggatccccccgggtgattatgtggatgtagaagttttagtgcagccggtcggtgggtttagagaatcgaagccttgggatcggttgggagagatcaaagtagttgctactaaatcgagtagaacaagattcaccgaaaacacctggaccattgggaaagtcaacgggacaggtagattggtccgggattgggagcactggagagatgatacagtatgttgcttgccgtcactgtgcagataacttgcctactgtataagatctaaacatttggttagttcgtgatagacaagtttggagttccatcagtccccaaagtggttcgacggggccaagtttggcagtacgttctgtgcatgtatttgttactgtttcattatcattcgattctaatatggatcgacgtcttttgatatacgttctctatttcagtattcatccattggggattatatagtgttcccgcttgggtaagttccactataccccgcttcggttggactaagcatttgaagcctgtttgatcaatgatatcatgcatctactcctgctatagaccaaccaaggaagatagtgagtccttcatacagttcgtttagattttgtcagatctcatctcacctgtcttgctctgtagcgcggaatggtactggtactggttgcatcaggacgggaaacattctgagagtgagcttactaattgtcgacggtttagtaaaaccatgctgtctgagctatcgggctgaactttggactgatttcagcttataatcaccatctcgatcaatatggccctgtaagtcttaccaaagactgacaaaataccgaagattcaacgttgagcactgagcgcttccgactctttcgatcgcaggatgtcaaatacgacgatttcataccgtcctttgacggatctgagttcaacgctactttctggatagatctgtttgtatgtaactgatctccttcagtctcgccattaaaatccgctgatcggatttgcgcccgtctttgatctacagacttctgcaggagcaaaatactttgtcctcaccaccaagcatcacgatgggtttgccctgttcgacactctagacacaagcaacaggagtaccgttagcttgggtcctgggggtagagattatgtcagggaattgttcgaggctgccgatcggaaaggagggatcaagaagggcacgtatttcagtatgccagagtggtttaaccctgtgagccgtttgtttaacatgatatctctttcaagtctctggtccattcaggctaatcctttgatgtgacttattcgaccaggattattctcgatatggttggcaaggttgggtgagtaattttgtgatcatagtgtctctacacttcatactctgactactatctcgcagccaggaggcctagcaaaagatatataccaccctggccagcttgagccttataccgggcatgttcccgtaagtcggtgtcttcttgttgatttatagaacagatatatgatcaaacttatttgcatatattcgcctaccattgtggggctaccatgataggtcgacgactatgttgatgatctgcagttgcagcagatgaggattctgtcaaacttagggtcagatatcatgtggtgcgatgtaagtcccagctcaccctcagtttatgagcttgtggttcgttttgtgtcaacatgcttacgcgcttaatctgtttggatgtgctgcctgtgtggtacagatcggaggggcgaaccacaccggacttttcgcatccgaatggtatagaaatacctccaaaacgggacgacaagttgccatgaatgatcgtaagctttgaattccatttcgagatacgactggttgatactaacatattcgctctaccgagcaggctgtggaatcgcaccagacttttcgacccccgagtatgagcggttcagtaccgttcaagttcgtctgatatcatttgggatataatcatagcgcatccttgtccttactgttttttcatgatggttcgatcaatctggatggaacatcacatgatgatcgatagtctggaaagtgggagacctgcgagggtgggttttgaccttcaaactgtaccatatcgttccgaatgactagcaccctgccatgcgatgccatgagctgatgtactgactatttatctattgtctggtctcagggatcgacccatattcgttcgggtacaacaaggcgacgaaagactccgagtacaagttagagtatttcagttgtctcttcttctggatgggcaactgacaatcgttttcgtctggccaggtccgccaaagaaatcatacataacttgattgatatagtgcgtcgtaagtctactctctcataattgaatctgtataatgctgaactcatagttgtttgcgcacgtgctagacctcaaagaacggcaactaccttctgaacattggtccaacaggtgaaggaaagatcatccccgtaatgatcagaaatctacttcaagccgggagatggcttgaaactcatgaaagggctatctacgatactgtttgtattctcaggttgaccttcttcttccgtcattgcatataccgatacctgacgtgccgtgttgtttactatatgccggtcgtaggtgccatacccattgcttcctgagcttgtcctgccgtcacaaaacatcaatcttcgtttcactagaacgactttttctttcttcatcatcgctctgatgcgccctacatcacctgtgttcacgattcctactcgccttcctatcttaccaggggacaagatctatcttctgtcaaacaagagacaaaagtcaattgacaaaaggaacggtgtagcaagagagctcgagctcgattgggagtttggaaagaacgaagagcaagtaaaaattactgtagaagagaatgacacagacgaggattcgctggcctgggtattcgagatcaggtatcagtagaggctgacgaatatctgttgtatgattatgcgctccttcaatctttggatatcatgatttgtccggtattcctttgatatatcatcttctctctttagggttgaagagaaacaatcatatatgttacctatgtgcaaatccgtaactaagatacgcgtccctctattattattataattatttcccgtcgcttgtgttctgagatcaagagatggtaacgacgatcattctcttctatatcgtcttccttcaagctcttatcatctagcagagaacagcatgatatctacgccgccatctcgtccgacaacatcgtcaccaggctttgcggcccaaccattcccgacattaggcgctcttcgaagaccaagacagtctctttctggctcgtttagtctgggtcctgagggtttgatagagcaccttcagttgggagctctcgacaatgaggacggtgagtgagacgaatatgccacagcctcttcgtcttcctcttccatataatacgccttggaatctgtcttctcctgtttcttggttgatcgacgcgatgtcggttttgttggcaactgaatgatcgtactcggcacaaggcatcattttcgaaatcaacgtatactgatcagcaatcgtcttccaatcttaaactattctagatgatccaagaggagctaataactcttctattattcctgtctcaccaagactccctcgtccatcgtattctgctcttagacttcacaaacctcatctgcgccgacgtccatcttcattatcggtctcatcctccaacaactcaaactttcaacttgcacctccttcgccctatactatgcgctcggcgactggcacacctgggctctcgagattgcgtttcgggagtacgcacaatcttgccgcccaggtagatgagacccgaacagaggatgagttttcggaggacgatgtgacgaggaacacggagggtgacgaggaggatggagaggaagatgggctgaaagggatggacagtatgagaagttggaggcacgacgcaatgatgcaacacctttatgaggcagctgctttctggggggacaaaatttttagtctaacaggtatgtgaacagtctcatatttggctttcatgttcgttgcttgttaaaatgatttcaatttcacgccaaacgttcgtccgacgactgctcaggggataaaaatgatgccttttggcttgctcagattcattttctcacctctcgatacgctcgagccgttcggatcctcatccaacctctcgaaaaacctgttaggttgagagagaaatcaacaggaatgtccccttcaagaaaaggcaaggaacgcgcgtctatggaagacgaagaggccgagcgattagaagaagatctcaagaagggcagaggagacccgaatggatctcttggaggactcttcgaggaaggatggatcgagggtgatcgtctgggaagagggggaagaagaattgtagatgtcagtctggcttgtcggcatttagcagcgcaatgtctagtgagtgaaatataatttaaatttcaatatcgtcttcccatctctgtctatatatgttgtaacaaaacacttatgtgcacttgatttgatggatacggtctctgtgatgatcctttaactattcttagacacgaatgggacacttggatgaggctttggaaatgctaggatcgacgaaccctttccaaggagcaggtatgcgacaatttacgtcatattcagtcgacactcacggttgaagttcgttgacccttattctgtgatgatgggattccaccgtacttagcaaatagcgggccacatgtaaaatccgatggaggaatcaaggtaagcctaaattttcagcttggtaatttgtttcgatatgcattgttttaacaagcctatctacgctttgtatatgtatctagttggagtcttcttgttgtcttctgcgtggtcaaattcatctccgactgtctgccaccgctcgagcgaaggaatgttttgtggaggctttgagcttggacgttaggtgctacgacgcattcgtggctttggtggatggtcagatgatgggagtagaagaaggtttgtatatcattttctctcttataatgtatgctactaaggcaggaagaaaaaattaatccaaaacttgcgacctgtccagaatgggattttatacagaacctctgctatcgagaacaatctgatgacctgtctgagttcattcaaatgatgtacaccattcgtcttaaaaaggtttgctcccttcctccaattcgcattattatctcagaaaaggaatgccgtgctgaccgctttttcgatcattacaatttatcagtacaaacaccttcgggagatcactcaggcaagaagaaggcttctgactgaatacggtttatcaggcaatgccgatgtgatgtgcggattggcagacacgctgtatgcccaatttaaatggaatgagtgctacgccgtgacttcaaagttagtttctattccttcatcagtataacttctcatacagtattgataccttggtgccattttccctcaaatgaacgatgatagaattcttgctctagttcccttccactcctctgcgctgttgctccacttagcatgcatgcaccacctacctcgacttcgttctgccctctatctacttgctcacaatcttatttctgccgaaccggacgccgcaacaagctggtatgctgttgggctttggtactacactggtgagaagtggagtgaagcgcggcggtatttcgggtgcgttctgaaattctcattcactgtagatgtctgacagttgctcatggctacgtccttgatctgaaatggaacatcagaaaagcttcgctgatggatccccgtttaggaacatcatggattgcattcgctcattcattcgctatggagaaagagcatgaccaagctattatagcttactccacagctgccagattgttccaagggtgcgtttcctccttccttgaatgacgcaaatctggcctttttcgcatagtttcttacgattgttcgtattggggacgttgaactcagatctcatctacctgttctattcatcggaatggaacaccttcaactcgaaaacgtcgcagtggcaggacaccactttgagtctgccctgacggtctgtaaaagtgatccactgttgtttaacgagatgggagtaattgcttacatgcaggaagagtgcgtagtttcatctgtttcttcgtctccctttattgaccaccaatgtgttctgattcattttaaaattggactttgatggaagcagttatccaaccgcggtcgatcaatttagaaaggcattggctgcttcggaagaaatgcaaggaacacctgctacatgggccaaaactcatctaaacttaggacactcactccggaaactcgggtatgcgcttttttctcctaaattctctttaaagtctcacatcaactgacattggattcacatctcttgaatgaaaaggaaaattgacgagtcgttcctcgcgtacgagatggcgctgaagttggacccaacttccgacagcgcttacggaggaatgggcatcgtctttcttctcaaagggaaattaaactctgccatcgagtgtttccaccaggttcgcctcccttcctcctcacccctgcttgtgtaattttctatcttctttcttcttcacgaatctaatctggctggcatctccctttttcttgttcgtcctaacaaaacactttaaggcactatctctagacccgatgtctccccagataacatcaatcctccactcatcactacatgcaacgacagagtttgaaggtgcattggggtcaatcccaggcttgccgagttgtttgagggacgagggatttgatccattccgtgtggttgaagccggggtcgaggccgaggattttggggtggacgatgtatcgcagatggacgaaacgggactggctgatcagacaggatcagacgaaaggagtctacgtgacctaagcaacaacagggatgttggattggatatgactgtgagtggctatgagggtgatacgatggatatcgaagatggttccatgtgatgttctctttgtatatgtgatggttctgttttgtttctgttggcgcgtgtctccttgtgaagagcggtcttcgaaagagagaagaagagggaggcgtggatgaagcgaaatggaaaggacatgagatagaaagagcatgacttgatgtttacaaaaagaattggcaaaaaattaaacgagagataatgatggataggacaaagagacaaactgaaattgaccaaggcaaatcgatggacttcgaagcaatatgaacaagaattgagagggtttcgggtttcaacaaaccaaagagaagaagagaaaatagcaagtacgtcgatagttcttagaaatgggggaaaagcgagccgtgcgggtccggtccaggttttccatactcagaagtatcacactctgcgtaacggtcgaacctgattaaataaaaatgaaaatataaagaggagagaaaattagattgtgtttttcgaccacaagacaccaaaggagagaatgagtaatacgcactggctagtatccccatcaccctcgattttaggaacatagggcgccggaatgtcccttctataaagcctgttccagtcgacctctgcgaaccaaccatgtccaaagacatcgtgacttccagacttcaagtttccgaaccgcttggtgagatcggaaatcaaaagagatttcaaaagatccttcgagagttcgtcgaagtaggctgggtatcgaactttcccggcgataatcttttcgtaaagtttcatcggatttccatcttcggtgaagaacggcgggtaaccagcctgagattcgaacaaagaaagaagtaagggcgcaatgctaatgggttgagctcgttgaatcagataggccacgtacaagcatttcaaagatcaacacgcccaaggcataccaatctacactcttgttgtatcccttactctgaacgacctccggggcaagatagtccggtgtgccacatagagtccatgtgatatctggtacatacttggcgaacccaaaatcagtcactttgacgtgcccgtctgcgccgagcaagatgttctctggttttaaatctcggtagatgatgtcgagcgagtggaggtaatcaatagcgagcgcgacttcggccgcgtagaatttggcgaccgaattaggaaaccgctagataatgaagttgtatcaagggaatgaataagggcatatcagatagggatatcgcaatccaaagtcagaaagaaacctcacctggctcttcctcaaaagactaaagagttctccaccggcaacaaagtccatgaccatataaaggttcctcgggtccgagaatgttccccacaggttgactaaaaacggatgcctaactcggacgagcatctctcgctctgaattggtgtgttcaacctgtttcattctgaccactttttccttgccaagtactttcacggcgtagaatcgaccattgtgacgagatttgacaaggtgtactcgtccgaacgaaccagtacccaggctaatcgaacgggataaacaagacgaaaggtcaaactccagttttgccttcaaagctcaattgaaaggatatctcgacagactcacgttcgttcgacttggaaatcctttaacgcgtactttccagcagacttccggactttctcctctgtttccccagttccttcgacacgaggtgtctgagcatgtccgtcttgaccttggctctgaccaccggccgataatttgccgctcaacgcatttgcgtggatctgtgcgactctagcgttctgctgggcctgtcgaagagcagcctgagcggccgcggcttgctcggcggctatactggcgggagtcgggggctcggaacgcgtactcgagagaggaacggggggctgatcaactggaggagaagaaggggtgggtgacatcatatgagaaggagatgccggttggacttggggagaatgtgagacgtagatggggaccgagcttggctgggatgtagttggatacatgggataggacatgggttgttgagtctgatgataaactggcggcggttgctggggctgctgtagttgatggtgttgctgttgctggtgcaactgttgaggttgaagctggtgttggtgctgcatttgatgttgaggaacgccctgcatgtatagaggaggcgaaggcaatggggatgataccgagatagcggggttggaatcgtaggtgtggacgacgttagggtgaccgctagcgtattctcctcgaagggcagccgagagagatcggttggaatgaacactgttggagcttccggtgtgattagaagaagcccaagaggagccagaagaattgccagagtcgttagatcggaacgggtagtagacctgttggtttgtttgatcactggttgaacccaagatgttacagatagacgagagatggagaaaatgtttgaaggaaggagaagttgtgtaagttggggaacaacatgaacaagacgaaaagagagagaagaaaatagatcggaaacggtaactcgagtgagacacaaatcttgagataatccaaacagaacgagatgaaacgggaagagacgtacggatgatacattgctccttgcaacagaagagatgaacggtgaggatactaacagttcagacccttctcagtattgctgtgaccctatcttctgaaggagatcgaatgaagatagaatcgagatgagagatgggaggcaagtacagagcggggaagaacaagagatattgtcaagacagagagatggaaaaaggcacaagttggttactaggcgcagcaaaacaaggcacaaaatgagtcgtaaccgcagtgttggaaaagagtgataattaaaccacgcgaagttgtacatcatcctttaagcgtttagtttctagatttctaaagaagagagatgttactgacaatcggtcagaacggcggtcaacttagggatagtgatcgagagagacaagacaagctttctagaagtgcggacgcccttacagtcttacacagatatcttcaaagacgtagatatcaaatatatgtgagtggctagaacacagtgatgaaaagatgctacaactgcaaaggagtgacatttagcgtgttgtatggatcaatggtatgaacggcataaaggaaaaaattaaacacggaacgtttgtagaattctaaacggatatatgtgtgaggtaccacctcggatggagatttcaacaatagagttccgtcacttaagtcgctaacgctccacacgatcggacggagtgcgacggcgccccatctggagcaacgataacgataaataatgcatcacgaaacgtaatttcaccagataaagagacagacacagagatgttgaatccctttgatctgtggtattgatataggagacgtgagggaaccgatgttgagttagaattcaataagcagacactcatacatatttcatgagatcaaaatgatcattcgtcggtcaaacggctaagtatgttgtcgaagatgcaaggtcctagactagagtcaattccgatggtcagacaattctggaaaccaaccaccaatcatccatccatttgcgcacaatgaacgtccatgaggagaatcatgaaggcctagagaattaatcgagtaatgtaaccctaacgagtgagattcgtatttttcagttttcacgcaattttttttagttttgaaacacttgtcactaatgtgtcggaattacaattcgaagataagtttgaaaagagcgtctaagccttgatggaagacccaaccgactggactagctgaattcattcatatcatgaaagcctccatgtttatagacggcagaaatgtctacagacacaaatcatcgcttgggaccgctcgtccaaactttttggtcatcgtcaacaagtcaatgtagaccaataacaggactgtcaagagatttcggttcatagcaattctcttcatgcttatagcccgtccaatctatcgacatagacgatccttttctaattttgttcaactcgtgatgtcttcagtactaccactgtatggagacttgtattgcgcgtcgacgcgcaccttacgtaatccgccattcacacgcgcgtcaccgtctgcattgacactctcagcacctattctaaagagagatggtgaagaaatatacataatcgatcatctctatctttctctttctctctcgctcttcacttatctctctctgtttctttggtcatatcgacccgtatactgtcgccctaagaatcgagctcaagcttttccgctctctctttcgattccgccggagagaatggcagacgccaaggatttttctttgatagatgatccttcctctcatctagctctgactgatagtttgtcaaccacgtgtgctctcagaacggacgatcgagcggaaatcgaggagacagctccatcagttcagtcgaacttatccgaatgggaacaagacttcgaggactactccgatgataatagtctggccgacggagcctatcaccgcgccttttcatctagtccatctggcctgtcaagattactcgtctcaacagaacagcctgtctacacacatcctctggaatcaagcgttgctagagagaacaacatactagaagacgacggcgacgacgacgatgatgatgacgatgatgagggactagatgaaaaaagtagcatggaatcagatttggacactgatgattacagatcacaagattcccctcacgagtttccttcaaaccagttgattgagccgaaccaagttcgcgctctgatggacattttcccaccccaggttgatgaacggtcgagtggagaggtaatatccgaacacaggctccttgaattgcaatctaggaggcttgcttctgaacatcgtagaaagttgctcgccagggtcccggctggagggaggaacggaaagcagtggaaagcatcagatctacccctcaagatcattcggtttgtcttgattatctgaaacttctcttcgactttgatacaatacacacctcgcatcagctgattctcatattctcattaactattcaaatccctacaggcaaatcatccatctggtagcgatatccattgtgactgaggaggtccaagccaaacttgctgacggagacaaccgaatacactttggaaagcgacccgtcggtcttactatagctcacatccgagccaggtctcggatagcgcccttgcgtttggtatgtagagcatggaaacaagctagtaagtatcctcttcttttttttagtcctcatcagcgctttcctctgcaatatctgatcatgacactcgatgtatgcgtaattatttcaatcactttagccgaaactatccctttttggtctgaacttgcaactgtgtttgggttccctcataatatcagaccttatcgcgagaacgattgcctgatcacacaactgtgctgggtctgtcattttgcacgttttcctctctcccaacctgccgcctatgtccgcacaacgctcggaacggtttggatatgtaaacttcacttggctgttccgttctgcggtcggtgtctacggtcgagaatagatcctgcctttcgctcaagacgacttcagtggataggtcctcgatcgagtcttccggagtataccgcgccaaacgaggatatcgaccctgggttgagactcactgaagatgatgatgtggaggatgaagatgacgatataaacggcggagtcaacgccggaagagaactctatggacccaacatggcatgttgtcaacgctgccgatatgagtgccttcaggaagcagtgactaaacgagaccctgctgtccgtatcgacctcgaagacaatggggatctcgagtgtttcttccaatacgtcgaaagagctcaaggatcagccgaatcgattgccgtggatcttctggaaagacgatggttggcccgttggactaaattccatgaccttgctacgcaagtcgtccagaccgagaaaatcaatccggttacagccgcatcggccgatggtaacgacatgagagcaattttcaaggcttccatgggaattgaaggagatggaagcgagccaatgacagaggcactcgaaagggagctcgctcagttcgagtacgaagctgctgtcgctcgcgaggagaatgctgctagagttattggagcagagcacaacaatagcgacggggaaagacagacggatgaggaagggcaagggcaagaagatgaggaagaagaggaagaggaagaggaagaagaaggggtagagttgacaccaggagggtacattcagatcgtagaaatggccaccgaagcttggattcatcaacgtgtgattgacggattctgggtctctccgctcgaacaacgagcttttcaagagactttctctcaacaaacaccatcatccgcagagggagacatcacattagatgtggttcacccgctcagttcttcaacccttggatctagcgtatgcaccacttcttcgcatcccaacggacctcttccacccgctggcggagctcttgaccaaaagaccatcaatctatattcccgaaagcttcgatctatactccttcccggactcggtcagattgcgaggctttgtgcactccaaaaagatccattgaacgtagcaccaaaattaggcattcataagctattggaactgttgaggctaccaggagcttgggtgcacggaggtttggattgtatggaactcgcattggatcaagctgatgggcccgagcaaatctcgaccatgcctgcggagatcctatcgccaccaccattgatacgccatcctaacaacatctcaccctcagaaagcttatcattcatgcctacatcgtcaacagccaaaatgtacacgatcgaatcaccatcgtctactgactcaataagtccgtcggcaccttcatcccatacaacctctccgattcgaacaggatcttctcctcctacctcgctatctccaccatcttgcgctcctacaattgcccttataaccccagatccgcctattgtttcgtctaccttgagctccgtgccaagccccaagccaaacccggctcagaacatgaagaagattgatcctcgatttcctctatctcctaaaacatctcgtccggtcccgcagatccctcgtgtgcctttggatgcttcaaggttaggactatatactaaggacatcataaaaagggcttggtgggatgcttgtgatgacatgagaagatgtgtatgttcgatctgtttgaggggcctgaaagctcagcgagaagggaggcaagacgagggaattgtgtcagatagagaaccgaaggatgaaaatgacgagatgcaggaggaacaagaggagagaggtaagaggaaaggaggtaacgaggattcaagagcaggggacaagaagcagcggattgaagttgatgattgaagttctgttcctctttgataaatttcgtttctttactatccatctcatttatttctctccttgtcatttcctagactcgtggcatactctttgcctagcgatcacgaccttttgtagatctttcgttgttgattatcaagccattacatctcacatttctttttcccataccttgcattctttcttacaatctatatatcgttgcattttcttcttatagttattttctcacgagtctttcacgatcccttattctttctgctctctggacaatccattcttatgataacgacgacgagtcacgtcacaaattaccaataagaaagtcatcgatcctgtcttcgtctatcctctctttttcttttctgttttctatctctttactttttgagaagaccaaggcaagcatagtcaactctgtctacttcagtttcgattatcttcgctcatccaatgaagaaatcatccttatcggacaagagagaagtcgggccaaatcaaacaaagtggaacagagaatgcaattatacataatcttcaagatcacgagaaggacggaaggaaagaaatgaacgtatgggaaggaaaaagcaatatggtataaggttctgatggctctgtaaacggaaggtgtaagaatgtctaaagcagacatgacacgagggacattgagaaggtaagaaggtttacaagtatacacagctagtagtggtcaaggagaaaaaagaggctcaaaaagacgaaacggaagatatgggcttaagcagcctcttgctgatggtccacgaactcgttggcgttctctctcgagatggctttgatggaagaaaccttctcattgttgaagaacacaccataacatttatcagcttgagcaatcatttctggtcggaaagtcgttgtgatgaactgggcattggcggataattgatggatcatctctagatgacgaggaaacgaatacatggacgataacctttaagtcaagagtatgcgtcaacaaaacaagtaggggaaaacgcaccagcgacagaggctcggtattgagcgtccagattcgcgtcgatctcatcaaacaagtagaacggagcagggtcgtttctttgaattgcaaacactatttagatgaaatcaaggacaaatgactattagagccgggattagagaattaagcagacagattccatattctcatacctaacgtcaaagcgacgagcgccttctggcctcccgaaagctgctgaattcgaagtccttcgtcggatttcgaattgaatgacacctgtgattcacatacataccatgtcagctttagcacacgcgaagaaccttagataaatacaactaactttgatggagactccagtataactgtcgatgaccgacttcctggtctcatctccagagtcatcatcctcatcgtcctgattatctgtacgcttgttcattaccaatcggcctcgtccagccggaacaagcttctcaaagatttctccaaagtgcctcgatacttcgttgaatgtgttctcgatcgccgcatccttctttcgatccaagttttcaatcaattttcgaattgactcggctgatttggccatgccttcaaatcgactatggatatcgtcccgttgcttggaatacttttcgtacatctggagtgcttttttattgacatgggagtacttgctgagcgcagtctttgtcttgtggagccgtttaagcagctgtgacgagtcgtaatttgttcaagtgtcagcggagacaaggtgataagatgataagatgaatgtctaccagaaaatacacataccctagccgaatcgacgtccttgtacttttcgaaggcctcctcaggtaagactcctaaatcccggataagcttcgtacagtcatccttgcgctccgtaagggtctgtctcttagtaatgtaccgctccactactttctgagatctagcaatatcacgaccatctttcatttgttcaacttgggtcgcctccagagttgcagtcgatcttttgatctcttcagccagtttgtctttgcgtgtctcattctctgacgagacagatcgaatcaaatacgggggtaaactcgccttgtgataagtttcaaagacgaactatgtcaaacaattttagtcaagttgaacttactcttgatcaaatcctgcaaagcagagatgtttcgttggagagccgccgactcgcgttgtcgagattcgagaccttttccatcaagccctccatcatcggcaaccatacctagattttcgagctgggtacgcaaaccaatctgtcttcgaagtaaactctcattgagctcaatgtccagagcatccctccggcttgtgatctatagattatcaacgaatcaaaacagtatgagtattcagagaattgaatcctacgtaaatgaaagctcaaatagagaaaataaggttctcacttcagttcgttcggcagctgtctctctcaactctcgctctctgttctccgactcctcagataggtcttcaagtcctctctgatcttcgctagataacctcccagtcatggttgtctgaagttccgcctctagtgcctccttcttcgcctgaagttcggtcacgtcttgctgagcttcgtctctgacagtttcaagcctatctatcgacgacttcaattcgtcttcctccttcagtaaaaacatcagctcatcctcgagtttgcctctggctgtatgagcctgtcttcgtttagactcaagaacctgggtggaaccaacgagccgagttatgtcctgttcgattctggcgatactttgcttgacctcagatagacgggccgaaccagtgtcaagtttgtcttgccactctttttgaatccgaacagtcgaagttcgagatcgccggacatcatgatatccaccggttaatgctccttgccgatcggctcgatctccctcgagtgtgatgacgttcaaacgatgagatcgtctgaaagccgtagcgatttgtaaatccggagcaactacggttcctccgaaaacctgaagatcaaacagcaacagaaaagtgtgagtaacctttcatacgataatcgatatagatgaaaaatagcctgatagcagatatagaactgacctgctcaaaagctttagatagctctggtgcgtatcgaagtgttctgatgagtggaattatatctccagtgtccggataagcatgagaagcaacccgaagtcgattgagcggaaggaaagtcaatcgaccagctctctcggagttcatggcctccacaattcttgaggctgtctcatccgtgtcgactacaacatggaaaagactgattgataagacacgaggaagttcagcatggatgcatacgtctcgttaaggcgcatggaaggtcacatgatctgtatcttgaagaaacactaacctgttcccagcagtttcctcgacagccaaggtatacttatcatcgacttcgaaaagctgatagagaggtccataaacgccttcgatatgtagtctttgaacaatctggttcagagaactcaatccaagcgcggtatcctatgatccagaaacataaatatacgtcagaaatgatagcgttcataatataatgtatatgcatatagatgcacgcactcggtccatcatcgtcaacagacttcgctgggcttcttcaagcttcgtccgagcgtggttgacagacgattctaacgtgtggtcttctctccaaagatccctgaggagattttggttgtggtacagtgagcccgttcatacgacaggatcaattgatgagcatgttgtttacaaaggatgagagtcatttttcttttggaaaaaggcactcactttctctgatcagtaagaatctccatctcatcttgcaccttctccagctctgctttagagtcactcagtactgtcctcctctctgatatttggcttcgagcctcctgaatgctcccctgaagctgctctagcttgtcctcctcctccgataatctagatccgaggtcttctgccttgcctgtttgctcctcagtgagagtcacgatagaccttagttctgatcgaagataatcgtcccgatccgcctgattcctgaactgtgtgattcttgactgcttggcatagaggatgtctagcctagctcgagtcctttccaacgcctgccgattttccttttcctcaccaacaacccgtctgaactccggttcaacttcggcgagctcggcattgacctgagtaattcggtcctcaatggaagcgagctcctgctcgagatattctctacgttccgtactttcccctgacgaaagctgaagatcggcgatcacacagttgacctcggttcgtgatcggacaaggtccagtagctctttctccgattgttgaatggacatgttcagttgcaaagtctcttgattactagccgagacaaggttctctaaatcctatttgacatacacattgtatcaaaacattccgagagtcaatggtcaagcacacagcgcacaagaaacttaaataaatacatgatggaaatatatgcgaacctgaatgatcttctctcttttgataaactcctctctgcgaaccctgctatcatccagactgcttgccctgtcctcctccatctaacggatgtacgcggccacatcagcgcacgagttcaacttttgttatcttgcttgcttcaccacaaaggaaaggagaagaaactcaccttagccaaagtttctccgatctcttcaagctcattggtgtagatcgagtattccaatgctttcctgtctctgtctttctcctggaactctttaagctcgcccttttcctcttcgagctcttctaacctagcatctactgcttccaaagtttttaccatctttgctctcttcgactctgtatttcgaaacgagttcaagagaatctatcagatgaacaatcttaggtgttgaaggcaaattcgtaagaggtgagacgaaccggcattttcgagggtccttatactctctgctttcttctcgtcataaagcgttgttccagcgacttccttcaacaggtccagacgttctttgtcctttgcattggttaaaaatgtgatctagaaaggtagaagagaaaagattcatagaggcagttcccgggcggaagggtagacctgtcagtcaatgtgatcgcattctctgaaccattaccaacgtgagttgcgagagaagagaaggacaggaattggacgcaccctcccttgagggacaatatagtaggggttgcttttgctaaaaccagcgctctccaacaggttcatcacctccgccttactcgaactcttcctgtcaactgaatattcgtccttcttcaacccaatcgttcttcttaacgtgacttcgtccttacccgttggaaatctagcatcctcattcgaaaagacaatttctacgaatgcgctcaacgtggtagccgtacttagcccttcgtgaagtaaagactgtcgatcttctctagacatcgaggtgtaggcatcggaaaggacaaaacgaatagcggagaaaaagttggatttcccggatccgtttcggccaacgacgacattgtgggaggacgaaaagggttcgattggagtttggtctctgtaggacttgaaaccctggattgtcaatgtcttgatgtgcatctttgggtatacaagggggagaaagtaggtactccttcaactgggagatagtggtaagggtcgtgacaaaggaagacagaagtgagacaaaagagatggtaatatctgtcagaacgaaacgcgttgtgacgcgtcccgattcggaagtgtgctcatttattgacgcgtttgtaacgtgtttaacacgcgtgcataaatcaatcaactttctattcatcctcaatctctgaacggagaagatctataagtcgtaagaatagatcagtttcaaacaaatcaacattgaaagaaacatatatcacgaggatcatctaacgaatcaagatctcccaatcctccgcaatcagcacctctggattcttgatcaccaactcactcgctcttcccttctttgttgaatccgctcccacaccagccgtccactcgaacattgccgatgaaccagcgccactgaggattctcacttccttcggctgagatttcaaaccgagtacaacgattcgttccactcgaacatggccaatcttctttgcccatttgttcggtcctccagacagatatcgatccaatgtcgtctggtcaacaccagtctccgctggtctcgctcgtacaagatcttgactcttcagaacaccatcctggaagtcaaaacctcgccagatgaactctccttgctcgaaagcgtacgaatctccatcatcagagtataactctcctgaggcggtcgagtccttaccaagagacacgagaagggtgtacgggtcctgccacatcaaaggggacgatcgcctaatccgggttcgcaggggaataatgttggatccttgatgtaacaagggcgcagcagaaagtggggcatggtagctgacgtttcttccaacttttgaggcggggtagagttcgtggctgaagtaatcgtaatagggctgcgaccgagggaaagtgatgtgaatacaaaagaaaggaaaatcacgcttcaaaggcaaaaaagacagacaaacctggttatcgctaaggtagatgtcggtgcggtcagattcttcctcgacaatcggcttggccaacaagccggtcctgccgatatagaactgatcatccatcgcatatccagccggatccttagggaagtttacatattgaggtctgtccaacaaacaaatcgaccatgttagccagtgtgactgcacgccgccgaaaaagcctttgcgatgcgcgatagctaagccaatgaggtgcgactttaccgaaggacaggaattccatccacagaggcctctctaaaagcagtataccagataggaagcatggcgtatcgaagccggatcatatctctcacaattgacttatacggttcgtctaacaggtacggttctcgtcgtttggtgtcaatatgagcgtgagcacggaaaaagggcatgaaaattccggcttgataccatcggacgaggaaatccggagagggattctgagtttgatatcaaaaagagttgtatgtcggtgccgatgttcatgatttgaagagtgatgataaatgagcttacaccaaagaatcccccaacatcggctggaaagagagataagaagaagaaacgatcagagcttttcatcacctagtcctatgcataatttgaagaatctaagatacatacctcctgcaaagatcatcccggctatgccgttcgacaacaacatcgggaaacttcctgccaaatgagtccacgtgcccatgttgtcacctgtccagattgctccgtacttttgtgatccggcaaagaaagatcttgagagtacaaacggcctcttaggaatctcttcccgagcaattagagccagagcagtttgtttgtgctataaacagacggaagtcaagagatgcgtgtcagttcagttgaatcgatgcggtttcaggaaaactgcgaaaaaaaggactaacaaacatgaggccgttgacgttgtgactgaggtcgaccatagtttcttgtcaaacccgcaattcaagttttgtaatagaataatcaacgctcttacatatctctgttttcccactttccatcttcgtaaagagtgtccttcggcagggtgatctctggaccattaaacacagatggttctggatgcgcaagggaaaccatgaataagagtcagctctaaacacccagacaattcaaggatatacttgggacggaccgttcatatcgttccagataaacaagttctttgccgagttctatgatggtgataagacaggatagaagaatagatacgttaaacatgtcgataccattgatcagggagacggacgaaaaatagagacgaactgtccacttttcgaacttgaacatgccggtccaataatcccagcttcgttcattgaagaaatcgacccaggccgagcttccggtccagcaccaaccttcatagtttgtctttccatcggcgtttttgatcaaaacatcggcttccagagcctccttgtagacatagaactcttcggtccgtttgatgtgcgggtcaacgatagccactacttttcgtcctttatcttcaatttgtttaagcatgcccttgacgtctgggaacttttgcgcatcccaatcgaaataccggtgctcgtctgcatactcgatatccagccaggtcacatcaagtgggaagccctcgccgtctgcatcaaaccttctatcgacctcgagcatatcctgctgatcaagatagttccatcggcactggtgataaccaagggcccagtgagctggcaaggcagacggtccggtgagcgaggcgtattgtttgaatagcgcatctggagaggccgttgatccaggaagcaaaaacaggtcaagaataccagattcagacatccagtgggtgtcgattccaccagcggtaggtcgggtgacatccacccaagtctcagaggacgataggtagaacacaccgacggacgaggaaggagaatgagcgtgcattaaaggtatcgctccgtagagtgccataggcgaggaagcctcatactcaaagatgtcgacattgaacagtcgataggggtccgaaaagtagtcaccatcagtagttggaagagacaacggagcagcatgctcaggaataccgtagacatgtgtggccgccgggaacgagatgtcgatggaaagtgcctccggacctaaaatatggtaagtgagtcgcctttctcaaaagattctgtcatgtagagcaaacatattcaccttttggtttggtgtccttccaagacttccagttttcttcgaacaagcccttgtcgtactgatccctcgatccctcgaaccaggtaggatccggctttggatcgagaacggtctgaccttcagtggattcctgggcaagcgcctccagatcatctggtggcgatgttttgagctcttctggcttgagtctgaaatgttccatgtgaagtagaccctctccgttgaggacgatctgaggaatatccggaacggacgatctgtagagctcgattcgaagagggtaatgaaggatgtcgagtcgaagcttgtccgagtctgacccgtatgtgatgttggatccccaagaatcagtttctaaattgaaagatccttgtttaagagcgtccggaactagagtccacttttcggactcgttgtagcgttgacgaagtccgtgatgctcgtccatccggattctagcaatcccatctgacccgagaatattgatggaaagatcgtatctgatctctgggtggagatcattcaaaacctgaaatttgactgtatatggggcgcctccatcggtatcacgaattagaccagtaccattgatgtgataaggagactgccaatctggagtatctcttgccctggaagaaagaggacggagtctattacagaaagaggattgtgcgcaagtcttgaagtcttccttcttcaccgccttagctggattggacgagaggagaactaaagtgagaagaggaagaagccaagagtgaagcatggttaaccgattcgatgttcaacaccgggtctcgatgcagatagtggtgaaagacgaagcagaagaaggaaacaaggaaagacaaggaaagagatggtgaaaagggatgtaatgggagacgagcctgtccatgcacagctcttgagaactaaacgagacactacaaatatttgtaatatgtattagaaatctgttaatgatctaaggtaacaaaccacgaggtattagaaaaagatcgtagtaactactagagaatatgtagaacattcaggagtatacgactgaggcacaagccggagacatccataatttgaacatttacagcactcactactctcttgagttgactcgttccaagcatacatctgatggcccttcagatcctcctttctacaggatccgtcctcaagttctggtcggttgtcccatacttggcgctcgggatctttctttggtggcttcgagtgtttatcgatggttcgtctgttgttcctacagactcatttggttgttgattgaagatcacctcgcttaccgctacattagcgactgtcatcgcctatttcatctgaatcccgaatttctttttcaacggacaggaacaaagaatacatgggaaagagattggaagagtagacgagttatcgttgttgtgagtcttttcccgtcaggtatccttctctgaacttagagagctctttgtatatcattaaaacatcgatctcccttgcttctttttcagggcccaccaacaccacttgtgatctctcttctcgatcatctcaccactcagaactgtcagacactctacttaccaccgtcacttccacccaagctgctcctccttctccaggctattcagcttcgctcgtctgaccatgttcaacctaaagcatacttcgcccctcagcctgaggtaggctctgatgacgacgcagagataacaactaaacccccaatcaccccagaggacacacttgagatcgatcaaattttaaatgccgaaccaatgaatccgaaggactacatggatatcatgagatttgtcaagctctgggctggtcggaaaggcggcttgggagatgacaaacgagtagacgctatcatttgggcatacggtgtgggcgaggtcattgacccgctcttggttactccatcatcctataccggtttgagttctcccttttcgcgtcccgaagcaaaccagactggcatgtttgcgtctgagaaggaagaggagaaagcgcggttctcgttcttcacactgtttctcccccagatacttcagtcgatctcggcctcgtctcgctcagtacggctcatcaacctcatccatccgctctacccggcgggatacaagacatctcctctgcttcatccgacgccctcaacttctccgaccgattccgcttctcgtgcagattcaaagtcattttcggaagcagcaacaagatcgcatcatgccatgcgatcgatcgtcttctctgctcacttccagcgaatccttgacgcgctcgcgctcaagggagatgctcagggtgaagttccagatccggaggccactggaggccatggaagttcctttgaaagaccagatgacaagccggatcaggcagaaaagaatccttcgttagaaaaggagcacaagttgtcaaaaaagatcgagagacactcgacgatccaagtcatcagcgttgcccctggctttcacttttcatctgtactcaagccatttttgatcagacagtctcaaggatcattgtttgtccaggtcatgtgagtgttcatcagttgagaatttatctctatatacaaggtgattgacaaatcgtttttgcatcaaattcaatatgcacacaggtggaatgtggttttgccattcaggttgatccttggaccgtcgtctcaccaggcaattcaatccgtattgtttgcgttgtgtgctcctcccaaactgagtggctggggaagcgtcatcaaggattgcaaacaggtttggtgaggctctttcatttctttcctccttccttctcaggaatctatcgttgttatccgtgatgcatccttacttctaggtcttctttttggcgatgtatatttgcgcaatgtaatagggttccgccagcacttcgaatggatgagaaactaggccgggaagtgtgggagcagatggaagctgaccttgcagctgaattaccgggtaagaaaataagctagatagtatgataccagacatatgatggtctatgtcatcgagaaaatgtagcaaaaggagaacagtgcaagtgcaggagataaacatatgggcaaaattgaaaaattctggcgtcgacaagattcggaccgagttccggattcgatacatctgtgtttgcgtgtaccactgcgtttgcggcgtgctgaacatacattcaagtccatctcaataggttaactcattctcctagcaaaccttcttcatttcactagctatcttccatcaagaagctgctagattgtaccggaacagcttaaaaacgaggcggaacaggagatatgccaccaaattcgagccaaagtttagggatgataggaaggtcgtcttgtgcagaatgtaaacggcggaaactgagatgcgatcgacagcgtgagtgtttcgtttgtttcaacctctgcttctccaccaacacctcacatgacatggccctcatctcggactgaaataggaactgattcgggtcttatttgcataaacgatgggggttgatgggaggatgaaaaagtaccatgcaatcaatgcgctcggaggggatgtggagggatctgtccaaatggagttttgcctcccaagaatgcgatgttcgtgacttcccttcatctttctgttaatacatatgctaatctagttacggatgatgcacttgctgtgaatcgtgttcgttctatacatatttctcttgtgtctgtcaatcaacaaatggatgaacgaacagcaaaggatcggtatacgaagctctagaagaaaaggtcaagttactcgaggccaccctgattgagcatggtatttccttaccgactggttcttcaggtcctttcgcaatcaagcaacaaagatcttcaggcctctccaataactcctcatcatctatctctggtggaatttttaatcctgatccttcggaatccaactcgacatcgacaactactcatattcagactttacccctgacgaaacctgtcggtaaagatgttgacatcgaaaggacgtggaagaaggagggaagtgatggtgatgagtctgacaatgattggatcccggcgttaggaactttggaattgggagcggggggtagcgcaagatttgttggagctacagcctcgagcgaatggtataacaaccaagtatgtaccatcgcttcatatcgtgtgattgcaatgtgtactaaaatgtcaaggccaatttggtagagccttcgaaaccaccccgcatcttcaactcattcggaaacaccccttctaatagatagactttcctcctcacaatcggaaacaaccttctctccttctgagtcatccaaccacctttcttatgttcaaatcaggaacttattgccttctagggaggaagcgcaagccctcgttcagttcttttaccggcattatgcctggaagttagtctggtcctttgtcttctccaacgtctacatgttctcaagagatcgagtgctcatgtttagtctcaaactttcaatccagtcataacgtcatcacagaatcgaacttctctgtctacttcgatgccttcttccctaaattctctccctcttcttccgactcttctcatgtccagcctcatccaacaaatgaactctatgactccgacacccatcctcataaactagccttactcttcgtggtcttcgccatggggtcccatttcaatttggaaatcagtccaggttcagataatgggtcgaggagatggtataagctatgcttgaaaagcatgggattgagaaattgtctggaagaacataccgtcgcaggtgtccaagctttggtaagtcactttgaccttcatcattcctgcagagacggcatggctgaatatttgtgttttaaatcttgcgatctcttatcaccagcatattatggcaaactaccaactgtgaggtttctttatattgaggtaatcagataacagatcttgatcaccaacctgtctatcctcacagcgcggtggacaggatcagtggtggggatagctcatggccgatgtggggaatgatcgctcggctcactcaagcagtatgtttcatcatttcaagctgtctgttttgctaatatttgatacagtaaaagcttatgctgcaccattttctttcgattgtgattttcactcagatgggtatgcatcgggatggccaaaaatggaacttaccaccggaaacaatcgaggaaagaaggttagtatactgaacttcttttttaccttgatttttgataccccaaactaatgacgacaatatatcatcaacatgaaagacgtctattttgggagacatatacagttgaggtcttccaggtgagcatctttaggacattgatatagattttgaattaaattttgatccgctctgatgtttgtgacggcggtactggtcgaacaggcaaattgtttcggacgaccgtgagtcaaatcgagtcttctgttggtcaaatcagagttcgtctcgctcacacctcggcgttcatccatatatcccttatgacgaaagaggcggcatgtcagccaaacattatgaagttgaatttccgcgcgagttagaaccgattcctctcaacccgccggagatgggcttcactgagccacccgtcggctacatgactagaaagtttcaactcgcgatcgtctctaatgagtatgtttcaacactctctgctttgttttctgcccttgagagatatttcgggtcgatctcatataaattccttgcgaagagtacttgatcagatcatgactatcaagccgcagtcgtattctgagatcaaggccctctggcaaaaaatgtcagtcaaaaagattcagattcccattgtgttatgtttaaagttggcgctgagctcataccaatcgatctctcacatttcagtatcaccttcgaaaggtccataccattttggcttcgctgtcgaccagctttattggctaccccatctgcttatcccgatttcaaagaagcgactcggtgttcacccgagctcaataagtctgaactgaagcttacatttcaggtgcgtattcttctttttatctccgtcgatcattgattgataggttaaccattcatcatcgttcggagttttttttctctttgtagcaacatacacatgtgctcaatatctgtgaagctatcatgttcttattaagaccatattttgcgagagcactgcaagagctgccgatagatcctagccagaaccgatacggcgaggcttatcttgcagtagtcgaaaggtgtggggtacgtgctttgatttgtcgtcacttagaactgcatggttatctgatatttaatcgatcgtatttacttcataggtgatcatcgcaatcgtcacaagtatatattctatttatcctcaaatcgcgcctcgacattggttcttttgggtcagtgagttttacgttgacattaggcgctgtgcatcatgtgagctgatatactcctttgcttggaaaccggatattaagtatcatgcatcctcagctgcagtttgcatgtcctccttaattattgctgctccccaatcaccattagttgcttacgcatggcagaatcttcagactgtatgcgatctattcgccgaaccacaacaatcaaggtcaacgaaagcctcgctagcactcttgctccgactgcgtcagaaagcgtacgacgttttgacatctcaacaacatccttctgctttctccggaatcgctaatcccaacggctcggataatagcgctagcggggcaaacgagcttgataaggaaacttcgcaagagtttgcgaatgttctagggttacatactcaattgatcgaaagagttcataaaggagcttcacgatcttgggtcatcagacagtcaggctcttctccaggaagggaacgacaaagaaaaacttttcaagagcctgcatacggaggacaatctcacactcaacgagtaagtgtcatccttcactttccgtctctatcgcattatcgttactgatttttgtttccactcttaggaacatgctcaacaccagcaggtggagacagaatcaaacctttcaccgcccatcacaaacctggcatggaacgctcaggacaccgtctcaccggttggcaacgcgcctgaatcacatctgcacacgactgccctcgcctccagtcatctattgccagtaagtcttattggtttaattttgtcttgtatgttatacggtcattgatcggattacgggacaatatatctgggtcacgctgtaaattattcgatgaacaagacaaacggtcccccagaagatcttcggatggatttgacgtcattcgattcgggcactgtcggcttgctcgtatgtcaccctacatcttgataactttactgtcatcctctcaaatgattgacagccagatctcactcattccgaagggcgcactctggtccacaagccaagacgaagtaaattatgactggccttccctatcccaacaagtcgactgggacgggatcagttcaactttaggtcttgggccactccgacctgttcaacctcaatctgctgagcctatcatcactggcgatctcgagtataaccaaatattacctcacggaggtgcgccgacaacaggaccagagaacgttcgagcaaacagtgctggatgaagatcaaaatcttgggaggaagcagatgaaagactatgagtccatcatctatctccaggtatttgaatcgatcagatgtcaccatcattataataagacaaattcgaccgaaattcagagaatgttgggcatgacaataggaccacataaacaattggatacaaatttacgaagacatggtaaaattggatcctgaagccaaaatacgtagtagggaatactcgttaaaggaatcgaggtcacactttctgacgtgaacgaggaaaaggtggacatgaaacgagtccaagaatatgatcatgaagagacttaaaagaaagataggaaatatcacgttacaagatgatggtcggcctcacgcacaacttgactccgatgcgattcaagaggattcacagatctcacaatctgatcagactgaccgttttgttcatctgaaatttccacttcgaccaagcggctaaatgaaaggacttacaatttaaattttgacctaaattatacaaggaggttttcgagatagggtggtgccttaccgcatgatgtatggagcatgacttggaaggcttcgacttgatacgtgctacagtctcgctatgcaaattcacataacggtgcatccggttctggggctcctatctcgttgtgaatcatcagacgaaccatcctgtccgctgatctctccaataggcgtgccaggagcagagcccgctcgccgtcttccactccaagccgtgccggtccccgcggctcgacctgtctgtccggtggaccatccagccaagaaggatcgtctccttccccaaccaccaccgacaccactgagcactgttccaccagtttcagtgagcgatcgtctggtcaaaccggcattctgttcaatccgacgctctagagtctcattctcccgaagaatatctcgtctggttcgatcgaccagggaccgaccccaaaatgaacggagaacaactcgtcggtcatccatttcggaccgaccgggctcagcaggagcgcaaggtcgaacgggtggtgcgtattggaagggaagcgcttcatctattattaagaaaggcaaacttgctagtcagttcttctgtgaaacggtaatgggtaagatagagacaggcgctatcatacgtacatccaaaccaacctcgtcgcggccgagcggctcgttgatattgtttcattatattgaactttgagacggcgcgactaagagtgaagcattcccaaaagtatcaagtcaaaaagctctcgtgaaggcgagagatctgaattgatgagcggatgccgctcgatattatgctagaagacaaaaagtggactgcataggaaaggaggacgtaccagtcggtgatggagatttcggctcctacttctcctcggcaaatacatgctcccaagaactctgtgacaacacgatcggttgccttcgtgttctatcaattggcaggtatttgatccaatatgatagatcttcttgagcatgtcgagagaacagggtgacaaaggacaaagaagaggacgaagggaaacctacatcaatgagaagaacgttcaacttgtcacacctttcaaccacatgcctgagtcctgcctctgagaaccgtttacagccagctagaccgacccaagtgagctcggtcttctctttaccttttgattctccacgacccaagctgtcaaggaagctatctgtcagctcggttgcgtcttccagatcgattcgcttcagctttttgagtccactagtgaaccgtatcaacccttcgtccctcaggcctctaccgacgccagacagatcaagcatctccaagttgggagcaagatctgtcaagaactcgattcctcgatcagtgactccctcacagccggctaaatctaaaagcttgagtgtagcgagcgatctcttttcccgacctatgatcccaagctccttccgggcgaggacgactttagtctgtccggaaagaggttcgttatacactgcttcccaacggacgaatcgatcgagtaggtcgtcagtgagtccctcagaatggctaaggtcaagaatacgaagggcgggcagaccgcgagcgagagcgtcgattgtgacgcggtcgacagtttggaaacccgcaagcctgatctcgcgaatgttggaaggaacgtaggcggaagtcggaggttcgtctggagcggggattctgaagagggataagatgccgagcgtggtcagttgggagcatcggcttacattcagcgagatcaacaaagggatttgggacccgatgagagccagcgtcgagttggagacacaaggcaccgctttgaggttcaaatgagtcaatgtagggctctgagtaagtcgaagtagaagggcgcacacaaaagtaagaccgagcagtcagtttgacaagtaaattgaaccccactatagtgaaagagagatctctttctaaaacaaaggtcagaaatatgcttactttggccaagagattgtgcaaagcgtgttctgaaaaccctctgcaaccttcaaggtcgagcttcttaagtcttgtcaacagctgctctacagacgatccatctatcaggcccgcctccaagggtacagttcgatctctttcatcggtatcgatgggttgtccagcagcagacatggctaacgcacagacttccgcgctcgtgatcttggatagacccttgaggtcgatcgtgcggagaaaagaagatgatcgggcggctataagaagtattgagcccacagaaacagactgcgaggtcgtctttgtttctggcggagatgagggaatgcagaagaaatctcgaatggataagcttggccaaagctctccgtcgtgaatgagattgaaccactctttagatacctatgcgaggaggatgtatatatgttcccagagtcagccctaggagcacagttgtaggcgagagtatgacagtctttaggtgaaaaattgccttaccctactgagccggaccagctctcgccgtcctgcagcctctccaacccatctgttagctttgacacgatctttgtactcgtctgccttccataggtcaagcaacgatctgaacacgtgtaacttgatctctcttggaagaacagacccaaaatagtcgatcggagtccgttcaactggattagtgataggcactggggttataggccgagtaagcgagagcaaagatggattagtcgacacgactgggccgagtgtgatggagctgtttcgggtttgagatttgtttgaaggatcgatcacgcctacagaccgtctaccctcaaactccatggaatccttttctgttttggttatagacaggcgactctcgactacgagccgtgcggatgattctgcggaggaagcatgcttgtctgcaggtcctctggggaagggtattgctgaagaactgatgatgtacggtgacgaggttgtactccaagagcctcgaggtgtttgaggaatagaactggcaagcgatgaaggtgagtatgagaccgaggtcgaaagatgaggtggaagcggagactgatggggtgatgacacaaaggctaccggccgtgagtctgatgaaggaaacgaagaggaagatgaatcagaagacatggcagatgcgtgatctaccatgatgtctgaccgattgagaaaggcaaatcgagataggctaggatggaaaggaaaggaacgagatgagatgatgagatggcgaggtcattaaacaaccagcatggctgtaacgtcttgctgaagaactagagtgaaagatttcgcccgggcagagacgggcagggcacgaatatcaggtgagatcctgaggaaacacaggatgatgcactgcttattgtttaggtaagacactacgaaacaaaccaagctatgtgttaggcatcgtgatagtatgatgtcgagcgagatgcatcgtgcgaccattcttcatagcaagtcgaaggaaaatacatgatcacaagcatgtatcacatagaaaaacctcaagcacacgtcggagaatcttcgacttcatctcctggcaacacggacactcctgatctccagcagagaagaaggtgataccaagcgagacaacatgaagttgatgatctactctgtctacctgcttgtctgattagagctagacaagaagtccgcaagcacagccacattgcttatccgcctattcgagccagaccgctaatcttctcagtgcgatccccagtattccatctcggtccttgccgacaattttgtcccttttccgtcgagtttgaatccggacttgtttcttctctcttctttcaacgactcatacccacgaccataactacatatacaactacatacacacatcatgcttgccacccttcgaccctttgctttccgagccattcccagcatccgagcggccgcctttcacaagcaggcctttgcttcctactcttaccgaaccatcggtatgttttttttttttccttttcatccttcttgtgatcatctcacaggaagcgagaggctttcattcattcgttcgctcactcacaatcactctcttctttttgttgcgcctctgaaaaaagtcactcggtacaccaatgatcacgagtgggcctcattggacaaggcaaccaacttggctaccgttggtatcaccgattacgcccagaaggcacttggcgacgtcgtatttgtcgagctacccaatatcggcgagaccgttgcccagggaggtaagtatttacatgcttggatgcttctttctcttcaccgtatgcatctaccaccgagcgtgttctcatacttcttcctggtcgttcttttcctcagatgagtgtggttcaatagaatcagtcaaagctgcctctgaggtgtacgccccattgtccggaactgtccacgaggtcaactctcaactcgacgattctcccagtttgatcaacaagagcagtcaagagaagggttcgtatctttccctcgtctctttagcattctctctcactctgaatacacccttgatacaacggacgctcatatctcatctttcaacagggtggctcttcaagcttaggctgactaacccggaggaattcgaagagcttttggatgaagctggctacaaggccttgaccgattaaacagcaattgacctcatctttcaacagatttttccagcatacttcgcgttcatatttcttgactcctttctatatcatctttttttttggggggggggcaaaagaggcagaagagagggagagtagtatatctttcatcatttctaattcagttgtaaacaagaaaattcccatgtgtttcggtgtccttttctatcttttctttctttttgagagtttgcaaccttcttggttttgtcgagagctcacgtaggtttgaacctggcggacataaagtacgcgtttaccgtcttcagtgtggaccgagtagggtttgccccaggttgactgccgaagtagatgtcgaaaaaatagtccgtcagcgtattttcgccagcaatctataatgatagtcgggaggatgacaaacgcgttgatgatccactgcagtctcttttggatcgttgctttcgataccgtctctgttatgcgcgagtatatacatcgacaagatggccaggaatcgtcaaagtttttagcactttattatctctaccactcttcgggaaaaaaaggttgacagcaagaacaggatgagtgtgccttacctgatgattgaccatccgccaatagttctccagaatcattaaaaaaggtttgaaggagtactattcctgctccgacagatatatcctttccattctcacatcccaaccagatctctcccccgtctgcccaaatgggcttagcaaacgaaacagcttggttgaatagagtctgaaggtcgtctttgcctggtctgtggtttatgacaagcgacggcaccgaatgtgacgagccggaaggagacaaatcggagataggaggggaggaagaagtatagatggagatagtcggaaggcgagaagctggttcagataaagttccgataaacagatttcgagtaggcttcactatcacccctcctttcatccctctctctgactcggtcaccgtccttggagtaacggccgctcttcgtgcttgaactcttctccttacttcaagctccaattcgtccctttctaaagccaaaagctctcctctccagacccaccaatcacttggtgacatacccatcccccaactctcatggtcgtcccctgcgccttgatggtactcccatccacccggtctccgtctatctgtgctatcttcgatatactccgatgccgagagacacatcacagggtggaatcctagctcggaaggagaaggtaatgacggaatatgatatagatccaaagtcgacggtttatgaacgaagatcggtcgaagcggatacttcaacgaaggtagctcaagggatgaagcctagcagacgataccttctatcaaagttagtcaatcggatgttatcatgtttgaaaggagttataaggtaatacgcaccaaaagttttgaagcccagccttctagaagagcttccattcgactcttttcggaatcactgacagacctcggagacacgtagatccttcgagcccaatcctcagcttcggtctcgttttccgaagtcccagcttggaacggtccatctcgaacaataagtgcccggtttatagttgcgcaccattgaggtatcgtcttagaaagtgcatcagggagacgctatcgaatccaagtcgcaaaaaaaatgttcatggtcagattgaactgagaaaagtcgagatcgagattagtatcaaaagttcgatgacctactttgcctcgacgcgtcgaatcaacgagaattatcctttatttgcgaattttcagaaccaaacatgagttagtgccaggtgtgccagtaaacgcaacgcggagttctcatcaatgtgaaaggactgacccgcctcgttcagaaatcaaaggtaataagtgcaagtttgacctgcgcaggctaaaatcccattggcctccataagaagttgaattcaagaaagaactggtcagtcaggattttttcgtgatgatctcgttcgaacgttagccaaccttcgtggccatcttgtgatttaaagtaagctggcgtcgagggatgagcctgggtaaggagaagtgaggaaagaagttgatcagctgtacgttcacaggataggtggcttaggccaagctctagagacaaacgtacgatttcaggcggacagtaccaagctccgcatcgcaaattagctattcgtccaacatcctcacatatacatcaagctatgtcagttcacaaatactggctatatattgtcctcgagccaaacgaccttatctcaaaaagacaaagattcatcattgacccacctactaacggaagcgaagggtttgccagagagacttcttcgacaaatttggcatcgtcttgaatgcttcgtagtctggaatagatatcattcgattgtttccgaattgctttcgattgggtaaggaaagagtcttccattgtaagggtgtgacttatcaaaatgaacaatggttaggtctacagttgatggacctcaaatatatgttagggttgtaaatctgcacgtgaccacggctctgttcttagcctcaacactaccaactgtgagaggcatccgttggcttttttagggtataacttgatgtcactgtgtgcgtatccaaattagagctgagctaactacgtacgatggttcagaggcaatctcatcatttgttctccttgcaaatgatcactcagcttgctcttggagcaatcactgactagacttatgcacgcccaatccagtttatatctcgattcttactttactctccgagctgatcacctcgtgcaactatagatatagcatgtctaacttgatctgaccatctgatcaaccttctaacttattatcaatctatcactagtcttagtgcagaagtataggcacagatgataggatctgttgtgcctagggtcgaaacgacggcccacctcaggtaccggaaggacacgacgagtgagagtgaccgcgtcccaacgttcctcgtgacacaaacggtttctatcttttctgtgtactcaacagaagttgtctactctcttccatcctctttgtctctgtcgtcgtggataggctatccttcttttctcgagagaccatctccaagggttctccccgattttgggatcaaacagggagtcgtctggccggtcttcactctttgaaaacgcaagacctttcccgtgttttgattttctcaaacttgtcatctgattttctgtccatcaaacccgtcttctgaattccaagaccaaccgcttgcagataaattcgttgccaccccgcatgttgatcgagactctacccgcaatctattcatccagaggaataccaacgaacgcttttatctattcaaggcctcccttggtataagaaactttactcttctctacaacacaagctttcgatcatcaatcgttcttgttccaactcatttccccctcctcaggaacctgtactccgtccacttaacctacacctataaaattcctttctttctatccccgcacactcatcatgactcacaccattgaatctgctcaccttcgaccatcctctctggattcgactcccgttcagattctttcctccgccaagatggtgcggcctaaacgcgcttctcttcccgattctccaaggctagtcaaatctgggatgagatcgttttccctcgatgcgccggctgcctttaatatcgagccatacgtcatagaaacacccactcgaagtctagtcaagatctcaaaaataaatccaatgagttccctaaaccagaagcatcaagattgtgccgaagtcacactcgacgtgcactccagcttgattatatctagcatgccacatctggcggaggagcgtaacagacagagagcccttgcgaaccccctcaaacggcttcgatcgagtatcggacggccctcagtctctagcttcagtataagatccaccggtggttctccgatcaggcctcaggacccgttctctccaaaacgacttgctatcgacaaagaaactaatctttctgtctccttccctcaaattccaactctttcaaggcgggagatagtgatcaaggaaaacaaaaaacctgatgtcaaatatgttagtgtcagttccaagcttaaatcataattcggacctaattttctattttccatacaggttttaggaaatcgcattggaaaggggcagtttggaacggtctaccgagcgctcaacttcgcgaccggtgagacggttgctatcaaacaaatctcattggacgggctaaaggagaaagaggtagatcacctcatggaggaggtcaacatctttaaaaggttggatcatcctgcaattgttaaggttagcggacacttatctatctttgtcaatttgctattgagagacgccctgctcaccattgatccttggttctgattctgagcagtacctggggatggttcgagaccgaacaaccctcaatattgttctcgagtaagcctctttcggcactctttctgtttcctgaaacacagactgacgtatcggtctgttggtcaaaagatatgttgagaatggttccctaggttcgactatccagtcattcggaaaattagatgagaaactcgttgcaggctacgttatcaagattctcgaggggttgagttacctacacgatcaaaaagtacttgcgttctttcttcaggtattatatcaggcgactgactctgctcttattctgtgctttaaccaggtcgttcattgcgatctcaaggctgctaatatcttgacaaccaagacaggcaatgtcaagctaactgattttggggtctctctctgcttggcgtctgttgagaaaacgaggagaaacgatgtggccggaacacctaattggagtgaggccggacatttttcttttgcaatccggtttgacacatgtcttaaccacttgttgtgttttatctcctcacgttgtgtatcaaagtggctcccgaggtaatcgaaatgcagggtacttccacggcttctgatatctggtctcttgggtgcacgatcatcgaacttcttaccggaaaacctccgttcgctgagatcaagaatggcttagctggcatgttctatcttttttatattgttttcccatagaaatccttcggactattacctaacagcagtttgcctttctttctcatccatcgtaaatatagttttgtaccatatagtggagggaggcccgccagagatccctgaaggatgctcgaccgctttggccgcttttctatctcagtgttttgagaaagacccaaccaagagacctacagctaaatttctcttcaatcatgcatggcttcaggagcaggttgaaattttcgaggtgcgcctacttcttctgtcacctcagtcttatcttcatctatgaaagtaatcaagcttgtttttggatctatgaaacaatagtcatccaataaggacagcatcccgtttttccgtcgactaagtcttgatgtcgcttcaccgactaagacgactcgatggagatcgccttctttaccagatctcaaccccttgaatgatacagatcaacacatccgagagcctctgcacaccctaattccgaaagatcctcttctcgcccctttgtcatcgttcttgaatcgtccgccccgttacaaatttatcaagtggattcagagacgttctcgacgtctttctattctttcaaccaagcgcccgatattgccttcccgaaactccaacatctcatccagcgatgctttggacgaaacttgagttctggagacgtcatcgaagacaaagaacacgagctagttgtctttatatcaaattattttggcatttttgactttctgggttccgaagccactacgtggtgtgaagtttggaagtaaagtgcaataagacaagagaaaattgaccggaagcaagggatcagatgagaacctggtctaactcaaattccattatttaagacaactgcctctctgttcttacttccttttcactatgattccttgaactctttctattcaacttaagattatattttttgctcctcgaagacgcagtatcggctttagtcgtctgaaccactgttgtttttgtcttcatcactgcgatgtgtcagtttgagggcgactctacttttcaattctctggtttagctgcagttgtatatagagccaggcaacatattggacagttaactgaacagacaggtcaccgagacagaaagttaagaatgcataggagatagatccaaatttcttccgagagaaatgagacaaaaaagggcaagttaagccaacgagacagctgataacgatggctgctccgttgtgatgtatcggctgaggcagataatgaaagaaccaatgtgcaacgtcgaattggaaacgttgagctgctgactagggcggagttaatgcgctatttcttcgaccaatcagaagcgttcaatttgcatatcggtcatgccagtcatacatcagtcttgggtttaacacgcaacgactgtgcctgaatttcacgtcaggctcgaaaccggtccgaggattccggtagaagaatcgtatatattaccgggcgtccccacttcttgtcttccattttgtttctcagactcttcatcttccacacaatcaccaacactcaaccaactttctctgatacattctcgcttatattaataatgtctgccgtttccctcgcctcccgaaagctctcttacgttcgttcataacttttctaattgaatgatacttccgtatcctgtatagctaacgtcacctcgcttatctcttatctattgccctcaatagaaagcccctgcttgtgctctccttgaggaggcctgtgaagattgcacttgtggaaaggccggctcaaagtccggatcgatctggaagcttcactttgtaagtcacatctgtttcattcaattcgtttgatagcacgccgattgtgtgcttattccttcatggatggtctttttcgattgatctgcagcaagaggaagattgcgccagccgagtgactccttgcaatgagaagtgcacttgcgagaggttcaagccttacgccgctcctgcttttgtgagttttacatctttaacatgatcagtattttcacattctcatcctggccttttgctgtcacgattagaaatccgagccttgcgtctctggagaggttaaggtctgcgagggatgcacttggtaaataccatatcttgctctcgattgaatcaaattcagagactattgctaacatgctctttctcattctgcaagtggtcgagcccctcttgcctaaaagatgtatctcgattggttctctttgcctatgattgtctcttcacctcacatactgtacacccaatacgtttaacaccttctctgcatattagtgaatcagatctgctggttgtttcctactcaactcttaatttattgatatgacatgtcacccttaagtacatttacgaataccacctgatggtagtacgtttcaaaaagatgatgacgtcacccgtctcaattcgctttggttacgaaacgtggtcaatgcttgtgattttcaatttcttctttcaatctctggcgatcaacatctcttgacaacctaaatatgactgaagctctttctctccaatcaaccattaaggtagaactttctgcattgatatcgacttgagtcgtctctttcgattttactttctgactcttttattcgttccagctcaatgatggggtggaagtccctgtcctcggactcggagtatatgagatgactgatgaccaaacgatccaggccgttacttgggctcttgaggtctgtcccatctcgtatggacgtgaatttgcaaaaacaaagattgagcagacttgtttcgcactgttataaaaactaaaggccggtgtgaggcatgtcgacactgctacttgtacgttcttcctctgatcagattgtggagaaatccatccgcatcgatattcatgatgagtcttacatctcctgggcttttgcatttagggtatgaaaacgaaactgcttgcaagaaagcaattgaaggtttccttaagaagagtggcttgccccgatccgacgtgttctatactactaagcttagagagcccatgccatatgaccgagcgctcaaagcaatcgaatactccgtcaaacatgccccgggagggatcattgatctttacttgatgcacagcgctattggaggaccaaagttgagggaggaaagctggaaggcaatggaaaaagctaagaaggacggttacgtgaggagtattggtgtaagtacatgttgttcttcgccaatttataattcgcagttgagcatcacagcttgactgactttattccactctttctcttcctattctatcctaggtctccaactggggagtcgcacatattcaggaacatatcgaacgtgtcaaagacgactccaagccggactgcatcagtctgccttcgttgaatcaaattgatcttcacccgttcatgacccggttcgtgtctttcgttgtttcatcacgttaatcattctgatcatctgtatttgtgtatccggacaactaaagagagccgattgtcaagatttgcaaggagaatggaatttatcttgaggtttgttgaaaccttctcttcaccggacaacgccatgaacgtgattgtgactcaacatcgaggacgttgtttaatcaatatacatctctatatttcatacaggcgtgggctcctcttgtcagaggacttcggttcaatcaccctgtgatacaaaagattgccaaaaagcatgatgtaacccctgctcaagcaatgattcgttggtctttacaaaaagttcgtgcgggctcttcctcctggtggaaatagccttggatatttcctgctgaactttcattggcctgcatcttctccttggcgtttgcgttgtctgatgtcgaaatctctagggctttgtttgcatccccaaatctgtctcaaaaggacggatagagtcgaataccgacgtctttggctttgagctgaccgaggccgagatcaatgagatgagtgggctggatgaatatctcatcacagactgggatgtaactgatactccatagatacctcttcgttaaggtacggatatgtacaccgtaaaggattgagatgggtttcatcattattgaatcattctaggcaagcgcaccagatcgaaacagtgtgaaaaacactggccagacgaaaatatctatttgcgagatcatgaattacttcagtcatatgcttgaaacgaaatgtacttgggccggccgctggtcggccatcgggagcccgacaacccgagattatgacgatcacagtaggaatgaacttcgtcacctgtattcatttttatcatctctctttcatttgtcgaccggcatgatacaagtatttacatttgagcacaggttttcccaagaaccgtccttctcgcaacagcaggataaatctgtcagagaaggcagtgcagtgtggctgaaggtagaacacgttttatcatatcttatgccctcggtggtcatcttctacaagcccgaagagccgaagatgtaagtcgaagctccaatggttatttttaaacactgaactaccctaaccatcttcttctcatatgattatggctgttcaaagccatgccgataccatctcaggcagtataccgactgtagaagcatgcgaaagcaaagcgaaggacgtgttcaagctcatcaaacctatgggtgacagaaacaagcttctgttcgaaacctctatataaactgtggaaggtcaaaggagggggtgcctgttttttccttgaacaaagcacccgttcagcaagtatctcatcatttgccaaccgacgagttccccagtcaacagcatcacagccatgtcatccatttctgctcaggaagaaatgttgagcaagatcaactttctcgggggatatccaacatcttccgatttgtcaccatctatcgttttcctagtttgtgtaattgctctcgaaaacatcgcttgattattcgacatggcacatgcaaggtgttgacctgttcatacctctacttctgcagtatgctctcctcgctccggtcttggtctttcgtatgaccagaaggtccgatcggacgtggatactccttcggcctgtcatatttcttctctgtcgatttggcatgctggcactccgggtgtacatgtccaagaacacttatggatccggactgttgagtgagagatatgttttgttgatgctagtataaaattctttggagcgtatcatttgtttgtgctaacatgccgtatcccatcccagtcgccgagcttatcctcgtctctatcggcttcctcttcctgattgacccaattatcaccatctggaaacgtcacgtggaatctgtcaccccccagagtcaacatccgagatgggtcctacaactctctcggtgagtctgatgaaagatagatcgatctgacgcaagcccattctgttgctgaaaatcactctacttttcttcatcgcctagcatactccgtatcctactcatcgtatccatcgctactactgtcgttgcatcttccctcatcagttccgctctcagcaaacctagtgtgatcgacaacgtcagaacgctacgcaaagtcagcgccatcgtcactctcagtaagtgcaacatcatgtcatactctcttgctcaaggccgcccccagacacattctgatcttttgcaatccaaaaagtcacgatcgtcatccttctgtttgctgcgattcgtgtgaacatggcgtttcccgtcagccggaagggaacagtatacatagtggctgtaacgatgtgtcttatggtcatcgccgtgtatcgtaccgagcaaacgttctccacaggcaataccaactctactgctgcacgcgcagcattttggatctgtcagatgctcttcgagctgtgagtccaaatcggttttatccatggatgatctagttggctgatactgtttttttttttgttttttttttgcatttctgcagtgctgcattcacttcactcctcgtcatctcgatcccgacgtggtttcctggtgatgccataccgtcctcgtcagatactgagatggtcttgtctcagagccaaaatttcaaaacgcagtccatgtgaggagcaaagagttgatagttatactagaatgatagaagctcaagtaatcgcccatctacaaatattgtgacaatgcaaatgctctctgagtcccaagcaactaatagtcttgacgatacagctggtacaaagaaaacatctgcaacgagaagaaaaaggatggaaacatatatagaacgagagaacgggatcaaaccatcaccacaaccaaacaaccttcttacattgtcatgagcttcaagtccagtacttgaccttgattccagccacatcagttgagaagttcacctcgcccttggcggtgtttccgccggcagtcgtttgaagatatttattctgactgttgcgcgaaaagatgtgcttctgtcgttcggctataaagagatcacatacggacattgttagtctataatgaccagttactagactatcggtcacgaaacaacgtcaaattttctctcccacccaggctgtagaaaaatagatgcaagtatggtagaaatactcagcaacacggatcatttgatagacgatcaaacgctcaatcatcaaacggtaaagagaggaagaacctacttttgacagtgataggggttttcatttagggttagggtcttagattcatagatagttcttttagcaaggtctggttgtagcgagcagaaaga

SEQ ID NO: 507 - DNA, 369 bp, Xanthophyllomyces dendrorhous
agagggtcccttaccctctcccagtgaaagtcatagactttcccatgcctacatgaattcaccagagatgtcagagacctctctgtctataactctccttgtccctccgaggcgacgggaagcctgtgggcagacagaagacctttccccaggcttatctagcctcatgtcttcatgtctctatacctaaaagaggctcccttagcctctcatgattctataggagttccagactcctctaacgacttcttttctaaagatccttttgttgccgcaaggtatcgcccttgcccacacgactcctctctagaagagtcctcgacgtcacatgatctttccgagactcttctagtctaacgacctcttttg

SEQ ID NO: 508 - DNA, 1007 bp, Xanthophyllomyces dendrorhous
ttgccgtatgaatgaccgttctttgtccacgattcggggatcaaaaatcacaagtaacgatgagagatggcaaacataggtgagaaaacaataatgacgctcgtagacaatcaacttgtttacagattcaacacaggatagcatttaaactaacacgaaaaaggggatcaacgcaaatttgtttaacagaaatgaatatgcaatacaaatcatcatgcagtcattgacattgatgccacccgatcgagatcaagtgccatcagatgtgaacgatcaatattgtcagcatcatcccgtcaacgctttgagtccaatgacgccccggcgaagctcgatgtctgtaacataatttatacctctgatataagagcggctgtcacatcacggaagatgaatcatcgtcagcgatagtggtgatatgttgcggtcaacccaacaaagtctggacattcaacggtgaacactatcttttgttatgccgtgttctagcgaggtatctggtcagcagggcaactatggtatgcaaacaatgtagaccctacttcagtgtatgccgaagagactaatgaatattcgacatcaataatgaaactcagtgatggccttgccgatatctcaatcaattataggttcagaggtataaacatttgtcaacatttgtgctttcaaatggtgatgaggaagatgttttgcctagtaaaacagaaagcttttgcaattacaggtattcgacaagctcatatgcgtgtttatgcttgagacaacatgaaacgttcggcacgctgataatcatcttcagcatcctctaggttttcacaggctggtgtctcaattgttgattgctgaatttgtgctctctgacgcccggttctccagcctatctataacgaacttgtccaatgttggcttgctcaatcattgctgtcaccggggcacaagtacttgtctgattagatgtgattgttgtctcttaatacaaaccgttggtatatcacctggaaccgaac

SEQ ID NO: 509 - DNA, 390 bp, Xanthophyllomyces dendrorhous
aagagtagggccccgtcgaaagacagaaccccgaataaatttcactaatgatccttccgcaggttcacctacggaaaccttgttacgaccttttacttcctctaaatgaccaagtttgagcagcttctcgacgatagggtgccgttgccggctccccaaagccaatccggagatctcactaagccattcaatcggtagtagcgacgggcggtgtgtacaaagggcagggacgtaatcaacgcaagctgatgacttgcgcttactaggaattcctcgttgaagagcaagaattgcaatgctctatccccagcacgacagagtttcaaagattacccagacctttcggccaaggaaagaaactcgctggctctgtaatgtagcgcgcgtgcg

SEQ ID NO: 510 - DNA, 362 bp, Xanthophyllomyces dendrorhous
accctaccctgaccctggaccctccaccgacacactcctcggccctctgacacaccccccttaccgccctcctgggccatgtccaacagagacaatcccatccagtgtccccactgtgacctccgcaccactgccctcctcgaacacctccggaaactagaccgcccaaacagatggacaaacgcctctcttgctggcaccggtctcatcgcctgcagctgtggctttccctgtgctagtcaacatggccttctcacccatatcgccaagactcacaagaaacaggacccttttgctgtccaccctgtctcttcccattccctcccttctcagcctgtgccctcccagcctcggtcttccca

SEQ ID NO: 511 - DNA, 7699 bp, Xanthophyllomyces dendrorhous
gaacaccgtgtcctccggtacgactatgtagtccatcagtggctgatgttcctcattatcgcccatcagttccattgccctggaaagccccagttgagttctcacctcacgtccgcccacatacagcttcatgtcggatacacggtagaccaggtcgtcagcgtcgacgtcgtaagcgcccaccgcttcccagaactcactcggctgtagctctctgagctcagctcttccacttgactgggcaacgagttcgctcagcgtgacgccccaccccccataacccccacttgcgtatatcaaacagcattcgcagttttcgtcacatgcgccttcgtcattcggcctcacatatatctcatcgtcgtattctggtttgtatttcctgttgggatactcgagcttaggcatggtactggatagctgatcggaggtctgccataaagacaaacaagacagatctcgatcagcgaagatgctttgcgcgcacgtaccggccccagagggagaagacgtactcaagggcaagggtgtgatcgatagatcagaatgaaagctcgagaagaacttgagatgatgtgagcgaggcaagatagagcaatgacagtagatgatggaaggaacagagatggtgtgagtcagaagaaaagcagtctgatgaagggtggcggcttcatgaaaagacatgccgaaggtaaagcaaacgaaatgagtcactacgttgactttgtttcgtcgtcctaacattcttcttcccacgttctctttctcttgatctgtgcatctttttgtctgtcacgctctcttctcttccgttgtttctctctcttctctttgattgatctctctttcttcttgatgccattctcattctcattcctttcctcctcaagctaggtgagatgcgcaagctgacagtagcgcatgcgatccggatgcacaattcacctctctctctctgtcacacacacacacacacacaaattctttcgcttcccatccttctcactcttcgtgtcaatgatctgaccgaatgatatatattgcctgctcgtgcataccatctcatcaatatgtgtttctcaccttgcacacgtttgtgcttgtatgtatccttactgcctgacactttgccgtgttacaccctttcctccttgcatccttttccttttatatccatgcccaggcgacaaatagatacagatacctcgttgttttcctttacaatatagtccctctctcttttctctcttgtcctcaagtttggattctgtcatccttgttcggaacatccgagcctgaggcttccaacccatcgtgacagcttcacaatcaaacctgaccaaaccaaagacagaaacattcatcgtccatcttagtcgcaacgcatcgggcgccgggctcttccaccatgacattgattacatatgatgctcatattccaagtatggagtgatatcttcgaagagaaggagggagaaaagtgaaaagcaagcatagcgttttgtgtgaatgaaggaaggcacaaaggtgagagaaagaagatagcttgatatgtgatgtcgctggaataacatggatgtaagaagtttgatatatgtatatgtaaacaaaagaaagcttaagaaaagggaaagaagaagaaatcgaacaaacgaagatctgcagcacaacaagaagaacacagccaggatgagaaagggaaggtgatgcgacgagggaagagggaggtgaggaagtcaaaacatgaaagtgtgaagagatgggcaggcagaaaggcatgcagaaagataccttttacatccaaagaaagggtagctgagaagaaaaaggaattagccggctctcagcccggttttgggaagccagtttgtatcaaaccatgacaaaaggatatattgcctcgaacgtcgatatcttgggttgagccaacatcggccagtgtcgatgagatagtccggctgagtgggtacttgttcgtttattgagatgtggccgatacactctgagcagcaggaactgttgagcattcgttttacgttcacgcatattcacacatcgtctctattgacggagcaactcaaaaaatcgggtctactaaaagaaaactcaaactcgccacgttggttatcttgcacagtaagtcacataggccaaatctatacatacattcatatcccagcccatccctcaaagcttgtatcaaccttccgaacttctgccaaagtctccgtccagagcttgctagagaaatcactgcccgctgacgtctgaagccagggcgtacccctattgtatcgcatgtcgatgaaggtcgtgagctatgctgaaacatatactctctttagggaaacgaatgtgacatccggatcgacttgattattggcgatatatctcccatgagtctctgcatcggcaacctccgcagcatatatataagtcctcgcaccctcctcggctgttctggccatgatcctacgagcaagccataggatctgtttcaagccgaaaggaagatttttgtcaaagtctgtcaggcacattccgggggtgacgttgttgatgatgacttcggaagctgggacatgcgtagccaattgctcgacaaaggcgacgacggctagtttactgtctgggtatctatacattttcgagtacttggtcttatcgtcgaagtgaccatatacggtctggccagcgtcaattccaactttggtaagagaatgactggcatgcatctcaaagctgctgatgaccaggcgagaggccttcccacggacggcgctagtcgcgcggaggagaggaagaagttcgatagcaaggataaagttggtccagcagttgacttcaagagcagacatcgaacgatgaatacatgtccctagtgttctgaaagctcgcgtgatatgatgagcttactttgcataaccctctcgtggccgcttttgcttgtttcgtatctcatcaagttgacgcccacattcaagaggagcaaatcaagcaccttgagctcagtagtcaccttgttcgcgaacgctatggcgctggagtaatcgtccagatcgagcgcccaagcctcaaccttggcctcaggattcttctccttgacctcgggatcgttcttgagccgagagacggcgtctacgcctcggataagtgaacgtacagcgataatgacggagccggcacccagaactaagagttgtcgggatgcttcgaaaccgagtcctgcatttccgccggtcacgataacagttcggccagcgatggatgtattggggggtgtaggtgggatatatgtttgaaacaaggtcataattgtgaatgtgaacgtagacggactgatgtagcacaagagatgaagacaggtcggggaagatgatttcctgatgagagagatcataatatatctgttcatatcccatctccggtgaaactactcgaattggattacacatcatacgtctgagcaggaagtttcgatacatctttcggtcatcggcgtgctcgacgtccgggaatctaatgcccggacgaaagtcttccaagctctgtcgttcttccctgtttctcatctgctttgtcttttaactggacatcgttcgtatcatcaatcagcctaaaatgtctagaatgaggttcaatcagcgtcaagtagattgcttcggtcgatatcatgagaatctcgaccatggtcaacgttttttcttccccttttcagcctgttctctcctgcttcctctccttccatatttgttcgggtgttacccgtcatggatgtacactggctttgactctttctgtccttccttgtgttcccttgttctctcctaacttggtgtctcgatcaaaggatagttgtcaaggaggacaaagggatggcgtatgtgctgagaagttgactagctgtctgtcctcttctctctcaagcttgaaacctttttaaattctcatggtcccctatcagcgttatcattctcctgactctgcaatatcgcatgacctcttccttattcaaagctcaaattcactgagtacttttctgtacttggtccccgcctgagtcctctacatattcatcgatagcttacttctcttccgtaaccagaagaatgtgggtcttgtttatagcaacgagtcgcgaatctcttgagactttctgccagtgatctgtatgacggggaccagcttgtggaaactgtctgccatatccgcgtcgaaccgtgtatttgcagatcttgcaagcctgtgaagtagattcaccagtgctgttgtgatgaaggcaaacacaccaatcctcacctagcatgcttctcgttgagcttaggaggtatgaccacgactatctgacgagccgtatcgttcatcgccatcgcgctcatgctttccgtttatcgtgagaacactagctgtacgagcgtgtgtcgtacaggttgcaacaccagcccaatgcttgaaccctatcgatgatgattgatcttcattttgcaatccacgtagcttgggttcaagagaagatccataaacccctagatccatctttgactggctccacgatcgggggcgcagccatatcatgtgatatatggtataatatatcatcgatacttcatagttgtacaaaagtctttgctcatcatgtagcttttagaaatcacaactctatcataacccctcactttaggtatccaatagggagggtattgactgagaagaaatcgagaatactggggttcgtcagattgtaacttgccgtgttgtttggtgctccagatgaatcgagccccaacgtcgtgggccaactgtggccaaggtctgaagtagtaaaagcctcgagtacggcattacattgccatacttcctcagttgcattgggataaggatggatcgtgtaggttggatcgggaagagatccgttggaataacaaccatttcgtatggcccattgacgtctccagagagaaacattgattgttgcggtgccgactccataatctcccgttgctgagacatttcgaccctcaaaaggaatcgtttgatcgactacaccgtgcgagttgatgataggtaccgggcgagaaggatcacatcccgagaaagcgagcgtgccgttatacaaagcaggagagaccggagagaccggagcgaaagcggcaaagagagtcgacgtatctgggcgacatgctagatacgctgtgaagcctccgccgtttgatttgccagaagcataaacccgaacggggttgatacagtagtgtgaagagatgtcggcaacaacgtcttttgcaaattgtacctggatgatagcaaggacagaggaaagcaaaagcaaatcaacacacatacattccaaagaggaaatacaaaaaatcttacgtcatcgacagtagtatttgcgtatggcgcactgtaccacactcctgtcctcttctcagcagtattgtctgccccttggggatatgccgcaatgacaggaagtcctccaattgctatgccgggcacggagaactgcgatagtttttcctggttggccgaggtgcctccagctgaaaagaaacttcagtcagacgccgcccgttcatataggaatgacaaaacgctctcaccaccatgaaagctgagtaccaatggatgtgatgcattggaatcgtagtttgaggggacgtgaagtaggtatgtccgtccgctgggaagagtacgatttagatgtcccgtagagtcgagtttcaagccctgggcattacagcccgaagaagaatagtagaatgccgaatttgaagcttgcgctacttgagtcaaaaaaatggctgcgatcactgctgagaacattgtagaagacatggtgagtttcctggccccatcgtcacaccagtcgtccaggatctatatacggatcagtatcggcgatgcccggctccgagatcggatcctcggagtaaattcgacaatgagatatgcttaaacaagatgatggaagcaatcaactcagagacatgtatggagattctaaaagggacatgtgaggtgtacggcaaatcggacatacttgtatatgatcggttcttgaagccgggcaaaagacaattcagaacggaggtatcggcttaaagatgatccaaacgcgggttgacatgagatcagctgatctaagtctgcaagaaataccttcttttttgatcttggattgacgggatgattgacttacaacggatgaccctccgctcccaagctatacatagagcggacttgcatacttctggacaacagacccatgtcgaacatcaatgggtaccatgtgaagacagatgagtttgatgaattctaataatgatcgattagccagatatcaggttcacatctgttgtgattccaatgagaaactcgattgtatgacggtttaagaactcttctttcataagattgaggggacaaaggaagattttcccataggaaaaaagaagaacgcaggactgtgggagcattgagaaccatgtccttgtgtcaaggtttacaaacaggtagaatttcagtcacatctctgactatatgggcatgagcagcacgtggctcgatcgagcaaatgatcccaactttaccttcttgtttttttgtctttgttagcttatctatgtaaccgtcctatcttcgtctgtaaactgcaatgccatcgctgatggccatcatgtcaatcttcatcgtgaccgatgactggccgaagtgatcaatcgggatcgttgcaaagagccaggaatgatttgatagtttgtaagtcataaagaagtcggggtgatgaggacacattttgacatgtagacaatcatcgggtgcctttaccttaatgacttctgctagctcggaacgtcgtaagctttgcttatcgactgcataagggctagtcatgttttcgaacagcggcagtctggctcaatggggctcgcagtggtcactctctctagagtcttgaaggtgccttgagagaatggaacaaaagctccgaaaacaacggtcgtggacgaagaatgatacggaagtgtcgacagctctctgtggtgagtgtttctcatactcacgctaattgtgcagacggcattgctcacctcgatttctttctttggatccttctccgttcaaaactgccagtcttgatgatctccgcactgctgtcaatttgtattctcggtcttacttatggctctccacgtccttcactgcccgacgccggagatgtcaacgctggggtgcgcacatcagccgtgaaaaagcgtttcacaagctggcacttcgtctgccacaatgacatccacgtatatttgtggacttcggagatggcgccttctcgtagtcttctcgtaaccatgctcatggtcctgtaaacacgcagattaccacgctgagagtctcctcgccgctcaaggttcgtcaagaccggaagttccagacatcaaggatgtgctccgagtgccatggtgggttcttggggaggagcaaaacgtgggcgtcggaaaagtgttcgaagcatctgtctagtaagtctgatgtgttgaaaatttgttggatttctcaagatagtgcctcgagtactgatcaatttccctgtattttctgtgctttatgctttctctcagacgtggtggaactaggttgtcaatgcgtcccgcaacatgctccacctggctctgcgccaggtggagcacaacatgag

SEQ ID NO: 512 - DNA, 6296 bp, Xanthophyllomyces dendrorhous
  misc_feature (140)..(149): n is a, c, g, or t
gtgtctccctcggctgcctcgtccactatgaggtcttcagttgtctcgtccagttgcagcaccttggaatagccctctgccagtatgttgcttaccacgaccgtagcatcatcgtacatgcttgtgaccggtgtgccagnnnnnnnnnncgactatgtagtccatcagtggctgatgttcctcattatcgcccatcagttccattgccctggaaagccccagttgagttctcacctcacgtccgcccacatacagcttcatgtcggatacacggtagaccaggtcgtcagcgtcgacgtcgtaagcgcccaccgcttcccagaactcactcggctgtagctctctcagctcagctcttccactcgatagagaaacaaagttgcttagcgagaactccctccccatgcctccccatgcctcacaacccttccacccatgcaacagactgcaatcgcagttgtcgtcacatgcgaactcctttccgggtctgacgtagatccagtcgttgtaacctggtttgtatcttctgttgggaaactcgaccttccgcacagaggctgacatctgaacgaaaggtctgccacaggatgagaacaaaggtctcggtcagcgaagggactttgcacgcacgcaccaggttcagcgaaagaacacctactcgaggggagaagtgcgaccgaaagaccaagacgaaggcctgaagctgagagccgagctgagatctgcgaagagaaaggagaagagggcgagccaaagaccaatgagaacagaagcgcgagaagaacgggggatagtgcaggccaagcgagatggcatagatacggtaggtgatgctgggtgatggtggaagatgagaggtaagagatgatggaaaaggaagaaaggcgatctgatgagaaggacatcggatgaaccggaacaacggattgccacatcgagtttgtctcttcatcatttcgttctcattctcgctttctcttctaacccttctactgtctgtcttcggttcttcccctttctctcttcttcattccttccccttttcttttctctacttatcttgttatcgcatctcattctgttttgttttgaacagattgctttaccgaaagagaccgtgaatcagactgtatgctcctcgatacctgatgaagcctcatccctaatctgagcattatgtgagagtaacacatgcgaaccggatgcacggtcttcctctttctctaattccttccctcctcgtccctcatattccttcgcttcccattctcctctatcttcttctcacctttttggactcacaatgctgatgaccgccggccaccggccaacggtcgctcggttgtgctgtaccggccggatggatgagtgtttggccagggcatcggatgaatggaaagaaagttcgagcgccaagaaaagagcccgagctctgatcacagatcccgatgttcggtccgaaagataaacaaggagtaactgctggcaactagccaatgacaaacggcagatggcggatttggccgagagagttggtaaaaacgtgccgacactgttcggaataaaaaccttacatcagccacaaccaactcgacctacaccacggacaaaactgccctcatccatctttgcctctccacttcacccattgttgactgcccatcttgctcactgttgaccatccatgttgaccactgttgactttgtaacagagttcatcgctgatctgccgtcttggctcatcgtttgtcatcctttacgtataagctgacttcggcggccaggactgtttacggtcatcgtccatcgttcctccttgctcgcttcccttctatcttttatcttaaaaacttttctcgtcgggctcatcgaatgcttacccagggctgtctcgtagacgttataagctcggtcactcttgcctcttccccttcttcgtcttcttctttcctttcctttctctctgtagtcaactgcttcgggactaactcgtccacctcgtactcatattcactacacatcctcagccatcacgtatccctgttgaccacacactccttgtcacctccattgatttaaccaagcatgctgtctttccgatccatcctcctctccgccaccgtgctctctttcctttcttcctccgcctcggccgcggcgactggggtggtcgaacaacgtgcttcgggatctcagccttcgccctgggcctgtgactgtacgttcttccgtctgcctacgtttgccgcaagacatgcgacaccgagaacaagccatgagtcatgacgtgtgatgcacaagactgacgtccgtcgccattctgcgtccatccacacagatgcgtgcccgaccattcctgattctagtctgttctatggagaatcggtcaccgggaacgacatcaactgctactacaacaacctgttgaagtgagtaccctcctgtggatgtcttctgttgtctctttttctctcatattcgctccttcgggctgtcatgggctgacgtctgtccatctttgcacttgcctccacgctctgctccgccagtccgccgatcgatatgtttatgtgctcctacggcccggtagcaggtgctgacacgtctgtcacttaccttgtcggctctcgcaacaggcctgtctgcgcgccgacatctggtccgaggacctgcaagacacggaagagaaagaacaactctgtcgagaccgtcgctcagcgtcggatcagggagaggcagtggaagccgacgaaggctgatgtcgctgatgtggttgatgtcactaatgtggtcgatgtggacgatgctgccgaagttgccgatactgccgatgttgttgatgctatctagggaaggtgaaaagggaaagagcgaacgtctcccatcttttccgtcctgattggtcagtcaaagcgaacgggacgatcattcttccgatcggtctgttcgtgagaccgagtctgaccgcctctgatcgatgcctccggacgctcttctttcctttcgagcatgggaccttgtttttgttttgttcgtcgggggaagtttcgctcttttgctctgtcgtcttccttgctcgttgttcccgcctgtttttcttctgtttgccttctctttgcttttccttggctctcccttcgcttttcctttgcctttgttttgcttcttctcttgtttcttcgtctctcggttcatacgttaccctgtcgatccacaggcctctttctccgtcgaccgctcgatgagactgccttttctctccttccagccttctgcccatgcggtcctacctggtcagggtctcaaagctttacttacttacttacttacttacttacttacttgtttaattgtttgattgtttcttatctgggtatttttcgtctggtcattcttcacttggtcttttcgtatctgacgattcagttatctggccatgtgatgatcgggctgtctgaccgtctgatgatctggtcgtttatccattcatctggaaagactctgtcgcagttcagatcaacggaaataaggagacaaagccgattgaccagcacactgaagggattagagacaaagatcgagacacccagggcgagacaacatacaaggatcgagagaccggcgcgagatgcggcacacagaacgcttgtttgccgaccatgccatatctccacctctgagcttgtccttctctccctcgattcttttccttgtcccgtcggtctgtttgctcttccgatcatatgtgtaatgtgttaatcgagtcagagtctgtctatgagtacaggtatgtatccaaacgcaagatcaaaggaaaagtactgttggtctatgcacatcatgatagaggaagacagcgagagagaaggagagggagatccgttcctctctgacctttgtgtccgctcatctggtgccatatcatttcatagcatctcaaaccaagtcagtctgtctacagtcatatgcacctacaccttcgaagcaaaaaaccaggtgtccactgaaagccaaagaaagcaagagtcagctcaacatcaattggaacatcgacctgaacgtcaacctgaacattaactctggcaccgaactcgaacttcgacctcaatcctgacctcatccttcttctcgcttctcatcacagctcaccacagctcactcgcccctatacaatgcaaagaacagcactcacagtccgaaacatattctcccgtcccaatgctcatgtccacacttcccacaagctcataccccacactctccatcgcagacaagatcgtacaccccagtatcctcgcttccactacctggacaccgtccgacgaccaccatgggttcttgcacagcttcagctgccaagctcccgcctctttttcacccgagctttggatcccaaacggccaagtctgttcagccgatcaccagtcggccagtcggtcagcccatgatcgagtgagtcagtcaatcaatcatcaggtatgtcagtcagtcattgttctcgatcagctacgcgttgttcctgaccagtcgttcatcgtgcttgtccatcgccccgccaaggctgtctcgacagaagaacactcacgtgaacagcctggatgaacgcgttcttcacatactcgtccggaggatcgatgatcctgaccttgtcactctcgttgaagctgattgcaaagtagtacttcttcctcggcggcacggagtgaaggatcagtgcatccttgtctcctatctttttcgacaggtcgcatgcttgatgcaggtcccagcctacggccgacagtgcatgaagtacatgacagagcagtcgacgagcggaaatcgcctcggacccttgtccgtaccctgtgttcgtctagattagctacgttctctcccacggcattgtccgtactcagagtcaccgcgatctatacgcagaggataaactcacatggccggcccgacagcttccactcataccctttgtggtatgggccctgggactgtatgccactactccatgctctcctcacagcatcatccacaaccgtcgtcacgttagctggcagacctatcagcctcagtctgtccgtccgaccgagatgaagacacccaaagaggtgtggaaaaggtggtggagggtcatacggcactttggcgggtgagcaggggcaggagcgaaaggagaagcacgtttgacatggtatgatcgttagctggtgtacactcgatgatagctaggatcgagatgatcggaagaagtggaagaactagaagaactagaagaactagaagaactagaagaaccaggaaaaagagcagaagagcagaagagattagacgaacagcccattctagtttgacagagtggttgattcagatgagagatgagttggtcgacggatgagttagcgatctgacgcaaagtgtcacgatgagaagaaagatggggatgagagatgagtgtgcgagatggaagatgggagatagagtttggaagaagacggtagagcaacaaacaggatgtcaacctcagagctcagatgacgtcggatctcatcttctttcctccttgccccttgccacagatttggcgccgactatcgtcttcgtacgagcctgtgtcatgcctttcatcccgggctgggtcctgagctagatgcatgaccaccatgcggagaaaagatgtaccgtcatagacatcctgggtcggatgatggagcagagacgtgcgtaagatacatgaaaaagcagccggatgcacgacgaccaggagtcacatcaacaagtccgtagagatgctcagtaagtatgaggatgggatcgagaccatccgagttcgagttcggtgggacacactgggtgttctcagcaggcgtctctctccgtcgtgactgtctcttctcggagtgtgcttgtgcttgcacaccctccatgccttgctttcttctctcatctgcgcatccatgctgtatcttgtatctctcgacgtatatagcatcgctcatgtctgcgttcttcttctcttcttttctctttcctcttgctcagctttggccgagactgtttagctgcagagactggaccacatccgtctatgttcttctctgacttgccttcttgccttcttcctactattcagccatagcttacttgttttctgcggtcaaaccatgctctctctatcttacaacaaactgtagaactctcaaaatacagatgattcttagcaccctatcttccggcgtctcaggaccgttctggctctggccgcaaacatcatcttcttcctcccttcctcccttcctcccttc

SEQ ID NO: 513 - DNA, 9215 bp, Xanthophyllomyces dendrorhous
cttcctcccttcctcccttcctccctttctccctttctccctttctctcggtctccctctctccttctcaccccactcggcaccagaagcatattctgatataccaaggtatgttggtagcatcactttgttctttgctttggcagtatgttcctggtacagcttgtgcctttgcactacagcgcatgcctcatcatatacactacagcttgccacgatatacaaacagccccttcctcggcccatcaaccctctcaagtggcagagcagcactagggctcccccgcactatggttcccatgaaactgctggactcccaccgcgccactcaaccagctcggccggtgctttccgaactgctcaaactctggcttgagcacggtatcgtgcaagctaaagtcatcgaccgtcccgatcctggcaatcgtcattcccgggaacccacctccttttctccaaagcatcgttccgcacgtcttgcagaaggagttcatcatggtgaacccgcgctggatcgtgttgtactgtccgtaatgggtcaggttggactcgccccgggtgaaggtgacgtctggatcggcgatgacaaagttggaagcgaagatcgacgcggtgaacttgtggcagtcggcgcagttgcagacgaaggaggtgacgactttgtcaagaggctaagcgatgtgactcgaccttacatcagtcatgaggcagaacacagacacagacacagacacagacaccgagatgtagacagagatggagatagatatggagcggatggatgtagaatatacgatatgcgatatgcgacatgcaacaggcaatatggagcatggaacatgagatacaaaacatggaacttgcatctacaaacttgtactggacagctccgcaatagcaagtcgcggtggcctcccggtcggtcgaccagccatcattgttactcccaacaagagggaagaatcctttgcgttcagttctgtacgacatagtagagacctgtcaagatgatgaggaggaggagctttggtgtatgtacgagatgcaacgaagaagactggagatctgatcggttatgtgtctgctagatatacgcaatcttgagcacggcttgttcagcgaagggcaaaagcgatcccagagatagcggtacaagtacaggcggacaagcgaggtggaggttctcgctctcgttaaccagaacggatgacgtcagcatctgtcatcggtagcattgtcaaacgcacaaaggccctcatctcttgacttcttctagtcgtgaacggcagcctcgatcatccgtggcgacaccggatacatggtgcgcttctcttgtctgacgcgacgcatacaactggtctctatggtagctcacactgacactcatctgtccagtcaagctatatgcccatctacacaccctgctctgtttcatgacatgtccatacacaaggccatccatcgacggtcgtctcattgacgttattgttaaaagaagattatagtagagaaataaacggaagaaatagtagaagacgaaagacgaaggagttgaaccatgaagccactgtagactgtccctgagaaccatgtagaaaagacaaacccccaagagagaagaggagggagagagaaagagatggaaagagagggaaagagagggaaagagtgggaaagaggatgaactctcgaaaaaaaaagagaaaaggatgaacaaggcaacacacatcacatatcctccacgctctccatagtccagatctcctccggcctcttcttgggtataggatgacctctatacgcggcgatcctttctactgtagagtccgccagactgtcatgtgagaacgatccgccaaacgcaggatgcgcgcaaaacggaagaagaggtgatgagaacgtgctggtgaccactgtaaagactagaccagacaagactgaacgccacttacatgcctccccagcctctcgaggcacctcctccgatgtccgtacccaactcggaaaagggaatgatgaccgcgggtgtcgcagagaagctctggagggtgccactgttgtagtcctgtgctatgtacttgaacggaagctcgtggtcaaccggcgccgagaacagattgggcaagccgtgcacaaggccatccagtcggcggaggccacggcgagagagcgcgtacgcatgggtgcccatcggccggcgggacttgcgaaggccggggtggaaagtaggtttgtgtactcgttcctgtcccatgatccatccaaggtacctacagagacaaaagtgcgacagaggaaccggtaagcaaacgcaagcaaggacggatggacagtggacgcatctgcaacagtctccaatacgtacactatatcccagccctcagcctcgtcggccagagagcgagtcatctctttccaccgttcgacgagcgagaactcggcgtcgatatcgtcctccaggatcaggatatcatcgtcgtcattcttgagggcagtgtgccaggtcttgagatgggaaaggtagcaccccagtggggcctctatatccagcatgaacgtcgacaagaaaggtagccatcggtcagtccatagcagccagaagcctgacaccacaagctgacgcaagcctcaccaggtggccagagcggataatcaaactgcacgcccgggtttgttccctcgagaagaaactcggtactgttactgtcgaaagatgagagcacatactctctcctgttaggatgtgtgcgcattcagagataagctaggtgagtcagaacggtctgtccatctgaggtgacagagatgagaaatacacgaaacacaagagacacaacaaacacaacaaacacaagacacaaaggaacttaccatgtcttgccatcccacagtctgtccgctatgctcttcgccatcgtagagtccacgccatccctgatgcggtccttcaccacacgctcttctcgcatacgttccatgatccagtggacgacgggcgagtctttgacgacggcgtcgatgtaggtaaagttgagctctagagcatgagcgatcagttccatatgctctttccggtctgcaggaagcgtcaggcaacgatagcttatcaacgaccagttcggatgcaaagtgaatagagaagaatgcggacactgccaagaaaacagcgagacatacctggtcgggtggccaggttgatcacatagatactactccatgtcgttccctggtcatggccgcggatactctggatgagctcgtccctgtaagaaagaacgacagattgatccgcctcaaagaacagaccccagacatagaagaacaggcatatcgacccggtggccagggtgtacacagccgatacaggacgcatgtctatggagaaacagtcgtgtggaccttggtgcgtgcaagggacaaggaatgggtaaatcgatgagtacacgtaaaggaagagaagaacggggggtgaggacgaggcgaagaagggttgtagagcgattagattgatccgagactggacttataaggctttctcagggttccccacaaggaccaccccgagcgaacactcaacggatgatgtattcagtctgcacggacagagataactgagcgaataacgtcggacaacaccggacactcgggcgggaacgcatctgaagctgagtgatctgccagttccgaacagtgcccctcagtcagctctcttgatgccctcggagaaagggatgctggccgaaaagatgaccgagtcgatcgaaacaaacaggcaggacaaaaggaggtgagtgtcctgggaaggatatgcattcattcctctacccgttgcattccatctgtccgtaaatggatgcatcacatccgcctgtttgcagcgatgaggaagtatgcatttctatctcgaagaggcagtcggtcaggcagtctgtcaggcaatcgatgagtcagtcagtcagtcagtcagtcagtcagtcattcagtctgtctgtctctcagtttctcagtctctctcttggcatctccgtccgccagttgatcgatttgtcagtcgactgctctgtaaaggactccgcatctactactcgtctacacgacgcctgtcgctaggtaggcaacgtttttcggagccgtcgtcagtcaagaatacgtcgctatacttcccaagaggtacaggtgacggagtcggacggatctttcaattaaatgacaatgtgtgagtcgggaaaacgacatagaagtcttcccgctgctagggttatcggctcaattgtattctttcagttgtttcagagcgggaacttgagtcggagtttcctattcattccatctgcccttcatttatcaattgtattgaaaagtaaggatttgtatatatgcttgccctaagacatggtgagaacaatctcaaccaatcgtgatcgatacatggcccttttggacttccgtgtcctcagaccacaggccaccagattcacatagggcatcagtctggtctgccctatttgaccgagcggcttcagcggcagtggtaaacactagcactactaatgagcgtttacatcatcccgactttctttgtgtcttctcagctgttgagattggtgcctccttgtctgcaagaaaccttgcttgatcggttcaacttgccatcggtcatgatgatatgcttggtcgagccacgtgcagctagtctcgacggtgtccagctagacgcccggtgtctggtatacaagatgatcatcaaagcagtcgagccagccaatggtcttacgatcgttctcagtctctgatgtgtataggctaagctcgacacatatttagacgctcggctcgccagacttttctcctcttcgaacggactcaccacctcaaccctgccaagtgttgtagataggatggacataagtctgagagtagagattgatacaaaagaccaggtcctgtagacagtacgagacaatgagccgtcaagatagatcgatctccgtcaacagccatccgcctcacacgaagagagaacaagaccgtcgctgtagactttccaaagaccacgagagcatacatccagaaactctccctgttgtctgtcccagtacatcgatatctctccctcttcttgtttttcctctggtagatcgtctgttcagagatgcgccctctgttcctgccagacctcagagcactctgcacgcccataacttacttactcgctcgacagacatcatggcaagccgccgtagactctcaagtcttcttcatccttctcttcagtctctgccatgtttcccatgtttcccgtcttttctgtcacttttgatcaagatcagaccgatcgcccacagagggatagaagcttgggggcaatcgatcgacagggcccaaggtgaagccaagtcgatcgagtagccagacagcatagtctcggaggaagactgccttgaacatgtttgttagtgttctagatctgactattcggtgagtgtcgtgaacagggcgggaggatgagcatgggaacggtgtactggtttgtttggttctgtttggttcggttcggctcggctcggtttggctccgtggatttgtcaatcggaaacaaatcataagtcgaggcgaacagcggggcagtgcattctacatgaaatacgcatgttcgtgaggaaaacttatggagaccaaacatcaggatctcttcagtcgacttgtgccctggagaggaaaggactcattgaacggcgcatggaatgacgcatactgggagtcaagaaggacagcaagcgatgaatgaagtgccagcccgagaggagttgcaaataagcaagtgggcctgtagacgtgccgtttccctatctttatcccctcccgctcgagacaaagagcagggacagagcaagagaagcaagagacacgaaaagagaacataaccagcatcaagcaagagaacgggacatccagtcatgcctcagcgatgccagtcgtcttatgcgaacatgatgaacgagctagacctgagctaggatgtaacagaagatcaagcagttagccagatgcaaaggaagaagaacgaagctggttcgacagtagcacgagctccgcagacgcagatgttagtccagtttcatgagaatgatgtcagcacacatccgacgcagaccatgatccattctgaacacgacaagtagctctcctctgtgtctgtgtgtatctgagtgtatctgtgtgtttcgctggccgtgtgtcgactggcgtactgtgtgggaacggatgggcaccggatcccacgagatgagcgagacggctgcggtggctggcaaagaagaagctgacaaagtatcatgcgagatgatggttgatcatgatcatgctaatacgatctttgctagcccagctttggccgggcctgagtgttccagaagccacataaggctgatgggttgagcagtcagaataagagcatgtcctacatatctagcaagcaagcaaccgaagcacaaactcagcatccctctccaaccagaagcaactcacctcagtaccatgtcctcaagcacaactacagcacacaccatcgccgtggccggcgcggtcggaggctcggccgggaacgatgggttcaacgcatctgtcggctcattggtcgtcgaccagctcctcaagacggaggccaaggtcgtcgtcctcatccgatcgtcctcggtgagtgtgctttgggtgtgtggtccgtgtggagtctgtgtggtcgactggagccatagtgtgtagtaccgtgtggctgacgttctctcttgcgcgctttgtttgttattctctggaaacaggcggatctccctcaggtggccgagctcaagaggaagggtgttcagatcgctgttgtcgactactcgaacgcatcgtcgctcgagcgcgcactccagggagtcgatcttgttgtgtctgcccttgccgggggaggaactggtctccagttcacgttggatgatgcggccaaggctgctggtgccaaggctttcatcccaaggtaagttatcagtggcgcccgacggaggaaacagccgttctttgccttgtcttggcttgtctcctctcatactgtccttccttgggctgagctgatatgggccaggccgggctgggcccatgactgtgttagcagatgaaactgatcatgtcgctcttctttctgtcttcatcgacgcctcgcctgcactcgctgctcactctcttccagcgagtttggaaaggacgcgtccaaggctgatagcgactcgccgaactacgtcaagaggaagcttcagcttcacctcgatagcatcggcctgccctatgcctggtcttcagcggtctcttctcggactttattcctttcttcttgaagtacgtcgctcctgtctcttctgctttctctctccatctctgcgctcaagactggatgctaacgtgcgggctgtttctggtgaaccacaggggaggcgacggccagatcgagctcgtcggatcggatgacgtgccggtcgacttcatcaacaaggctgatgtggcgtcctatgtggctcatgttgcgatcagtatgtctcttgcttttgtgtctttttgcgcctgccttgctcgctcttgtgctatgggcatggtgagactgactgtgcttcctacatctgtgtgatctgtctttcgttggcaataggcattcctgtcgcgagccttagtgggcagacattccgactgagcggcttccgaacgacgttcttcaagcttgcctcttaccttaagagcaaacagccggcgacggaggcgaagcctgagatcgtgcgagtgtctgtcgaggatgcgctcaccagtttcaaggagcagagaagccccatcgcttacctcaaggccaagtgggcgcagggtgagggagtggtgagaactgaggagcaggtggtggagactcgcaaggcgtttgtcggatgggagcctcttcctgtggagaagtgtctctagagcatcttcctggttgcgacgaagggactggcagagcatatgtaaggtcctgagtctagagagaagacggaagagacggagtgagacatgatgatatgtacacatctacactgtctgtcttcccatcatcggcttgcaaatgccgagcaagatcggtgcaaagaaagtcgaaggaagacagcaggaaagtgtgacgattggacccagttggtccaggcaggatgcgtcaacgtatgatgtgtttacacaagtcgaccctgacaacgtcttctttcctcctttcctcctttcctcctttcctgcttcctgcttcctgctccctgcttcctgtcgttctcctctgcatctcgttatttaacactttaggcggagtttcgttcgtctctgacgacaactgcgtttctgtcgcactgagccagaacgggcatcggtgttcgctgagcctcggctgctatcgactttcggctttgtccgctcgtctttctttccgtctctattctttccatctcttttcttttcttttcggatggtcgtaagtcttttagataacccgattgatcaagtgagacattcgggcggtcaacgccgagattacagatcaatcccgacacggatcacgccaatcttctgtcggctgtgttctcacatcttgaccttatacaaaccgtggtgacatcagccttgagtcctacaaacacagcgctcggcccaacgccctccgtcccatacactgacatacacatacacacacacatactccggagcaacgaacactatcatgcgtgttctcgtcctcgaatacgacccgctctgggccgaagccttcgaacagatcagatcccagctgctcacaatcctgtcaaacgtcccgatagtcagtatcgagcatgtaggcagtacatccattcctggtctcgccgcgaaaccgatcatcgacatcgacatcgtcgttgcccccaaagacatctttcctgcgttctcagcgctctcgacaggaggatatacttacaaccctgaaccccgtaacatcgacagagcctccttcaggtacaacaagcacacccatgactcgggcggtggtgcgccgaccgaagacggcggtgtgagaagagcagtctacctgaacatcccaaccggggtctctctcaagaaccatctggcggtccaaagggtgttgctgactgaccgagaccttctcgaagagtacgctgccgtcaagaagacactagcgaacg

SEQ ID NO: 514 - DNA, 489 bp, Xanthophyllomyces dendrorhous
cgagtttgaccacatcagcgactatgggtcggcaaaagctcccgtgctgagaaagatacttgccaagagtgatctggccgattccgaccatgaggagatcgcgaggttcaatggtgtgtcatcaatgaaatgagtcagtcccttcttcgagcacggtccatctccacccgtccaccgagtacctgtaggacactgactgactgcacaggctacttgtcgacgattatgctagtacagctcggtcaggtcttagaaggatggtgttcgcagcggggcaatggacagaccggatgcgagcgccgagagaatcagataggtatgagccttgtctaccaccacaacacttgcgttgataccgacaaagagactggctcgcacatgtacagtgtagaaaagggctgagtgaggggtgttgagttaaaatcgaagagagtgagcaaagaaaagaaaaatgaaatgaaatgaaatgaaatgaaatgaaatgaaata

SEQ ID NO: 515 - DNA, 473 bp, Xanthophyllomyces dendrorhous
aaatgaaataaaatgaaataaaatgaagagacagatcacaaaagccttgtaggagtttcactgagatagaaggataaaaatggacttttcgttctggcacgcgttcgaagccacgtcctcattgatacctcaaaaacgcatacataccacccagctgtctcagtgaggacggatcgtgaaaccagggaaatagaggaaaacgagttagaaagcctatagcttttcggagagagaccctgggaacactgcgcagaaagaaacggagggtgttgcctgatagaaagggggattaacaaattacagataatagaatgtcaagactgctgaacacccaacatccaacaagcgatctctcgcaagctgcgcttgttccatgcgagcgccgaccttcacaacaagatcgtatagtatagtggttagtacttccgcttgtggttcttcaaccgaaacgtcaagtcgcggacgacgggtgt

SEQ ID NO: 516 - DNA, 5219 bp, Xanthophyllomyces dendrorhous
  misc_feature (2887)..(2896): n is a, c, g, or t
  misc_feature (3853)..(3862): n is a, c, g, or t
  misc_feature (4030)..(4039): n is a, c, g, or t
  misc_feature (4364)..(4373): n is a, c, g, or t
ctcacacacacacacacacacatgtagacgccgtccacctcgactggcgacatggccgggcggacgacaaacgctcgctgtgatctggatgagagtgtccacagacagtcaagctgtctgactcaggccgtccgacgcaggctcatcaggctgatggatcgagataggcatcgaaagcctcccgagtgagcacgacaccccctatggagacggccagacacatcctgtcagccatggccggtatgcagaggagcttacacaagagtctcgaggcagcaggcactcacagtgttgcagcgtctgcctcaggatgggtgcgatctcgggatcatcccatgcatcgtcatgttgggagtgggatgcggctgtcgacaaggccaggtgttgtatgagtaccaagaacagacatgtcaagttgtggaacaaaccagacgaccagcagaccggtggatcagcgtgagaggagatggatatcagacaagtaggtcgtgttggtctacctaccttttctcaccagactcgtcttgaaccggcctctggggcctgcgcacccattccatcggcctatctgacgcacgtcatcggcggtccgacgtcctaggaagaaacggcagtaccactaagatgttcagcgaggcaaccatcggggtcatcagcatgtactaaaggcaaaacgcgatgtactggaagaaagacgcgatgcacatcgggagcagttgggctcacctgaaaccagccacgagggtcttgaggtcggatccatctgttatagacgtgacatgacatggcatagcatgacaaggcaaaactcagctcaccttccgacaacgaacacaaagaaagcaggaggactgacccttgcttttcccagtcttctattgactgtgatgctttcacgccgtacttgtttacttctggacggtatgtttgcgaacaaagaagctggtcagctgtcacaacaagtgagccgtccggtcgaatcagttgaaatcaggacgaatcagatcgggtcacatcatcagatcgcaaatataaacacacgtcagatcacatactatacacactgccatatctatgatgcttgctttctcaccatcgaggccttcataccattcgtccggaagcgagtcgtagtccgccggtacggttcgccgaaggacggatgagtagaactctctttgtagaatagaggaaagcttgagacagacatcgaccaaagcacggtagtctgagtagtacagaacttacctccagtaagatccatcaaagcttccctctcgaagcatctcccacggagccatgtttggtgtgaagccttcgtagccagcctcgaaacggaatgtcccgtcgtcgtctctcgcaggttgaggcgcgacgatcgagtagtcgacatcgtcctcaacatacggagaaggcgctcgaggtagctgccggatcgcctttcttactgcaggaggtgagtctgagtaaacccggcgaatactgccctgcttgtcatccatcgatgcagcgatagaaaggtggtctgagtatataggcgcatcgagagcagatattcgggctgactgtcgaatagggactgctcgagctcgctcatacggcttggatcgagccggccttcggttctttggttttccatcaggctcagccttcggtgttggagctggcttcgtctgatgatcgagccgtatgcagcatgggaagcgagagatcagcaacatagacgattacgggaacgacacaaaatagcagcatctacctgaacgggatctatacctagcgacgctagcagaagctggttggctctgatgttttcctgtctagctagctcatattcggacatcgcttccggtgcaacagtgtacagatgttcgggcagaaactgagacagaatgtgttttctactagatagaaaaccaagtcgaaggagttgagtagaaaaacaggcgaacttcatccgtcgcgactggcatgaagcgtatctcggttgacgtcactattgcattcgccgcgaccggtcaacatcgccagaccgagatggcctctggcactcgctgttgttcacgcctgaacaatcatctcgcaagatgcacatcccaagcttcggccaacctaaatcctctccaaactcggtttctcatgagaccgtcaagacggccaacaaagacgagaacccggtcaaactacaagcagccctcgaggatcttgtccagccgggcagtgtgcagagcgttgagcaaggtgtgttctcgcgttgcccaagaccgcctatcttcgtaccgtcagatcgatctcgaccgagttctgaccggctggtggctggatctgtgacttgtgtcgatatcctggccaacatctggactagccggcaagacagactcctgcgagtccgatgctcattcgtatcagtctcaagaaggaggctcgaagcgaggctggcttgccaagttctttgaccaggacgatatgaacaaggtgagaaggaccccataaggcgtctgtcgcctgctatagcttctgtactggcggtcttttggtcccttgtgctggctgctgatgagactttgtgtttcccagctttttgcttctgaacatatgggaaagtaagcctgtcttgcaaggacatagcgaccgtgctcgaccggacgccggcgtagctgatctgccgctggttgtccacccttgtagctttgtgatcgtccggtcgacaggagagaggatctttgaagagatgccgatctatgtccggatgtgagtgatatgtctcgagtttctatatacatcctctcgctctactcggcccatttgccttgaaagcgttcgactgagccatgactctatggaacccaactgtggtccctccagtggcatgcatctactcttcgtnnnnnnnnnncatctcgcaagatgcacatcccaagcttcggccaacctaaatcctctccaaactcggtttctcatgagaccgtcaagacggccaacaaagacgagaacccggtcaaactacaagcagccctcgaggatcttgtccagccgggcagtgtgcagagcgttgagcaaggtgtgttctcgcgttgcccaagaccgcctatcttcgtaccgtcagatcgatctcgaccgagttctgaccggctggtggctggatctgtgacttgtgtcgatatcctggccaacatctggactagccggcaagacagactcctgcgagtccgatgctcattcgtatcagtctcaagaaggaggctcgaagcgaggctggcttgccaagttctttgaccaggacgatatgaacaaggtgagaaggaccccataaggcgtctgtcgcctgctatagcttctgtactggcggtcttttggtcccttgtgctggctgctgatgagactttgtgtttcccagctttttgcttctgaacatatgggaaagtaagcctgtcttgcaaggacatagcgaccgtgctcgaccggacgccggcgtagctgatctgccgctggttgtccacccttgtagctttgtgatcgtccggtcgacaggagagaggatctttgaagagatgccgatctatgtccggatgtgagtgatatgtctcgagtttctatatacatcctctcgctctactcggcccatttgccttgaaagcgttcgactgagccatgactctatggaacccaactgtggtccctccagtggcatgcatctactcttcgtgactggccatccgttgatgtctcaggccaagatcgaaaagctgctactcgctcagagtgtgaaacaaggccagacgttcgatgccatgggtccccaggtgagtcaagccggacagacacctgctcgtcttgtcagacgtgactagannnnnnnnnngactggccatccgttgatgtctcaggccaagatcgaaaagctgctactcgctcagagtgtgaaacaaggccagacgttcgatgccatgggtccccaggtgagtcaagccggacagacacctgctcgtcttgtcagacgtgactagaagctgatgattctcgatcttcnnnnnnnnnncaggttcttcctcacatacaatcgtttgtcgatcagtttggactgccgctttctgatcttttggaacctgatctgagcaagtacaatgtatgtcatctgtctgactgattgagaggactgtcaagctcagcgttttgacacgtggtctgacataccttgttcccagacgttcaacgagttcttctaccggaagctcagagcggatgctcgacctatcgcttcgccttccgacccggcagtggtagtctcccaggcggactgccgactgactgtttggcagtgtgttgaggatgccacccggatatggtaagcatggatctcgcgnnnnnnnnnncaggttcttcctcacatacaatcgtttgtcgatcagtttggactgccgctttctgatcttttggaacctgatctgagcaagtacaatgtatgtcatctgtctgactgattgagaggactgtcaagctcagcgttttgacacgtggtctgacataccttgttcccagacgttcaacgagttcttctaccggaagctcagagcggatgctcgacctatcgcttcgccttccgacccggcagtggtagtctcccaggcggactgccgactgactgtttggcagtgtgttgaggatgccacccggatatggtaagcatggatctcgcgatgggtgatgcatctcactagatgtcctctgtctcaagatgtttgcgactggacgtctgtctttggttgatgtcgatacctaggatcaaaggaaagcagtttactatccctgcgctactggggagcgaggcctttgcctccactctcggccccagtcctgctgttgcagtcttccggctggccccacaggactaccatcggttccatacgccagtgtctggaacgcttggaaagagcataaacatcccagggaagctgtacactgtaaacccggtgcgtcctgctgtggtcgactgcgtgtgtttcgccgttcagaccgtctaggaggtggctacgtgggctgatatgtgctgttgtgtggggccatcttctgaaacgcagcaagcgattaacgaggacctggatgtctttactgagaactcgagatcggtccttcctatccatcttccttcgggccaaactgtgtacgtcgttgccgtcggggccatgctggttggttcgattaactggacgcacacccag

SEQ ID NO: 517 - DNA, 60225 bp, Xanthophyllomyces dendrorhous
tggtaagcatggatctcgcgatgggtgatgcatctcactagatgtcctctgtctcaagatgtttgcgactggacgtctgtctttggttgatgtcgatacctaggatcaaaggaaagcagtttactatccctgcgctactggggagcgaggcctttgcctccactctcggccccagtcctgctgttgcagtcttccggctggccccacaggactaccatcggttccatacgccagtgtctggaacgcttggaaagagcataaacatcccagggaagctgtacactgtaaacccggtgcgtcctgctgtggtcgactgcgtgtgtttcgccgttcagaccgtctaggaggtggctacgtgggctgatatgtgctgttgtgtggggccatcttctgaaacgcagcaagcgattaacgaggacctggatgtctttactgagaactcgagatcggtccttcctatccatcttccttcgggccaaactgtgtacgtcgttgccgtcggggccatgctggttggttcgattaactggacgcacacccaggaagggacgaaggtagagaaaggagacgagcttggttggttcgcgtacgtaccgagcttctgtgctgccttgatcgtttgccctgatcgctgctcaggtctagaagggtaaacgagatatgcttagccagcatagactgacatggatcgtctcgttttgagatctcgacgtcaacagatacggtgggagcacggtgatccttgtgacgcccacaggaagtacgacctgggatgaagacatcagaagatcaagcgagcaagccatggaaaccatggtccgggtgggcgagaggataggagggctcaactgagagcgtgtagtacaggtctcggtagctggatatgtctttgccagctttgtgtatcgtatcatgaggtcagaatgatatgcattttgctagcttgattatgactggctcgacatactgtttatcatcagcagcgctcaaattagcctaattcaaagggtaaaatatcacgtcgtaggaaagcctaacgaacatcacagacagccgtcacggttgtatcttggttcatacctcacaccttctggtgatccatcagccaagccccaaacttttctttccgtgcggacatggatatagaaagatcaactaaaattcatatgttctttcaacccatacaccaaatcgagatacgacgtcaaaatgtgtcgtgataataacaataaaaagatgaaagctaaaaaacccaagttaaactctgtcccaagatctggagcttgcaacgaaaggaagctggtccagtatcatcgtcgaggagatcatgacagtattggcctcactgattgggagagtacagtctatgatagctagttcgcagggatcatgtttgtttatgaatcacaatatgcgaatttagcgcaaagtcctataagtggtaatggcaagaatgtttcgaagaaggagtatatgtcgagaagacaaagagaagataggaaaggactgaagacgaggaaggctctgatcttgatatccaagaatgacatgaaatgatagggtcgataagaagatagagggaacccgtccggtaggtacgatcagaagaactatctgggaggttctggaatgagaggatggtgatgcagtgtatctaatacaagcatcaaataacgacagtatctgataagtttacccatcccacaggcgtcgccccggttgacgcagatcagtcagagggagagacactgcatatcggagggaccacaggagacacgggacagagccgcgcgagatcatgaaatagagggacgatcagcgattgtctcggctgagggttactatcaccaagcctaaggcttatcatagatcggtgcacgcgacggtgaaattccgatggaaatcccattaatcggtcatccagatcgagtatgtattcccatcagatcactagtttcctctgagtaatcgtacagtgtcctggttctcttgctcttcatcatgacatcttccctgtcattacgagatgttatcgctcaagaatctcatccgtgggaatatttatggactaggagtataactccatgggatagaggagcggccaacccgtacttgctcgactttatcgagaaaccgcctaatggcatagatttgccccgaggaggaaaggccttgatcgctggctgtggacgggtcggtcagcctcgctctctaaaatttggcatgcgaatgactgaaacattttttccactttgagtaccttaggggtatgatgtagcattgtttcgagacgcaggatttcaagcatggggaattgatatctctgaaacggccgtccaagcggcacggaagtaggcattccattttgatatctacatttaaatcagcatattctcagtatgcatcattctgagactttgttctatccgaatgttttagatggatttcgagcgcaccatatgatgcaacgtcttctggaggcacagcagagtttcatgctgtagacttcttcgagtttcctatacccgacggagggtttgaggtgggtttctcccgttctttcttcttgatgctacaagccgttctctgttatggaatattttcctgtgttacttatgcttatccgacccaatctttcagatcgcttgggatctcaccttcttctgcgctcttcatccctcccagcgagaggcctgggcaaagagatatacaacgctcttatcatccaacccacgtgcgctgcttgtcactctttgcttcccaatcgatggaaacagactcggcggaccaccttggagcgtcagtgtggaggcatatgaggctgttctgagtggaaacttaggatggaaaaagatccacgaaggacccgggggtgagggaggacggttggttgtgtggggtcgatgaagcggcttaatgagtgattcgagtcatactctaacatgtatcaaacgtcgtctatattatatccatcgtatccatcatgccagcatctctgggctatcaccaccatctctatcaaagaacctcaactttgtctttcttttttttctttgtctctttttatgtccatatcttcgtctgttgactgtagagtttcaccgagtcgttcattgtggcgacggccagtcggaccggtcaaagagaaacccggtcaatggagattcctgcgaacaacgaggcaccaatcccgacagcttacaaaacaaaaagaactcgaggtgatgagaattcttagccatgttagatcactcctctgcatcagaccacttcttcacgttagaacactcatcaatcggctcgaagggtgtcgctccccttgtgtccgatgtaaagcgcaagagaacggattagaacccggttagggttaccttgcagctgatactactaccactgacagatgctcagcctatcattaggttggccattcaaggcgactggatcgcccatgtcttctctatcgctcatgatacagagtattgatccgtgctgtttcagcagtccttctggtgtcgtgaacggtgaaggtcggctttggctccttactcgcctctgaaccccctgcgggcccgatcgagtcggtcgtcgcctggctgggttgtacaacatctgacgcgcctcatcttctgaacggagatatctccgctggggtgcccacatcagctgtgagcaagcgtaacataagctgacgctttgtctgtcggcaggacgtccaagcgcctttctggccttcggcgacggtgcacactcgtcaacttctcgtgggcacgccgccggtcctttaaagacgctgtttaccaagcggaaagctcctgcgcgtctctgagtttgaaaagtctgggagtatcggacgtcgagagtgtttcaagtaccatggcaagtctttgcagaggagcaaagcgtgagagctcaaggaatgttgaatcgtctgtagagtaagtcccgtacttggtacatatcaagataatgttcccagtactctgtggtttttatgcttgctctcagacttgatagaacagatatattaatgcgttctacaacatactgcacttgaacctacaccaggatgaaaacgaaggggcaaggatgttggtgcttgatcctgccgctgctgctttggccgctgaggctgacgctaagactgatgctgatgccaaggccgacgctatgtcatcgacggggcaaactaaattcatgacccatggggatcatggtggtatgcgatctgaggacacctaagtctaaataggcgatgtatcgaccaccatcagttaagaatgctcccatcaagcttaagtcttattgaatatattcagtataatatagacctcgttctgttgccttcacagctttgactcgacctccttctcctccgttccggctgagatttgtttatcatttggcagaccataagcagtagggtgaatcacgttgaatacgacactggcgatgagcatcggcgccgcctcgaagacgtatatgattgcctggtaggtcatgtccaagcaggaaacaaaaggaagaaacgcatttatcagttttgattcagatacgttagtgttggactctctatctataaaagatactgacttccgatctgacaaatgcctgggcttcgcggtagcctaaactagtcttgccaaactcgatcgtcctgtagtttatccagtagctgatgtgagtagtcacgtacatgcggatgtagggatggtaatagacatgcgtacctgaagacacttcgtgcgagaatcatgaaggcgctacaacccaaagcgccgatcaaggccacccattttcctcgaggcacactatgacccttacatctcaaccagaagatgacgatggtcacagtgaagagcccaaaggtgcagacctgaaacaccaggcctgtaatcaagagtgccttggctttagccagatctgcagcggtctcaacggatcccaacaatccccctccagctgcctgcagagcaagcgcaatgatatcgcaggcttatgagttcgtgtccgagccatatgtacaggcagtcatcacgtaatgacatgtaagcatgatagttctcatcttgtccggttacttgtaagcagataaagagggccatgtctgacgtacagatgaagatccaaccaataaatcgcgctggtatgacacacaacgatggagcgacgtacagcatgactgtggcggttggacaagcgcttggtcagacggcctgctatgtttgttctagtatacaggaacggcctagcttacctctagccagaagtatgtaatccgtggcagcaagaaaatttggtgataaaataatcaatagaagttgcgcaagccatggatttctttcccttggactgctgatggatattgctctggcagtatagccacccatctcacctgtttaaagccatgataagactggtcagatacacctgatgagccaaagactagaacaaaacatcggcgggacgaaccaagtacccctactacaagaggccacatccaccaggatctcttcctcgatgcctggaagatatgagcgatggctgaagctccaaacagacacgcaaatgcaattgcgagaggacgagagggaacataatccgtccaataattttctcttgttttagacatgatcacccccgatagatggacggaactgaaaggatgaagcacggtatggaagatggatgaaccatgtaagaggagagcgtggaaattgtataaattgccacatcggttgatgatgacgcgtaacaaagttcagtcagactctgaacgcgccaagaaaagtgatcgggcgttgtgacatgaacattggcaaactcttttcccgatcgaaaccagttctatcactttcaacacatagaaacgattgacaagcattacattggactaaacccgcatcttagcgcctaccagctcctccccttccccgacctcttccacctccacctcgacctcggccccgacctcgaccgttgaaggtacttccggtcgagctgctcactcgctttcctcccatcccggttccggcctcaacatccgagtccggatcatcaaccggctgagcaacctgcatatcgtcatcttcgtcggcgccctcatcctccaaatctgaatctgtctgcccaggcttacgcttcttggtggtcgtcttgagagaagtgcctatcgagatgttgacctgagttgagcggatcaaataaagtaaaaagaatgttcgcaatatcagatgctaggcacagatagagaaaaatcataatcatttgcgcaccttgggaggaacaggaaacccgaaagcctttccaaccttgaccaggtcaagggcgttgacgtcaaagatcttcttgagactatatgatgcatatgcctgaaggtacgatcggaagccatcccgagccgactgatgcaggtagtagttcttggcgataagtttttccagctgtatggtatgattgccgaacaaatccaaaagagacacacaaaggaggttggtcagcttagtatttccaacagataccaagcgcgcgcgacacagacagagagtgtgtaaaacgaacctggccttgaacgttggctaccctatccactgggaaactgtactcattcagcggcaccttggctaccttcaagaatcgcaagaagccaagctcggtaggcaaaaggaatagcagactcttgccgactttgcctgctctggcggttcgaccgactcgatgaatataatcccttggatcatccggaggatcaaattgaatgatccaatcgactttggggatatctagtcctcgggcggcaacatcagtgcacaatagtgttccggtaggtgcattagaaaactcgaagaatgtggtcgttcgcttctgctgtttttgctttccctagagagtgaatacgagtgacagagcgattcgataatagcaagtggtcaacacaggacgttaataaagactgggttttgtcaagtccataataacagttgaaacagatgaaacgaagacatacatgaaggtgcagaacaggaacgtcgatatagttcaataactctccgtggtagtcaacacttttacagctggagaagaacacgatgatctttttgttcatgtttttcttaaggaaggtgaagagaaggaggaatcggcgatccgactcgcagacgacgtaaccttgttcgagcgtggagacagtcgaggcgttagcagactcgtcgacgttgatataaagtggaccaggtcggagtgagattcgcgcaagatccgtgactttagtggtctgcgtggcagagaagagcatggactgtcggttgtctattcaaagagaagatggtaagattagatatcaagatcgccgacagcttgactttagaatatatatgtatcagaagagcttgcagaaatcttacctttggggagaagagcgatgatctgtctcatctcctcttcgaaaccgatctccaagattcgatcggcttcatcgattacaagagccttcaaattcttgaaaacaaaccccttcgtgttctacaagactccaaagtgcacgttgaatttctgaccaaaagtgataaacaaaagagatcaggacgatgcactaacctgcaaatgatccaagaatcgaccgggcgtagctacgatcaagttgacacccttgatgagtttgtcggcctctgcttttcggttggctcctcccataacaattccaaacgtttgtgaatgcggctccataagttcttttgcgactccaaaaatctgcagagctaattctcgagtaggggaaataatgacgactcccgttcctatttttcgtatcacgacaatatgaaatgacgaagagcgctcgatgagtattgcacttaggagctgcgactatataggaagggagagagaactagaacagaccatttcggggcttgaaacgcaagtttgccagcaattccacgctaggaatcaaaaacgacagagtctttccagaacctgttcgggcagctccgagaacatcccttccctcaagcaaaggcgggattgttctggcctgaacttgagtcatctttgtgaagcccatgtttttgatagcttcagttgtctgaggcgtgagggaaagagagtcgaatgaggtatcgaccggaggtgagtcggcggtaatggtgttggtggacggacccgaggaagcggaaggaagattagggagaggcgtagtagtttcttcttcctcggaagactcctcatcatcaccaggagtggacgctgtcttcttagacgatgaagcaacctttgacgcgaggggggcaagtgcggctgaggtcgagggtttgcctgaggacgtagctgcagcagtagctcccttggaggaacgctttcttttacgcttggccttctcggccgagttcacctgaggattggctaccggagtctcgcctgcttgtgaggtggaaggagacattctgaatacacgagtcagtcgatggtggtgagaggaaacgactggaagagagcgagcagaaaggacaagtccagttgagcaacgagtgagttcccaaatttttgttatcttttatcttatgtaatttttcaaatatgaatcatatgttatggctatatatgatggttacatatctttccaaccctagcataccttggttgtaaccatccggttatgagcctggtttctgaattcgttccttgccctaatcatcctcaacagatcgttaacaacatcgttcagcgttcatttttcatttctcatcgtcagacgattaactacattcaatatgaacatctttcgtttgctaggtaagtgaagaacgtcatgtatgcttgctgtgagaagaaaaatcttgtttgggtatcatactgaccttgtcatcgattcatctgcttccgtcctttatggggtttacccttctctttccttttccaggcgatctgtcgcatctagcctctatctttgttctcttgcacaaaatccaaaccactagatcttgcagaggttcgtcgacttccttgtatgtgtcctggatgtagttctatggaaatatccgatgatttaagaacttttgcttcttttcgtgtctcgttcaacaccttttgctaacgctccatctcataaatctcaaaggtatatcattcaagactcaacttctctatgtcatcgtttttgtcactcgatacctcgatctactcagcttctcttctcatgtatcactctacaatacattgatgaagctcttcttcattggaagtagtgtatatacgctttgtcttatgaagctgaggttcaagtgagttgttttcctcattcactcctccttctagctgtcttttcaaagccttagcagaacaatctacttaatgacgctcgtatttacttattgcatcttatcacttctatcatccgatctttatatcctcaggcctacatctgatatgggattggacactttccggctcgaatatctcatcctcccgtgcttcgttctctctctactcatcacgtacgcctggtcgcctaccgaaatcctctgggcattttctatctaccttgagtcggttgccatcttgccgcaactgatgatgcttcagaggactggcgaggcagagacaattaccactcactatttggccgccctgggattatatcgaggattgtatattcctaattggatctacaggttcgttcttcttctcaagcaacctactcgtccccctcaaaaggctaacgtcacaccaatccatttctactttgtagatacttttctgaaggtacagtagatcccattgccgtggtagcaggcttggtgcaaaccgcgctttacatcgatttctgtaagcttctttctttttctttcttttttcaatctgtacgcgtcactttccgaaccagtactcaataatcggtccccgcatctctgcgtcactctagtctatatttacttcacaaaagtccttcgcggccagaaggtaagccgtttcaaacttttcttgcgtgtttcaaaacgtctgattaaatacaataatcatacaactacttctttcacagttcgagctccccgcatgatcgcgtcgcgccggcctcatcctgtatctcaagctcgtggttccctgtcaatctttgtttttacactcctcgctggacgttccgtttatgaacaacatgtcaagatctcacgatgatgttcgatgccgatggtctcctttatgaatgacacttgaaaatatctttttgttggatacactcgagcatatctgtgtatcttagattgtgttctgtgttgactataaatgttctatcaaaatagtgttggaatgcggcccaacaactcagtgctaggcgcgacgacgtgatgcttacataagctacatcaatcatcaggtggcttggagagctcacctcctccatctctctccctccttccatcactagccatctatcttgtatccattgtttcctatccgttccatcgtctctttaaatccagtccagataccttctacacctacacttctcagcaatccagtccatcattatggcttctgccccatgtgtgtatcgtatttgtctttttctcgtttcgtttgatcacgtcgaaattatactcccatctttcttcaaaccactaaacgcctttttttccaacttcttctcttctcttttcttttcgtgtcacccttgctctatccttgaactcaaactgtctgatatagtgtcctcggcagaacagacgttctatccttcactgttctccaagcttcaagagaacaacgtcatctcgggagcccaggctttctctttccttactctctcggatcttcctcatccagtattgggagagatctgggcgaccgctgatgtactagatcgaggatctttggatgtcgcaggatggacagtggccatgcgtcttatcgcttctgcccaacaaggtggaccggtgaatgccgaggtgggcaatacgggtaagtggtcgtccgcatagacacctacagtggaccgctgaatattatccacagccacgcgatgagtactgaagatgccttgcgctcttttggcatacctgtagctccgttcacacttcccaaatttaggggccatccacctcccccggcctctgtttcctcgcgaccttcggtcggtggcccttctctcaatcctccattgactcaggatgacatcgccaagtttagccgacacttccaaatggccggaccatcccctacggatggccgactcatggccgacaaagcaacagctatctttctgaagtccaagcttccatctcaacagctcggccaaatctgggatctagccgacacacatgatagaggaagtcttgaccagacagattttattgtaggaatgtactttattcaagccatcatgtcaggcaagatcagagaagttcccttggtcttgcctcctggcttgtatgagaccgcctctggtagtcaaccggtcggaggaccgtctgtaggcttgagacagatgaccgcttcgcctgctcctatttctagacaggtcaccggtcaacaaattcaggctcagcccgctactccggtccagcggcagctcaccgggcaacagcccctcaatgcccctacttcgtacatgtcccctcatctgaccggaggatcgttttcggctttctcctcttcgactcctcttcaacaatcgtcaccgtttgggtcatcatttacacctgcgccccaaactgtacaggttccgtgggacgtgacacctgcagaaaaacaagcaagtgacaagttctttgctcagttggataagtttggacgaggtgtcatcgagggagatgttgctgttccgttcatgttagaaagcaaactctcagaactcgtattagccacaatctggttagtgatttcattgcttttgtcctccttgccgctggcgttctgtgattgaaaatatatgttctgatgcttctcctttctcttgcagggatcttgcggatattcgaaaggagggaaatttaacagaggatgaatttgccgttgctatgcatttgatcaaagcgaagattgccggcaaagagcttccagccacgcttcctctgtctttggttccacccagtttaagggaggttcaacctgccccgcaacccgctgctgccaacccacagagagacttgttcgatgccttcaacgatacccctcctgcgtcaacgccttccacccagaactactttgctacagctcctacttctgctgcccagaatgccaatagtgacggtttcggcatgagccccttcggcgcatcctcgaccgtcgagaaggatctgctcggagacgacgacccatttacccctgctagctcaattttgcctgttgctccttcggtatcgtctcaacctaatgccgcgtctcctgctcctcctgtctctcaggccactattcgaagccctcccccccctgttacatccaggtctgctcctgctaatgcagagttaactcaacttcgagccgagcactcttcgctctccgagaaggtttccgaacttcaatcttctggatcaactctcgaatccaagactttggataccaaaaaagaaattatggatctccaggccaaactcatctcccttcgatctacgcatgactcggaaaagggcaacgtcgatagactggaagccagagcaaacgagcaggcggcggagatgaaagcccttcaatctgagctgatatctgcggagagtgagctctcatcccttcgcgctcagaagaatgagtttgacgggcaaatcatgggcgataaggaggagattcgaggaatgaagcgacgattggttgaaatcggcgaggagacagtctccttgaaagcgcagttggaaaagatcaagagggaagcgagacagcagcgtggattggtggcgatcactcagaagcagctgacaacctcggaggcagagaaggagaagactttgtctagtattgcggatgccgagaagggaattgggatggaggagccatctcctttcccctccttctccacaaccccagttaatctgcagacggtcgctcaaattccccttcccgacactcctcagcgagtactgagccctgctctatcaaccacgtcacaaaagagcaacaatccgtttgaccgatttgttccatctcccgccaccgcatttgcctctgtccttcccactgaatccccttcatctccatcggtacagacgccaaaggaacagagtgaagctgttcacactcctgctgagcctatcaaagaccttgcagcagagtctccgtcgtcttcgccgttgggtctggctgctgctggcatagctgccgctggaacagctttagtcggagtaggatctgccatcttcggagcccataaagacgttagcgacactgaggacaaagaggagaacgacaaaatacctcaggaacccaacgatggggtcacagaagagaaagctatctctactcctgtagagccatctactcactcttctgctttcgatgactctttcggcacaacgttccctagcagcacagttgttgatgacgggcttcccgcatctaggagttcgactggattcgacgatacgtttggagatgatgtcgtggcaccttctgccaacgccgatgaatttcccacctcggtttcaaccggtgttgcgaaattcgaccaaggatttgacagtagcttcgaggataatttccacaccccttctaattcagcaatgacactgcagacagggcctagtggcctagttggacaaggcaccatcaagtctccatctgatgttccattcgatgactttgaggcaagctttggcgacagcttcactcctgttgagccttgtgagttgaaaccatttccagtcatccagttttgaagaattgttccgcttacattcatctctgaagactttgatccagctcttccccagccatcggtgaccgaagtggcggtctctgctacagatccccttgaggaggctcaaagtgccgccaaaggtggccaagttggctctgaggatagcagcgacgacgaggatgatggccccgaggatttagatacacgcgccgtgtataacaacgggacgacacttgagtcgtctgacagggacaaggaaatcaactctggtcccccttcaaatcttacgtctacggcgagtgctttcagtacggatgactttgagtctatccctgctcacacagatcatccacttgaccaacctcgagctccgtctgaagctgatgagattccagtagccttcgctcatgcatctccttccatacctgcattgacagagcagactcaacgaagggtagcaccaccaccaccacctcgaccagctcctgttgagtctcaatccgaacacaatcctttcggaaccgaccccttcgaaaccgaacagacgtcaaatcttgattcttttgaccctcttcaaaagcagcctaaagtcggagagcaatcgttccaacaaccgctgcctgtttcggctgtcacaaccgttactgagtctctatctaacatagagctcgcaccacctctctctcccgggttcacaaagcttgaggagtatgacacgagtgaatttgttaaggtttctccgacaaaggatgcctctcatgctcaaaaccatccgaccagtgctcctgcttcacgttcttcggcgtttgacgacgactttgatacgtttgacaccgattttggaagtgatcctggtaacactagtgctttcgtagctactaccgctagcactgtcaatgctccaccatccttgacctccttcactcgaccggttattgctcccgctcaaaacaagaatgtcgatttcgacttcgacccatcattcgccgatttcgattccactttcgagacattcgggcctaccaccaccatcgtatctcagcctgctcaaacaggtgcttcctccgtagctgcgtctggattcagcttcgatgacgcttttggagaagagccatcgcacgccccttctcatgtttcccctgtcgccaactctgcaacaactgttcaagaaacgttctatgctcctcctcaggtccctcctagccaaactgctcaacgacccgagctgccctccaggaaaactgccgcagaacctgatgacattcgtatgtcaaatagtttcctctgttctttgaagatttattatcctatatctatcttcaactgatgcttctctatgactctcttgatccataacaacaatcatggtttctaaacagccgacgtgaaaaagattgtttccatgggtttctccaggtcacaggcgctcaatgctctcgaggtcagtgccatgtcttgcaaaagctgattccgaccatcattatttttggacgccattggtgttaactctcacttgctcacgtacagatcggaaactacaaccttcaagccgcgatcgatcatctcgtgacgggttcttaaattccatgaaatccgattctttcgggcttcctggtgtccatcctcactttgtcttgtttgccttcctatcgttctgtctattcgttcttaattagccttttttagtcttttttcttttcctttttctttttccaaaagtctcgattcacttggtgtctggttaatttctagataatacaatggtgaatatcgtgacttttatgtttgtattcttgtcgttgagaacaaggtacttgaccatgggtgatgctgataatgcatgcatccgcaatgctacaacaaataagaaaagtaatctgagacctaagtacgccctactctattcctccatctcctcttccctacaaacacgaacacagatgccgcgaaataatcagaacgagtttcagccttttggatatcacacgcgtgtttatgatagggaatgaaggtcacgaacagagcatttttggctgctacttcagcctgctccagtagatccgccggaacaaactgatggcgacctttagattctggacagatccacgtgatttctagctcaaactgcttgtccttctcatcagcgtgacatttatgaatactaaatccagaagacacagataggggcaggagcacacataaaccatcaggattgaagtgttagactttcagtgagatatagcataggcaaggtgtagcgcgatttaggaattaagaaaacatacatgcgtgcagcgtgcataaccgcatctcgggattctaaagtatcaaaatcaagcttctccaactatacatcaggtcgcgccatcagtataccatttgtgaacaagaaagttgacggaggatggagagaaaatatcggggtttatgagtcatgtgatttccaccaagatccaacctgattcataaacatacctctgtcttggccaagagctttcccttcccgactgccgttgctctgtgcccaaagcttaatccactgggctcaatcatatagagttgtggtccattcttgtcaacagatccaaaaattgaagaaactccgaaaggccgaacggatgaatagagggtgtagacttgaaggtacagcgaaactcgagagacaagatcctatagtaatgagcaaaattatgtgagacaagatattacagcactcgagccccagagttcaaaagtatgtgactttaccttgagggttgtaggggcacaatagatatctctgtagttctgagcctcatcccgcgctcgagaggctacatgcttggcatcggcaaagagaccagctgtggcctgtacacattcaacgattaacatgatgtcgatcaatcacctgttccgttcatgtgctttcctccaaatgacaaggaaacaactgggacctaccaagccgatgtgaggatcgattgtttgaattcttcgattggtccctggcacaagcaatttcgagtgaacaagcttctctacggctaagattactccgtcctttgtcctaataccgattgcggtcctattgaaggatacatcatttacgacggggcaattgttattacaccatttagttagtacagtagatcttgactattcagagatgaagatggttgccatgatcttcacgaggtgacaagaagaacattagaaactaaccctcctgcgtcaacggctttcccagcatactcgacctgataacatatggcgagaaaaccatgcaaacgatgccatgatcagaacgtgcctcaaatgatcatcctctgatctgaacagagatgaacaaagacaaagatctcatgagaaccaacctggaagattcttccgtccggagagtatgtggaagcactaagatcatagcccgttccaatagacgtcatgatttatgtgaaacgataagagtatgcgtattgatgtagaacaagagcagagagaaaagagatggggatgatcgttgtcgttgtcgctgtcgttgatgagattcaaacgattttctacgagcaacttgggacgtggaggagatcattcgagacttacctaatatttttgaaatctacataagtggtcaacccagtcgtcggcctgagctatctacaacgtacggcttgtccggatagattgttgttgttagtaaacccatcatcatggcgaacatcatattgtaagctggttcttctcttgatgttgttgttgttgttctcaccagattctagtatctggcaggaagaggaatcttattctttctctattctactctttttcgttgtttgttccgtcgtgtcagtaaaactctttgggctgccttactcttcatcaatgccatcgccattctgaatgaggaccgttttctctctcgtagtacgtgtgtctacaaatttgtatcgctctatagagcttagagaacttacagaaatattctcaatctgtctttgggaaatgcgttatgctcgggtgtactttatttttccgctctgatcgtcgttcatcgtgcaacttcaagttggctggtcatcagcagcacctcaggtggccgtgaattcatacggcgaggccggaacgggcccaagcgtgaaaacgaagctgatcaatctgataggagcaatcagaatgcttatgcctagtaagtctatatgatgcttgtgtcatttgatatcgagaaatgacagcataggatcattttaagtcagagatgacaccgcagaaagccatcactgacgcgtcaatctcgttactcttcctgttgaacatctgtctaccagtaccgctaatcatgtgcaatgtcatcgtgattctgtacgagctagccctgggagggtgaagcacaataaaataaacaaatagttctcttctatcaatatgtataagctggtttagaccttaatgtgttgtaacgccgtccttcttgctgtctttgcttcaccctcattgcgtctcttctccgacatcatttctcacgagaaagtttcagaaacaaatcaccgagaagtcatatttagctgttccacaataattacttcttgggctttactgccgctgtgccgctcctgcctagtccgccgcccatggtagttatcgtttcagccacaactccagatccagatccagatcccgaccctgaaccaaacccgctagacccgcccatcgagtttcttattcctggagatctagagttaagaattccaacccctcccgcagcataggcaccgcgagagttcatgccagctgatgaagcaggcgcggcctccattccagccgctcttggagaatttggatgcccaaagcccacctggcctgtgccgttggttccgcttactgagctcatactacctgttccaatctttcttcttgctccagcacccggtgttgtggaagaaacgacaggccctgaacttcttggtacaactgtacccgtgcctacaccgttggccaatgaggcgggggtgttgactccagcgggaagagatgcaacactcgcatgccttgaagaaacccctccatcgccgctgcccccgccccctatgctaggttcaagtggccgccaggaagagtacgcgttgacttcatcttcgagcccggaggacacacggcgagctttctcgtgccgagcctgaacagaacggaagtgatgaataagctcgcgccatttgatttcatccggagacgacagttttgccctaggtgggacagcagcggtggtggagtatgccctggaagcgatttatcaaacgacaagccgtcagatgactttgttcatctgaaaaagagaatggagagagatgacgtacggtttgggtatatgaagaaagcccatcgaactgactgagttcaatcgatttcgcagcgagacaaaggctgtgctctgcggcaataacatcaatagacctgaattgtgcggatggggcagagaaaatgagtgaagtgcctgttgggttgaaaaggcaaaggatgggcttaccgtataggcatttgaacaagtgaggatatttctctggctcaagaagctgcagacgtagagctgatcaaacgtcgtcccacagttcgtaaatcatagaaatcatcagttcacagtgaacatcctagtttacatatcaagtagaagcttcaagatgtttgttacgcacaggtgaatacaggggactcaattaactggacaagtttatcgatttgcacgagaagttggacagtgatgtccagatcagcactacctcgaagaatgggagctcatcattagtatctcatggtaattcatagaataaatcaaaatgaattgcagaccaactcacaaaagttgtagaaggttcgatgcgtgctcataagcttgagctagtaggcatagcgcgaagacagcgacaggggagtgacaccaggatcgatatatgaccgagaagagcctagattgaagcgcgacagttgatagcaaaaagtcaagaaaataggtcagcttcatgagaactgcggtattgcattggctgtcgggcttttgcttacatttgaccgtccttgggattcaaaacagagatatcaggagaaaattggtgataaatacgagcggctaccaagcaataaaagcttgtaatacagacaagcagatctgaaaagctcacctttgaatccaaatttttgagccgttttctaaactcgagcagttctgagctagtgatgagaatgatgttgagcttttgtaccatgctactggcaaactccaggtcctacaggtggtagagagcataatatgtcgtattcatcactgatcttgttatgaatagtattgatatgatgatgaggagagacgaacctcttctttttctagaatttcggcacatgtccggtagatccgttccgagttaaggttgacacacagctgccgaatgatcagactgcctcttgtttctaaaagtctccgatctgtgctgaagagatcaaggagattcaccatgaagagagtgaagtacgagtctcccgaggaagaagatatctgagccagtaattgaagatctcgcttgatgacttcttcagacgggtcagataaacattttagcagaaccgggaacgttccatcatccatggccaaaatctacgctcgcagacatacatatacgtagatatcaaagtcaatacaggctattgttagaccacagaacgacaacaatgatctgatttgacaaacctttttaggagctttttgatgcaacatgatcagccattctaaagcggctactctcgtttcttcatagtcacttaagaattgcatcgtgagtacattcactgttgcttgatagtcaaatgggtcttcctccgaactagatgatgaagcattctgggtcgtatgagattcgtgctgactagacgacggaatcggtgtgagtttaggtaactcgatagctccacgtgacgctggagattcagactgagaggtattattgttcagaacgggaaggcgaggtttgctggttgagcccgaggatgtaggttgcaaattagattctgtgttgggctcgagagggccactccctcgacgaacgggtggaggtgctgtgttctcttgagggggatcagagcttatgggcgcaggcaccgactgaatcactcggaataaattcaggttggtttgggctgcagcacttcggctttgtgatcgagaattcaaccgttcaattgaaggattatgagtcaagcagaaaacatatgctgaagagagctgatacatgttcttacatagccggagaaggatgagccaaattcggtaagattgcaggaacaagcttcgatgttgatggagtcatgacatcctgcgcgaatagaagaaattctgaaagccagtgcaaagcggtttcctgtatgatctcatctaaaatgatacagggaaatgttcagttcatctgcaaatgctcttgagtctacgatatattggcgatatcgcgatagcgaaagcaccaaacaacaacaacaaacaacaaacaacttactaggatatgatacctgtctgagcaagatatccatgatctcgacgtattgaaccatcacgccttgtccaggaatccatcctccgcttccttttccttcccactcttcttcgagatctttcaagtcagcttcattcagggctgattcctcgtcgtaggcctcatacggactctggctctctgattcatttgcctctgacttgagatcgccacgcttcgattttcgagtggcttgagaggctgcaagctgtcgagcagctcgctccaatgtttgttgtttcttcaccttagcgatttctctaatctctcgtagaaagtcggctaaaacgttctcggtcgcaactcgcacgtcgatgttctcgtctgctaaatattttctgtttatatatttccccgtagtttgggtcaggatgatgggaagattaacaaacaaattggcacaatccagaacagaggactaggctggagggactcttacagaagaccatccaggaacgatggcagatatgagacaagttcgagctccggaacagagtctagaacagtgatccagctaaccaaatgatttcttgtttggggagcgatcacatatattctttcttcaaggagcgggatgaatttctcaagagaaaagattggcgggtcatcatcacttccatgcagagatcttgtttcaccctccttccggtctgtgtaatgataacgattttttgagggcgttgtgtgcgaacgatgtgccacgtatcgcgaggcggactccgagacagtctacgaataggccgacatgaactatgagcttcagcccagaaaaggtgaccatgaaaaaccaagaggctcacatctttaagtaatctgtccaacaactctgctccattgcgcaccactgaattgctatctatcgcaagctatagggacattagcattctaagttcaactctgattgttgaaaactacttaccttacttagcgcatcaaagatctcgttgaagtatctcaatagctcatcttgggcgactttccctctgaaaaggaagagagttgtcataatcattatcagctggcctctgcgattttccttctctttcttcttgagacaaacatatgagagagactcacacattatactgtcaatgcgatttggatataggtagtttgtaagaggacatgtttctcttcaaaagacagccagacttgcaagaagaaatcacgaaccacacattccactgcaaagtatctgattcgattatcttgatctgggaaacaatcaagaaccgagggaatgatttgctgaaagtaagggacgatgtcttctccaagagcgattgctgcagctgcaaggccgatgaggcctccattcctagtcgtttgactgtttgacgggctgagcatcgcatgggcttgatcgatgatctgagggattcgagcctgatccttgagatcagctgtgggagaagagcattctcggaggagtttctccaggtctagagcagcattctttcgattgtcgtactaggttcacgaattgatgtgatatatgccagattagcgttcctaggacgatatgagaggcccatatgctctgcctgaagagacttactttgacatgattctacgaagttgattaccagaagtttcgattcagatttggtcgaatataaccaagaacgctgtggttgattaaggagaagatagcttacgagtcctttcaagataaccggatctggaatgtacatagaaataagatcgagaaggacaacatgatcagaagggccgttgaaaggtgggttcctctgagtgatgtgagatggttatgcagctcagacttacccatttctaccgacccaagccagaagaattaacaggacaggtatggaaagtggattcagcgatgtgtgcttaccaggcgcttattgcgtcgtctttaggaagggaggacaaggatggggtaagatgtaggagaactgtagagatggccggaagacgatcaacggtcaattcggctaggaccgcctatatgaaaaaagaagaaacccccgtggatttgcctatcgttccagaccgtaggagacatttgttttcaatcaattcttaccacctccactattcaacaactgattttctactacgatgatcttatagcattcacaaacaggtgctcatcaagagacagatgtacatgacaacaaagttcatgccagaaacagcttgcgctcgaaaataagtgcggcggagcagaagaaaccatcattctatataagaaacgcatactccataaggatgtagatattaaccaggttacagaatagacaactatcattgcctgaccacgagcacacgaaaacgaaatgtcaagggatagcttagttcaatcgaagtattccagtcgctcctcctgcagcagcgatattcaaatcagccgactttccaccagcgaccttagacgactgtatgttgacctgggctgctcgctcttgagagaacaagttcttagtcgtcttcttctggactcgacgagcctaaaaataaggaaataacgatccagacggtcagagccagatgaagaatcagaatgaaaataacattggcatgtactgacagatcgctcttcctttaccgcagcctttcgagccttcttctcttctttggattctactttcggacgagtgaccgtctctcgtcgaactgttcaatattgaagatatgttaggtagcgccggggaagcttttgatagcaaaaacgaacaaacatactggtagtctcatctcctccctcctcctcttcttcctcgatatcttgaaccggctccttctcaaatcgaccatttcgacccttccgacgccgggtggtttgttgttcaccattgaccaccgggaaaccagtcttggggtcaatagcgattctcagcttgctcttctcctgtatcaaacgcggatgattgtccagagtagtataggtacctgcgtgtcatcattcgtcatgatctgcgtcagcataagataatagatgagagaaatcaatacgaatgattgctcactaagaatggtttcacaatcccatcctcgctggtcctctccaatgatggaaggcatcggaagcttctcttcatcgctctccccccaaccgtgctcttcatcaatcctgttagcctccaagattctcttctttcccaacccttttcccgctccttctccatctccttccggaacgtcatccattgcacctccacgaagcgtcgccaatttgcccataggaccatccccctccataacaggcttcagcttgttacctacgatctcaaagttatcaaggaagtcatcaatgagagtatcaaagtcctcccgagtgacgagctcgggggcatcgatgggctcgccatcagagtcgtactcctgatctgaaggatcatcgtcgtctgaggaatcttcttcgtacattttttcgatctattcagtgatcgaaagagaacatagtttaaaatctggaagaaaagataaatccttggagcagatcaaaattcagatgagacgaacctggtcgaactgctcgtctaatacactaagtcctttgtttcggaacatactcgaactgctcatactaaatccagttgcatcactagccgctccctttcgccttctttttcctccgattacgctcaacggaggcaacccggagacggtatcccttccttccgagcctcgatcatcttcatcctcatcttcatccgaatcgatcgaacgaggagcgctctgctgagcctgcttgaacgccttgaacttcgattgccagtcggactcgtcctcctgagcaattgaagaggacgacggtaatgacgcggcagccctggctgacttttcatctaacccccactcctcaaactcatactcctctctttcttcaggatcaactgcttctcctgtgtgaagtagctcatctagccagtcgtctccgtctccggcctcgaccgcctcctcttcttcctcagttgcgataaaagcttcatcgtcgagagcctctaagacttgtcttaaatgagggtccatatccggttggagaccttgaagctcggccggtacgttcatggtcaatcgagaatgagcctgattgtatggaatttcgtcaatcgagggaagagcctcgtccggaagagcaaatgacttggagccggatggcgcagaagcggatgtgcgctccgtagttggcttcagaaaatcataagggtctcgcttggcattgcttttggaagtcgaggcatttttatatttggtggaaggggcctcgataaggaaaccctcggccgttgggtctccttcttcgcctccgacaggtcgaaggtgctgcatgtagttgtactcggtgtcgtcgaagaacactccataatcggcagcttccccaatattcttctctgcagcggccgaagtgatttccgcgtcgaatccggctcgacctttaccctagaatggatgatcatttcgacatgatcggagaagaggaaaaagcatcaacagctaagtgagctactgagaaccggagtggaagtgagataggaaacgatatctaccttagctcgattaggatgttccacgctcttcaagactctcgccgaagcgtctggatcattgatcaacggatctcgaagcgacctatggacgagctgataatgctgaactcctggccttctgaagattgatattggtgccattttgaggatgctttgtgggattatctgaacaggatgaggttcaatcggtccgtatagaaagtttcccaaaaatccaatttcgtgctgcttacgtaacctgtctatatagattatgtaatcattatcttggttttccccttcttcatcacctttaacctcttcttttctcttccatccatttccattcctgtccttctcaatcttcttcttatttcttccttgccctcatcatgacgcctaagcctggaacagaatcctagtatgttcagtgtgttgtttggaaagactcaacccttcccatggttcatcttggaatttcttcggttcttcacttgttgacacgtcttgcttctgtttagcctggtcatcggaggttgtggtttccttggtcgacatatcgtggagatgcttatcaaccgaggagagactcaggtcgctgtgtttgatattgttcagaggcactttgacacgtaagtccatgatgttcggttatctacaccacagcagacgtcaaaacagagatccatcgatgtatcgttcatcccgaatcttgctagatctccggtttgacacctcacgattggaatttccttctatcatcagactttgaagcttttgagctgatcaatcatgacatttgtaccctatagcaacgtttcgttctatgtcggagatattagcgatgaagatcagatttctggcgctcttcgtaaagtcagtttcttccaagatgtgttcgctgtcatcacaatatccatttcggctcgcttttcattcggacttaacctcattaaggatcatcttttgtttttaatacggtgcaactgtgtgcttgattacagttcaatacatccgttgtcatccacaccgcttcacccattcatggattgtcgaaggagatctatgagaaagtcaatgtgatcggcacccagactgtcatcgcggccagcatccagactggggtccgcaagcttgttttcacctcgtctgccggagttgtctatgatggagaggagaacttggtcgacgtggacgagcgccttgattacccaaaagtggccatggacgcctacaacgatacgaaagccagggcagagcaggcagtgctggaagctaatggtaaaggtggtttgttgacttgtgctttgaggcccgccggtatattcgggtcagtcggattttctcccttgtattatgggtctgaacaaacattacccagttcttgtgtctgatcgacgttgtccggattagtcctggagatcgacaggctttggtcgggtttgcccaggtaatcaaaaacaaccagaccaaattccagctcggcaataacacaaacttgttcgattggacatacgtcagcaacgttgcccatgctcatctcctggctgccgatcggttaggaagctctgtgagtatggagtcattcgacgagcctcttcaacccatcgaagccacctcgttaccttctatccgaattcctacatcggattctaagcctcttggaccgaatccgaatcctaccgaggatgacaagaaactgagtcagatctacgccgatgcctcgactgcgcttgacgttgctaagcctgtccttcgaaccaagtttgaccagtttgccaaccccgcccctgacccagaagaccctgaagccgagaagccagtagagagtgtttcagttgctggccaggcattctttatcacgaactgcgagccggtctacttctgggatttcgctagagcgatttgggcagagatgggccatgttgcgccttggacgatttctttgccaaaacctatcggaatcgtgctggcacgactggccgaagggtgggccaagatctctggcaaagaacctgggttcaccgcttacagagtcaagttctcgacccaggcaaggtattacaacaacgagcgggcacggagggtcctgggatacgagcctatcgtgagcgttcacgatggaatcaagatggctgttgctgtgagtaatcgcatcactcgaaaccacatataaagaacgttgtggagagcaaagagactgatcacgatccggacacgcttttaatagtggtacaaagagacagaagccgaaaaggccgctgctatcaaggcttgaggggttcgacgtctattcgatctcgcagtcgatttagtttgcaggcttttcgaaaacacttcaatatctactgtaaaaagaaaccctatcattttaccatcttccctcctcaatctgtgtctcacctccgctaattacgaggaaaagtttgcttaaagataccacatgtcttgttttgtaatttaaaaccctcgttcctgatctcctctccactttcctttgctacctataatatcaaatgactctatggccgttgttttctattcgtaaataacccaaacatcaaccaagccttgtatgcaatgcattccaaacgctcgtaggcttgtagattcgcagcacattcgatatataagcacagtctttcatttattcaatcttcctctttttactactcggtgcctgttcgctggtcgtgtcctgtgcgaccttgcttgacccgttcgcctcacccccagcggaggcagccgccgccgccgccaatcttgatcgctccttctttccaacccgtttcttccctttacccttctcccccttgacctcgatgtcgtttgcgcccgttcctgctgacttcctccacttgttcttccggtcttccaccggttcttcaccccaagttcgacccttgagagacttctttagttcccaaagacgcttatctcgaccaactcgaccggcaccggctccgccgtctgctcggaaagcagcatactgcttaatgctaaggaactggttaagctcggcgtctgttgccatcaaaatttcggctggggtcagaccgtaattctgcggggcggtcttggtgtaatggaatcgcgttgggaggtttccaatctgtagaataggaaggaagaaaagagagaggaagaagagtaagatttcaattagaaatgacatcggatcgatgaaacgacgaggcaaaagaaacgcggttgaacgacgtaccatatcttcatgatccaacgcatagtactcgtccatgatctcatctacctttcgcttcttctcttcctcagtaccctggaaaggaacaaccttcgaaggaccggcttccgcgttctcatcatcctcaaccccaccctccaaggtcgaagcagcggtggcgagaatatcgcccttagatttcttcttcttctccttcttcttcttcttcttctcttgacgagaagagagcacaggctcatcagctgcttcagcgtcctgtgagtgttttattattatttttgtaatcgggttcagcttcgacgattccgttgaaacaacatgaaggggaaaaagcttggagtaactaaccatgttgatcggaccgtcgtcgatctccatgtcctccatatcctccatgtctccgtccataacctcgacctcggattcttcgccatcttgtttctgctccataccgtacgcgtaaccttccgctccaccaaactcgtcgtcccaggtcggtttttcgccgtcctgtcgtagacaattccaaaatatcagtacatattcaagcaccaatgatgtaaagacttagcaaatgcttgggtagaataaaatagaacaaacatcttggccttcatcccactcgttaccattttcgaatagattaagcattttgttgtcatgagcgtccggatcaaagtcagcatccagatcgaggtcatctagtgtcaaagcttgaagggttacgattcaaattatgtaagtatcgatagtacgcatgaagaggtgggaaaacaaatgaaacaagcttacttcgaccatctttgcccaagcccaacaaggccaactttcgctcaatctccttcttcttctggttcttgagcttcttcttctcttcctctcgcttaagcttttcctcggcttttcggatctttcgggcttctcgagcgtccttccgggccgtatccggtcgtcgtgcgacagaggcaagctgtcggggatgtgtcggaatgacggctgcgtcgctgtataacaaagaaggcaggcattagaaacaatcctatcttgatatgacttgaacagcaaacaaagaaagggcgaagaggaatgaacgcacggctcttcgaaccggaaattgtagcgagtctcaaaatcgtctgccttgtcctcgaagtcactttcgttctcgtctagaggatccttttcatccgcactaagatcagagttttcttcctcaggcttcttgggtttcttcactttcttgggagccgtgatctcattataggatgggacgtgagtctctgaacggtcgatccaacctcggttgaggatgtacctatgatgaaagtagtgaatcgttagattcgtgttatacgctgcggaaaatatatatgctggtcaaggtggaacgtactctaataagaattcttcgtcagctttcttcttatcctcctctgaagtcttactcttcttcgacttctttgccttcttgacctctccttttccgttctcaagcacatccgtctcattttcctgcgcatccttctccttctgctttttgtcattctccacctcgtccagccctaaggcctctctgattcctttctcaccgcctcccgagcccagtaagaaagctctgtaagcttcatcttccatttcctcctccggaacgtcatccaccttctttttcacaaacagcccatcgtcctcctcttctccatttgcaccggatccaccaacagaaatattgaaagcatcaagagtctcttttcgaagtgcttcttgctcctgaacatgactggggagtgctgtctcattggttccgttgctaagattgggattggctgagtctaaaagagcctgacgttgaaagtcggaaaggtgaataggttttgctgatttgggcttggaagattgaacaagagggaggttggcgccggcagaggcgaggagagcggcttgttcctctgtatgagaagtaaggatgaaatccatgagtctaggctgaaacgacagcatacatgatggaagaataaagccgatggagaaacaaaccttcaaagacattccgtccgacttcaacgccctcaccacgacgaatcctggtcaacgttcgcaggatagcagcatccataacaggcgtcaactcctctccatcctcatcttccgtctcggactcagagtcggactcggagatatcggagtcatccgatgcggacggagcagcctcgttaggcttcttgtcgttgttgtctatcaagagccagaggcaggaagaaggttgttcagtcggattcattcaaatgaagctcaaagaatgtatttaggcatctgaatgaaagcagacaaacatttcttccaaggctggtgtttcgttggtcgtccagacatagtcacagcacgcttcaggcgatgtgtacgttgagacaagagaggaactcaggtaggtatgtggagggataccaaggggcttgatcaatcaaagtctgttgaggcagggatacgatcgtcgttttgagcaacaggtaatatgataatttggtagagcggtgcgcactacctaatatcagcctgatgcgtcacgccacacctaagcctggcacatcttatgtcagtcttggcaatccatctaccatctttgattgtctaaaagcccatgtctatagatagagccagtccgagtacacaatagcgctggacataagcatctgattgaaaaagttccgttacatgaagaaaaaaaaaagagagaacgagaaagaaaattgagagaatgccaaagagagacgaaggggtaagacatagcctcatgttctaccgacagaaaatccaaaatgaaatgagaagaaatgaacagccgagaagagaaaaacgttttctatgagcaagctcgatgggaatgaagataaaaataaggattgaaagggtccgttttgattgatgcacagcacaatctacttggactgcaagaagagctcgttgagcaacttgatggtgtcttcagggcaggtgacatcatgaccgatcgttcgctcgtcggtgtagatttcgtaatcgtttccaccctgtgttcagataaagaaaatcaaaaaaggttaagtatatctggagcgagtcgaaagcggacttgaatgtacaaaccttgtaggtctgaattcagggatattcgacaaagatagccagatgggaatagataggtcagccatcggcatactatacaggcagctttcagaataaataggagcgacacaaaccttatctccaaagaagtggacctcggtgaaaccctcgggaatgacgtactgggtgagagcgtaagtcttgtcccaacctggaaatgaaaaaaacagaacatttcaacggatgagagatcggtaccgcatgaaaatacgtggggaggaaagccacttaccaacagggaactgtccgacgtagccatgtaacgagaggtaagcaaatacacacaagttaactaaaatagcctatgcaaaggtgtgttcaagcaaaaaaacctaccacatcgaaagagatctgtccaccgattgagaaggtcaatccgtagtcagggaatttctccttaagcgcagcaacgaatttagctcggagaccgtgaatcttatcgtaggcctcgaactcgtgtcgctcttgaatgctgtggtagaatggcgagaaggacggtgcgtggccgtgaaacaattattgaaagtcagaatttgaatcaaacggatgcttctaccagttaagcaaaagtatgtcttacgaagcgtttcgaccgataggagatacgttgatcataccgtttcggaactcaacgaaggttcccctgaataaagtgaatcgagaaatggtttggtgagtgatattctgataagatttatgaatttggggaacgtgatgaacctcttgatgggaatgtccatatcggcgatgtagtggaggataaagttgactagaggcttgtacttgtcctctcccaagaacttgataaacgactgagaggccaaaggttggccaagcttgtaagcggtcaatccgttctcagcaaagcagtaatcgaacgagttgatgactgggaggggtcaaaaataacccaaagttcaattagtagggatctggaacagatgatttaaaacgagagcagacaacaagatgcgaagaacataccatcggagcctccggtgctgagctgctcgataattttggggagatcgcttccaccgacaaaagcgatagcgcagacctgtctgagcttctggagggtagcgaggatttcgggagaggcgtcctatgatagaaaaggagccataggtacagaagggtcaatagtttagcaagataggatatggaccttcgggaggttcagcaatgtcagtatatgaaaggaaaatcacctgtctagcaggggtaagggtaccatcgacatcgctaaaagtagggaggaagaaggcgtgcattgaattgtgagctgactgtacgttgctaatgcacagaaagacgcgattaagggaagaaaacaaaacaaacaagaaaactcgaaacttacaacatgcagatggtcttgggcttgggcctcgactcaaggggaacaataggagcgacggtaagaacgtgagacatctttaagagggctgaaaaggttagaagaatgagagagggagtgtcgttgtagtggtggtagtgggtactaaagaaagaaacgaggaaagatggacgaaaagggaaaaagttgtgttcgggacgagattggaaatcacagggaggtttaagcggaacagcagaaatgctgttttgggtcacgtgatagtatttaccccactgtcagtgttaggggcggaagctgggctggtaacggaagggttacgaagtagtaatcacacaaaactcttgggtctcagaggaaaagttcaggctcttggaactggaagacagagtcgataggaccactgggatgagaacaagtgaacgagtacaaggacaggggaacaagaaagtaagggaacaagggaacaagggaacaaggtgagaatgagaaatagcaaaggatccaagcttgggattcttatgtacaagcggtcgggaagcctgccttttatatagttcttagaccctttgggcatcatgcatggatgcgctggcagtgaaataagatggcagtgcgatgcgctggaagcctagtgcgctggaggtaggagagggaggaatagtggaagtggaaaggtctatgggtcacagcttccaatcatgtggaactttggtcatatccttagcactacagtaccttcacattacttccagcgtgtccgtctttcttcttatccttactccgtttttccagactacaactcaaggaaacccctgcaagatggatacaggtaagattcaacatgtgcatgtacatgcgcgcaacgaggtgacgaagtggtactatacaaagctcatcaaggatgatggcacgtggaggacaaccggcgaaaaaagcggtagtagccatcagccacaagcgcaccctggttacatgaaggttacgatgttgaaaagttctttgcccaatttttttttctcttccctcatcccttttctctctttctttcaccaccttcttttgaatcctacactcggtttgctgaattcagtagccttttcagtttaaaaacaccaaaacaaacttttcaaaatggcccccaagaacaccaaggctgctgccgctctcaagaccgtcttcaaggtcgactactccaagcccgtcgctgattctgtgagtggtccttgtcttcgtgagcaccttagtgtcaaaatgtctaacgtacctttcttctttgttctcagatcttcgacgctgctgagttcgagaagtacctccacgaccgaatcaaggttgagggaaagactggtcagctcgccgacaaggttaccctcaagagggatggttcgtatttttccatcttggttgtatgttgatcagagagttcttaaactaacctttgttctttttttctttcttccttccttcagcctccaagttgaccatcacctcaaccatccccttctccaagcgacagatcaagtacctcaccaagaagttcatccagaagtctgtcggatctggattcatgcgagtcgttgctacctccaaggacacctacaccttgacctaccccaacgtcgctgacgaggaggctgaggatgccgaggacctttaagcgccttccatcggtctttcttctcccaggggtctagtctcttatctttcctactttttaggtcagaataagagacaggcatgttttggccttagttctcaggttgaggagctcttgactgagtttgataccaatgggttctttgtttccaattttccatgttttgtgttttcaaagtgacattaaaaaaaacctgagcccaccttacagatttgaaagatagagtattgctgattattctgaatcaagtgaaaatagacgcacaatgcataatacataatgaaaacgtgcaaagagggaagggagtacagagtgtttttctacgatatctttttttttttttttgatgagcacgccaagtaaagaaatgcacatattgaaaactcttgaaaggccctgatgaaagaacagatgggtgatgacagaaaccaaaaaaacggaaaagtgatataaatgatatatagttaagcatattgggagattctcgacagtagaaagcaactatgagaaagatgggtctaggttcaggcatcgtcaggcattgggtctcttgtcctccttgctttcctgaaaatgacaaagaaattcaaatcacgggtcagaatttttgccaagatcgaagaaaagaagaaaagaacgtacattggtcgttctctaattttcgagtccgcaaacgttcggatctttcgcttatgagattctttcttctgctcattcttgtatcgtttacgaagagcagctccttcagggttcgtcgtcgtctgttttgagcaaaagatttcaaagcaagataagtaaaaatcacccgtagttttggcggttgaagtcagataaaacgacgtacgcgaacgatcttctcatttcgcctagcttgccgtttcatagcttttgtcctctggatggaattccaaacagaagagaacgcggagatcccgactttagcctggatgagagtttgaagctctacacccatgttcctaatttcctcatcacttgggtggttggcgtcgagaacacgttgtataggatggaggatttgcatcaggtactgcttcgtcaaagaaggatccaacactgaagcaagcgcggcgaagagccggaagatagagaggataggtagcgatcgtctaggctgtataaccaaatattcaagaacaccgcgatcagtttatttcaccaacacgatcaaagtgtatatacccagcactcaccgacacttctccgtggacagcaggtcgagtgatcaggattgtcctggccaactgagaaagcttggtgaacagccaagccgagggattgtccaaagctctcttgaacacatcctgctctgtggccgtctcctcttcatcctccggcactatttcttcttcttcctcttcgtcaccgtcatcatcgtcgttcaggtcctcttcttccgcttctgccttgtctacaggaggagcctctacgacttccgcgtcagcagaatcagcaggcaaacttgttcccaacgcgaagcatcgtcccaagtagacgatatttttgacgacctgtatggcaagcgcctcatcaatgctctctcccttgagctgaagcaaactctgccgggccaggctgaacaacccccgaggctgcagtggtccgtcctgatcgatagcagactgactggcgtcgaacgaaggggcagatgaaccaaacaatgtaccaactaaccgggctgatgccagtctcacccacgcatgtgggaacaaaatatgaccggtcacagcatgccattcaaccgtggcaatttcatcagggaatatcttgagaaccttggcgagagtggataacgactgataaggaagctgccaatccaagtcgtctgcaatctccatagcgaatggagagggatcctcttgagcgatttcatatgcctccaatgtagtcgcggagctagccaatatttcctgaacatcaatcaacaacgaagagacatacggcctggtttcgatgccgatagagtccaaaaagagtccgtaaatctgagcggctaaacgaggaagttgtgcttgggagggagtgttggcccagatgtgaatcttagaaacagtatcggctagctgttcagatgttaatcttggaagaagccccttgagaagctcggcagccatttctcgacacttgacagactcgtcattcgcaattactagagcgagacccatgaaaaatgagtccgagtaatcctgaatgtgcttttcgtcgaatttatcgaaaactgcgccgagaagctccatcaccgacagacgaccactctcgtacacgtatgtcaggttgttgaccaggaactgcatctgtttcttcaatcgaccagatccctgagggtaatcaagcaagaatcggagaacgttcgatcggcattgctcctgaacgtgagcagattgactggtcaccatcgtctcagctaccttgtccattacgtcgtagatatcggcgacaacaaacttgcgagagatgatcgagtgaagaagagcaaagatagctgcttgtcgagacggatcctcaaggtctggagtgatgagctcgagcagatagctcatctgcttctgagtgatgtccacttccttgcagtctcgaaggatgatagacaaagtccttaacgcttgctgagaaagatctgactcggtcgaaccggcgtgtttgattgtcttgaagatttgttgaacaaaggtaggaagagcagcagtgagggactcgacgggagctttgacgatagcggctgtggctttaagcccgaggatgacgatatctgacacgacactgaacagagactctccaatcaggttcacaagaggatccagtcgactgaggatatcagtatccgagaacacaaaccggcctcgacggaaagcagtgatgaaaagttccaatccaaagccaacaaatttgtaagcattgctagcatagtgatccaccgctcgttcctccgatcgtttgatagaaaccaagaagtttttaacggattgggagtccttcaaaacgacagacttcttctttccctgcaagaggtgggagttctgaccgattagtgtatggcagaggatcaatacgtcaggaggagatagtcgctcgttggagttgagacccgaagccactcgacgaagcacatcatcaacctgctgtagcaccttgaggacctgagtagttccgagaacctctttgataggtacaaggatctgaccgatcttctctggagaaatgagtcgggctaccagctgaaaagtgtcgagaccctttgaggtggacgttcgaacttctcgcatcttggtcttgaatccttctgcttggagatcttttccagattctccgaacacgacctcggcagcgatagcgaccacatcgtgcacacaatcgtcaaggtcactaaactcggaagatgcgagagacgtaacatggacaaggatagcatgaacagtgaaagcgaggacatgcaactgaggacctctctgtagcgcagccttcatctcatggatcaaaggagcaagccactcaggaccgagtgtgaccgctatcttgatgatagtctctttggcaagatctcgagtttcctgcgatttacttcggaagacctgactgagggtggtgaggagccgcgaaatctgggcatctcgagattgctcaggaaggttgagggcaaccttaacaataccgatagcgataggaattcgaatggaatcttcagtctcgtctttttgctgaagatacgacaatagggatggaaggagtcgagtttcgacggcgtccgcgatatacaaagcctgagatgatacaggcgccaccggaggttctgtcgtaaaataggaatatggaacatatcaaaatgtgctaaagtttctgtcaggataatcattacttaccagctgcaacttccgccgacttctcatcgatgacaatgatgtcgtgctcttctacagtaagttctgatcaaaatcaagaacatatcgcatcagtaactgtttcaagcgcgggacctgactgaattgggcccacaaaaagactcacctgcaccatcttcgatttcggtctcgattactggctcctccatcaagaagtggaaatgatccaggatagagaccactgtcctgatgaagaatttttcgttctccgttttctccttggccagtcgaatatactgccgaactagtccattatatgccgcccatttgagttgctttgagatctttccggtcgaggtgatggcttcattgataagatggtgatcagttttcccgcttgagttgttgatgaaatgagcaagtagtggaaggaatatatcggccagaaggttcgagtttgttatgatattatcatcgcaaagctccgagagtcgatggagagctctaattcgtcgatgagtctggatatggtggatgttggtaaagaaactagcctcatgatcaccgccagccaaaagaggctgcatctcttgaaggatagggatatgaacacacaaggatactgcagtagagagcacagataagatttctgttcgaaccagctccgttcgggtgcgaagtccatttcgaataccagggaagagtactcgagtgaacgtcgtgaggtaactctgatcatctaccatggcagctgtacgctcgacaaatcgacgaagaccaaaagcagcgttcgttcgaatagacatctcttccggatcttggatatagtagagcatgttgtaaatgatgggtaaccattgttggaccgtaagcgtgctccaaagttgctcattgagtgtgctgaaggcagctaatcgtcggtcgaagtcaggttcctcttttcgtcgttccgagaacgagtttatagaaacgataacatcgacaactgcctggagatctgagtcggtaggagggaactgaaggagaacttcgcagagcgcttgtcgagcctgcttcgatcgaagagactggaagagagtggaaagtagattgaaagagtgaacaaaaatagaggattcgcgatcggaaaactcggggatgagaggaagcaaactcttgaagatgagaagaatatccgacttgactctttcgggaacaaccttggcaggtttcctcaacataggagaaagcagagcgacgagtcgagcgctctgaggtccattagtcacgtaggatgccagacctgatagaattctgatctgtctcttagcgagttcttcctttacctgacctgatcccagaggtcgctcgacaagcacagacagattacccagaagctcgtccacgtagggcttgatgatttgattcaccaccgtcgcccgttcattctcgtcatcctctaaacttccgaatgccagtaatctctccacaatatcgtagatcttggagaccacagccggcttgacatttgtcgcagtgagacaagagtagaccttactgaggagctgtgtatcgtactgaacgaggaacggaacagttctggaagtagttgaccagatagcgaaaagctctaatagaccagacggtgcttgggtgttctcggtattgagcgaggcaagccgaggagagatgaacgatttgaaagccgcaggtaggtagagcttgaagttgaaatcgacagaagcgctcgatttgaagaaatcggcgaaacgtttgagtccaagctgtcggatagccctaaccggagtcgtatgtgactggacattctcctcttcgtcttcatcctccactacatcttctgcatccacttcagccttttcttccgacccgacagctttcatcttgccaatcttggtttgagcacgatggataagctccatcgttgttccaagcaaccttggccaagagggcatcagctgaggtcccaagtacttaaggacatctcccagcaaggataagaaaccgatttgctgttttccaggaatgaacacggcatccaggtcagagtcatctctagtaagagtgaattctccagacgacggcccagcttgagattcaatcaatccaccgaaaggagcgagcataagctctaccaagattgataattcctcggtcgcgcaacctgccaaagcagataagatagcctgtttcttggctcccggtccgttactcgcactagacctccctcgtcgagcaatcatttttccgtagagcattcggatcaccaaagggataagttcgtctcgatgagcagggttgacagaggctcctccgctgacaagcgagaatttagtaagctcatccctaaaccggacttcgtctaagagcattttgagactgtctttgtacggagtgattttgctattcttgaaagtgaagatacagtcgagcgccaatagttgaagctttgggtctcccttcgcgagaagcgagaggtagagggagtgcatctcgtccgaccgatagatggccttggggttgacaaacttagcaaacaaggagaggtaggcggtcaatttcaaatggacctgcttgagtgttagtcgagggagggaagtcgaatcggcgggaacaacagggaactcgtcggcgtcaagagaggacgagatgatgttggaccgagaggtgaaactcaaaaagagagaaatgaaatcccgggaatgcttttcggcaagcgaaggagcagcagctaaagcgtggaccagctcgatctcgtagttgagcacatcaagtcggtctcggttgaacggcatccgagactgaatatcaagtattgtagaaggaaactgattagtcaagcactcatcaccaggcctctgataagaggcagactgagggaacacttacatcagcaatagctctcaacctgtcttcgccatcaccctctacaagtgacctcatcagctcttcggccgcctttctgcttggatctctaaagcatctgaccgcctcatcgttctcttcttccttctcctcaataatcccatcagagttatccgcccatgcaggcataggttcttgcaagaccgaatgaggaccttgagaggccaaagtgagctggtgcagcaagagagcccagacctgatcgccgtgaaccgccgcaagtgaggcaagggctgtgtgtgtggcagggtagagaggtcgaaggttgacctttaactgggctattttggttcaagtagacaatgattagtggacgatgttcgacgcatctatacatagaccttctttcatgccagaaagtaggagaatacttaccggtcagaactttgagaccgacatctaatccaaactgcatttcctctttctctccgctcagattttgtatagccctctccagcctcgccacacctacacacctttccctcgcatccttgacgctcaactcgatttcttccattgcaagtgcctgatctaacactgctctgaccgatgtgttcttcgtcggaagcgctaccaaaattttgagggccgctttccttttttcagaggaggatgacatgagttgagactcaaggaggggaaccaaagtttcccaaccagttggagccgagccggaagcaagaataggctgtaagacttgggaaagatttttgagcagcacagagggaacaactgttttgctcagtatggatgcaagcaccacatccgtaccgaacaagatagaccgaatatcggtcacaccctgagcgatggtggtacctgaattattttcccaaataactccaattgtctgcagcacctcatcgaggatgaatccaagatcgagaatgacttctccttctttttgggtggactgcttataagcctgaaccccctctcggagaaagccaacaagagatccccacatgggtcctttagtgtcttctaatcggccgatgagtaaaagtagattatcgagaatcaggacttcatctttggattgggaggataatgtctgagacttgagaccatcgagaagggaagccagatgaggaccgagagtttccctaggaggagatttaaaaatggcgctggtaagaagattggcgcgagagagattgttgagtaaattgatgatatgaggaagactgggggatgtgacggaggtttgcttgaatgcggaaaacagtgatctagaatcaagtcaacaagaacggttgagttatttgctggtaaatacaaggaagaaaaattacaaacctctccagaacacctccaaataacacgtctcctcctcttttccaccctgaaccctcgacgacccacataccgaccaatgcactccttcttgcccagtcgccctccagactttcccaaagagcctcaactgttgaccggtatttgagccaagcaggcagattggtgattggcagaagagtagatacgaggtagacaaatgaattttggagggttgatgaggaggttgaaagcttgaatagaggtggaagtagagaaagaagaggtgtgtgaagagtggctagagtttgaaaacgagatttagttaaactactagtatagggtgtccatgtgatggttaatatgaagagacctactagttaccccctttcctttacgagcagcactaaccactcccaaggcatctaccagcctcgtgatccgcaaaatatcagcttcgtggtcctcctccagagcattggaagaagccttgacaaggacgtcgatgaccccctcagtcatttcaggtttagggctggtgtgatgtatgagcgccgttaaaacattcgaaagtagctttttaggaagcaaggactcggcaggcaaatccaggagagcagacaaaagtgtttggaagaggtgaggggttgttgagggaagaatagggacagggccctgtgtgtgtatggcaatgttggaagggcttcatcagtctcttacgcaatttgtatgcgaatcccaaaaccgaacaacaacaatgatgagaaacaaacctttagcgcttctactaagatcaagccaactccctccctaagtacgtctacgtgttcgcccgtctcctcctccgtcctgagcgagctgaccatgagcccgactactctctcagccttctctcctcgagctcctcttctaagcaagcttccccaaccctctacggctaaccgtctctgctctcctccatttgcacggcctccgtttcggacaaacaacagatgagggacccagattgaccatactttctgcagagtcgaatggttctctggctgaagcagcaggggagacatgggtttcaggagtgccgagagtgagggaaacaacagcgggagatgaaatggagaattcgaaagatccagaagcggaggcaggatcttctccaaaaagggaaggaactcgtccaagagagagagcgctagttgaggaagaaggtccaaaattgacggaagcgacccgcttccgtcttctgggttggtctcttccggatggcgcaagacatccacaaggatgtctaccacttgggacttgttgaataatagtagaggaaatgtttgaacgagtggagttagctccttaaggagcgcttggaaagaggtagataggttgagaagtgacaagtgcgccagatgcagagtgaagggagtggaggtgtaggcacccgtcggatcggtcgaggaggactcctacatatgaaaattgagaacaaaattcggaaaaaagacaaaaccaagatcacacaggttagcctggcatagcctgcttgttccaatcgtttataaacacaatagcgcacctctagttcctgggtaaagtccaacttgggagcgactcggagattgacatgatgggccttcgactggtcctgtaaagacttgtagacgtgccgcttggcatgctgcctaccctgtcccgggtttttcttctgatgtgtctttttctttggtggcatatccctgatgcaacctagaagaaagaagaagaaaaagactaaagaaggttgtgaagagtggacggtcgatggaaacttgaaacgagtggtgaaaccgaacagataaaattgtgggtttaaagattttggcattcgaatggttacgcagtctgtccaatcggcgttaccatgaatcgatgattagatattatggttcacgttgatattcggccaatacaaccaatttgtaatcagaatgagaggtcacgctgtgcttattatttgagtcacgtgactgtttcagctacgacacacgacgcgtcctagtcgatgtccttcctcgtttctacttaatgaggtagactcgtcgcttcctaaatagttactcctaccgttttccttttggtctttcctcttctcaaccctggccaagatggccgagtgtgggatttgtatcgaggctctttttatacacacaaacacatttgcctcggcccaagcgccctcgtcatctttgccttcttcgtctgccggcgggccctcttccggcaagggtgagccgctggagatctgttctcttccttgtggacacgtgttccatcaagtttgtttctctaaatggttctcctccaacggaaaggcaagtaagcgatgcccccactgtagagaggatgtcactcgtcacaatcccgtcaggttgcggttcggaggagacccctgggcggctccgatatcagacggaaagacgaagctgaagcgaatggtcaaatcactcaagactcaggcgaccgatagaattgggatcgatagctcaggtaatgaggtcgagacttttgtcgaagggctggaggaagtcctgaagacattgacagatacgaaaggcaagggtcgagaggatgactggcttgatctgatggaggacctcgaacttaaggtacgtatttgtgcgaattatcttgactacgcgttcgcgtgtatgcatccgtagtccatatgctgaacgctcctcgacctatacttccttcttaacaattctcaggcctctctgaagtctctctcgggaaacgtggctcatctccgtgaaagactacactattctcatcgggtcacctccttgtgtgagactatcgccaagctccaagcggacaacgccgaattacttaaaacaaatcaatcgaatagggaaaataagatgaaggctcttcaagacttcaaacaaaaggcggtcgagaagatggatcgggaaaagattcgacaggcagagaagttaaacgagaaagaaaggggctggcgggatgaagaaaagaagttaaagttggagcttagaatgaaggaagatcggctggtacaagcgatagatgagaagagaagggtatcgaggtgagtcggcatactatcttgaggatatattgttctccctatcctaatgactctttctaacatgcgctgttgtgtatgcatcactagggaccttgtggacatgaaagagtctcttaatgctcgtttagcggccttggaaagccaaaacaccaaggtaagtgatgtatgatcgacttaatccataccatgtgaactgatttttgattatgtacatgtctctttcgctgtctgcatccctccagattgccgacttgaaaaagaagctcttgatccagaaacagatgatctcctcagccagtgtcgagaattcatcacttggtaaacagctctcgacagtcaaaacggccaccgaaatagccgatccagcctcgcattttcctagaaaacgaccgcgctcatacctcggacacaaccaagaccgaactcgatctgatggttacgacgatccaggtttaagattcgatgatgagggtagggatccaatgagcgaggtgtcagatgctagtcggacgctcggtacgtccgacgcgatagaagaaaatcaggaaaccgaacgaggacatgacttagcccttagaggccaaccagactaccggtcggatgaccaagggatcatatatgtgaacgatagtgatgaggaaaccgaggacaaggaggataagaagcgcaagatgattctaaggatgaaggatggtcagacaacaaacggaaaaacaatggaggcgacagccgggatgacttgggcggatgatagtctggaggtcgcagatgttagttggagaagtcaaatcgacgtacccgtcagaaaaccagctgttcgtgattctttctccagttttcaatcttggatgcagtttgcgattgaagtctcaagaatacaacgtgatgttttactatatttgtcttgtatggaggtttctatagaaagtggtgtatcaatcaaactcgcgaccactcgctcccaactcgatcaaccgcctgttccgtgctactcgctcatttgaccgttcatccatagttgacccagcccaaccactttccagccgagctcctctctctagatcatcctctttgcagaagatatccagtctcaaccctaccggacgttctaatatgaccttctcatccggcccgatcccgatgttgccggtacccaataaacagccagtgaacgcatggtcttttgcttccgggccgagatatggctcgactgggatagacgaaagaggtaagcgatcaaaaaagacagacccttctacgatgatgactggattgatcgccgtcggaccgaaagtgacgaagaagccttctgcaaagctactctgagcgaagtttccattctggaaaggattcacccgatgagactattctttcgctctcatggacagtcgtgtactctaaaactgtattactttctataaatgatgttaccctatatagagtttacatgaagatatagagaagtatgattgagtgttgacagaaagcggtcattcagaacgggatggcgaagaaacccgagatgggatatgcttccctttgacatgatgctgaggcctgttgagagaagtagtagagaaaacgaatgttcgtctttgagttggtatgcaggtaaagattcgctgaatgataagaaaaagaaaagccaagatgacgaacgggttgaagggagagtagtctagatggacgtaggccctagcgaccccatcaagtgcctcgatcatcccttgcatcacctccctagaaacatcaaccacgttgaaacagtttgtgtcaatagagaagaaaatcagatcaaatgggaaagagaaacaacctcgtgaatactaacccggtgtcgtgggctttgtgtagagaggtttgcggcggcaaacagatgtcaacttcaacaacgatgtcatctcctaaatgatatacctccatatccgatatagattcgatttgcttgaactaaagattgacaaatccatcaagaatatcagacgtgaatcgaacatccattcatcagttctacgaacagagcagtggaatgcttacacggttgaccaggtacaaaaccttcaggaattcctcccgatcggccgaccttccagacaagttagagaagttctcttcaagagtctaagaagataccaatagatacgaacgtcgggaagtaagaaatcgaaatcaaacgattcgcttttcgacaagaaaaaaacattcaataggcttactttcagccactggaagatgatatacaaggaaagaagtgctcctcctaacggatcaagaagtctgatgttgaatttttcgcccaaccactaagaggatatccagttggtcgtcagaatttttcattaaaagttgtattttcagaaaagagcgcagcgtacagggaatgtcaaggatagagcattgaagaaactaaaagatgaagattcatccaatgattagtcaagacgatgaaagcttgtcaagagataatactacctacacgtcgttctgagcgtcctgagctagtctttatacctcggaagatatcaatcatcagtttgggcttgttatggaaagactgcctctttatggttaagaaagacacaagatcactcacgccctaacgcctgaggatgagagcttgcggcagaccacccagataagacctttgactccgattgtgaccagcatcactctatgagtgaagtcgaagaaacaaagacagtcagaataaagccttcgttcatttaagttacaagagcgtgtacacaatcacgaagagaggtaggtccgctgatttttccggatcactcttggaagacaggatgttgaatagttgagttacagactcgatgaagatctgtattagtttcaagaagaaggattgagcacatcagtaatggtgtttgcaccgctgaaggcagtatgaattaagatagggtacgttcttgactgaaagatgcaatcatcagaacagagaacagaaggatgccgagcggctcgaaccgtcttttgccggtaggatatcgcttggaaattgactagcggttttgaagtgtaaaaacatcagaagactacacaaattaggcttgctggataggggtgacgacttacttttgtcggatgggcagcccgtgcggtcaagtagatgatcagggttgatagaacatccaaagcactatgcaaattaagaaatggactgagcatgatggtctaaaagagaaagatagatttggagctcacctatccataaaggaagccagaagagagattgatccggagagggccactgcacccgccttgatcgagagtaggaacagattgaccgcgatgttgactagagtcaattattcaagatcgagctttatctttagtatagatggccatgttcaacgtagcattcagaaaagagaactcacgattcaaaccccatttgtcgtttctctcttctctttgtctgttctttgcagccaggtctaacccttctgaatcttcctcaccggatgttcgaagcgcatccaacaacggctcccgctctccatcccttgtgacacacacgccgagcgcgtcctgagacatctttctgctaacaaacttggaggtagtctgtcggcggactggccgagggggacgctgagagacaggttgatggaaggatgcaaggattttggacggcagagacgatgtaaggatatcatcgatcttttcatattcgtctagtaaggcgtctaaagaagaaaatcgagggtctgagcgacaggtaggcttgagctttaatcatgaggacgagcactcactctgactctcatagaactctctaagacatttgctcttaatcttcttgagttcttcttgagactttcgagaacgaccaaagtcaggcgagacgtctagaagtaggctaaggtaaacccgaaagaaaagagattacgacaagtatttagcacgcgttgcttgtctacgggaacagcaaaagaaaagggagagagtgtataacgatgctcactctttggccttgcatgcatgaccagatggttcactcatcgtgcaaacaaagtcacacttggttcagagatagaaagatcgatgtaacggatgtatgaatggatggagagatgattggttgaggtcaagcagcatatacggagatgaccaaggcagtgttcaagatgatgaatcctagctgccgctctctatattcctcctgttgtccttatcctctctttgtctcgagactcagtctactaatgttctcaagcagacatacaacgctaacgagcatatatacatctgtggtcatgatgaagaggcagagaatgatggaccagatctgatggtagtactcacgggaaatgagtcaatcagacgtctcctgtttgatcagctggcctgaggacaagaacatcatcagatgactatataaacctgatcatatctctctgcccgttcttctttctttctcttctttgcttgttctcttcttcttctcctctttctcgccatcgttagacaagtatgcaacactcagtctctgatggatacaggcttctcaagcaagagttgtaagggttctccttgttttctgatcacgccggggggacatgatgttgacgacggcattctctacaaggtctactctgtctccatcttcgctcaaggttcgtttcggttgctcaggatggctcttacgcatgcagacatgctcatcaggctaaagatatcaagcgttaatcgttttgtctttccagctcctctcttccggaactctgggctcatctgacacccgattgagcttggtcctagggttcattcctcaaagtgcgcaaatgccggccaagaaggtgagcattcaggatcactttcaagcttcctgaattgacattcataagtacgctgaacatgatgaccgatatcttcctcccgcaggttgccgaagataactgggagatggtcgaacctgcgactccaccccgtgctacacccacgtcacccaacccatccaactggtcgcctcctcgatgggccattcctcacagcccatcttcctcttccaaaccgacgtcctcgatccaacccgggtctaacaatggtgataccgctgacaacacttggagcccaccgaaatgggcgatcccgcttcgacctacggtcaagcaagctccccttgctcctttcggttggaaaccacccttctgggctcggtctgtgcatacacagcctgatgtgcttctcaatccagtctcgttcgtcaaactcagaaactcaaagttagaggtgagagagaagcatacagaaagagtaggggccgatggtgagatggtgtggatacctccgagatgggcaaccaaggcggggctcccgctgctaaactaaggaaagctcatgcttgcactgagagcttgatgcgactctattcgggttgcgcgtgatcagtatcatatatctcgttctctaccgttctgtgtattcaatttgttgtaacatgctaggcgatcttttgttgttttgttatcaatgtagaatagttgtgtatcctccgagtgttgtatgtgatggacttgtaccaacatcttgttcttaatatattaaaaaagagacaccacatacacatctattgatttctttgtacaggtgactattaggataacaacacacaaaagcactacagcaagggaaaagaaaaaacatgtacaaaaaccaatcgcagaatgcacaggctactcagcctgtttggctagatcaagtagcgtttcctctatctcttccacgtccctaaacttgagtactttcacacccttggactccaatctatctctagcagcatcaaatctagctctgaagccatctgcctgtttgatctgtttcagcatggcagacgacatgacttcctcgatatccaaagactgaggctcatcggtaaaaaccccatcaagggttgtcgaagctcctacaggagcgctagccgtcatgcttgatgctccaaactggggtgacgccggtcgagaggcatacagtgggtcaagaacgtcttcagagtaaaccccagcgttctcggtctggcttgtcggctgagcagatgaggatgatagagatgcggacgacgatgacgatgacgatagggtttgttctccgagcgctagtttcgagtctactaggttcatatcaggtccctctggttgctcaacagaagtactggccgttgatgaggtcatcgtcggtgttttttggcctttaccgataagtgaacttgatcggcttctggttgatctcgccttatcctttacagcttgcgagaacgcgcctgtaccgatagaggttgatggtccaagggacgaggaaacggacccaacgtgggatgtcagccgagacatccttcctcggacggaagaggcggatgacgaagtcccagacgagaagaaatccgcggtatcgcttcttggtcgtgtacccttggtaggtgaagatgaaccggaagatcctaggctgagcccatcgggagtatgtgtcgatgaggaagaagaagtattcgaagattgagagggaagggtcgagttcgatcgggcccttgctgaggacattgtagaagaagcaggaacaagaacagatacatctcggatgatgatcgctaagatctgatggggtcgctcaaaggcgatcgatgcgtacagatcaaggtcttgttcagctgaatccccaaagagaagaaacttggatttaggaaacccatccaggatctttgaagtgcaagataagcatacgataagactgatgctctttattctgtcgatcagtctgaaacacacgaagccagacttacctcataaacacctcgagctttccgttccccagctggctcccataaacccttaaagactgagcgaccaccatagaatttgagtttgagggagaagcccgctggaaattgggataggttgaggaacgagttgatcggttcaaacagttcgaacggcgagttggactggttatatcgagaataccggcgggaagtatgagtacaagattcaaacccgtgtaggatgagaaaaggacatacgacgaaatgacaacctcggatgccgccctccgcctgaagctttctgtacaagtttcccattcctttgacctctaaatcttttaggtccttacaaaacacattctgtaccagtccatgcgagcaagaagtcacacatcagtatacatgtactctggatcacatatcgatgcggaaaaaaagattgagacgtactctgaagacgtttctcaagccacccatgatatccgagtgtttcaccgtatcatccagatcggagattattctgattccttttggcatggacagcggagtaactatcgtactcttcagggcatctcccatggcgggcggcttgactttaaccagtccaagctcatttttctctggaaccgcttctcgagatgtgaacgctggcgaggaggaagaagcactgtttgtagtgatatcgggaggtgtaggtgatacaggcctagagcctgtgacgatatcctctccttcggcagagagcattcgagcggtgatctcaagaccccactcatgaggtttctcagagtcgctaatcgaggatgattgagagttctttcgtcttcgatcggagacacgttcaggaaatatcaaactgggttcgaacgaaaacaatcaaattgagcatcaagcataaacgaagaagctcatgaagaacgcgcgagagctccctgtagaaagatatgcgtactctagacattccgggtcttccaccaggctaccccaagggattcgtatagtttccatgaaagttccgttcagcgacgtaactacgcgcatctcaaacaatggccgtccacgctcatgcttctcttccttgttcgatcgatttccagccattccatcctcctcaaccgtgctgagacgtggacggacttggagaacaacttctctatttgggataaccgaggcaaagaacggttggagtctggttgctagattagtgtgcatatccatcaaagactggcttattgtatgagcggtgagagaatctaatgcggaagatggggtcctggctgaagaagtctcggaagaggtagaggaagagagagtaccagacgtgccagatggctggaatcgagagtgagcatgagagaaagaagagtgagtcgtatcgattcgaggcctaagtgaggccgaaggggatggtactatgtgatttggcaaggaggatcctgaattttttcttgctgaagaggattcgatcgtggacaggcctacggagcggacagatgctgtatccggttgactagtcttttttgaggatgaggatgaggatgaaggagaagattgaaagaagggagacagagatatatccttcgtctcgtcagtcggagcgggcgagtcagtgatggaagattcagtatcacggtagtatgtgagttcgccattggactctgtcaagtaagactcgccccggacgggctgaacccgcggagtcactggtaaactcggaaggtcggcaaagtttttggccattctgttggatgcgcagattatgatgtcaagtggttgaggaaaatcttggttctgatgcgcctttgtgaaatacatccgcacccttgaggccgacgaacaagaaaggctgctcaccgagtaaacatccgttgggtccggctggcttgttctgggggccgaagggttgtacaaaatccagaaatatgaatgaggatgtcgaaaggctgtacatggtctgtgagagagtagggcaaactgtcagtaccttttaccgttatgatgcacaggcgcaagagagtgattaaacagagctctcactaggctcagaaggacttggctcagaatcgtctagaggaactttgacggcccaccctgggaacacaacgattctttgatgcgatacttcgaatggagctacgtatcgaacgaatttaaggaaaagaaaggaaaggaacagtgagcatgttctgttcaattatatggaaaagagagggggcaatgtcaacgaacctttccttctcctaagccatccaccgacggatgctctcactcccggtcgatcgccaccactattgccggtagtgacacctccgtcgaccatatcggcagccctgtccagcagttcctgctctttgttttgaccaccaccgatagccttgtgggcgagatggccgacgttgccgacgactgtgccggcggtcccggcgatgccggccaaacctttaccaaatccggtcgtgagagaggaggctaatctggaagacgccctggaagacaacaaaggtcttgaagttacaagggtgtttggatcgagatttgatcccgaatgaggaagagcagtcggttggttggatcgagaatgagaatgcatgataaaggaccgacggttatgataggatagtggtgaagaaatatgaagccgcggtgttgaaagcttgggcagatgaatgtgtcgattgtatttggattgcttggatagaacaagcagagcactggcgatcatccaaagaagagcagaggaagatgaagagtgtgtatgtatgtactggtcggatagaagagagattgaaggtgagcaaagaagaaagtaatcaaagaaacagtgagagaggagaggcgtcatagaacctgctaaccctaacactgagcgtagtagaccgtgtacttgaagtaggcgagtccgctttttgcgcgctctcttccacacactcatcctacggtctcaccattgcacctgcatcttcttcttccgttcatctcctattctcccagagtacatatctcgcagaacacacgcgatgcttggccggtcttgaagaggagtcttgacggaatagagcgaggcgctgcttacctaatcatgatgaacttacctaatcagccctcgcttacctaatcagatgtcccgatgacgatttcgaacggagtaactttggatctttcttctggctctcttctatctatccgtcgtctctccctatctatccgttcttttcctcttcctttctttcgaacatacactcaccgatacatatatatttcagttcttattcggcttcctgaaatgtctgctgtatggggtgaagagttagagtggcaatttgagaacgcggctcagctctggtctggtcagtctgctctcttttcttctttcaccaatgtctcacagtatctcctctcattgctgaacacacaacctgatcggttgattatctgatgacatcagaactcgaagatacactccgtataccaaaacggccgtcgcttgagcagctcgacaactcttttcttatgtactctcggatttgtgcaaactacctaggtaggtcactctgttcccttcttctgtcctcgcttttccaaccctaatcgcttgttccgagagactcatctctttacccggttgcatcccattctcctatcttccttgtcattatcgttcctgctcacttactaactttcggctcttcttattcctttcaacttctttccttgtatacgtttctaacccatgtcacccgcctgacatagatatctatctgacgaatccgttagatcttgaaaacgcgcttatcctgctcctcagaagcgtactcttcaagttccactctaccagaatgatcgatctgataataaaatgggtcaagaaagtacgtgtctcttcgtaccgagctgaacgctctcatgaactctacagctaatcactcatacttgtgaataacctctttgcgttcaaacggaataggggaaagacccttcgttcttgtatatcctgctctctatccttcttctctgcggccaacagagcccctccatcttcaaaagctatgttcgttggcgcccagtcattccttttcttgtgaacgtgttggatcaagagattgtcgatgttcgtactccgtcttccgtatcgatctgatcaagcgtctcggaaagcctgaccaagcttgttctgtcacttgttctggaaataatgttggagaaacagaccagcagagtgccctgcaacgaagtgtcgatcgagcttcggctgagagccccttgtgctcatctgttatatgagctagcgcgcgtccaaaagctagactcgtccgatctgggtgagtgccctatcagtacttatgctccgacctagccgtcttgacacactaactcttgatgcaatatccatgcacacatgctactcagagattttcaacgaacaattcatcgatcagctgtttgagctcgtcgagcggactcgagctatggatgatgagactttgaactatgcgatcatcaaacttctggtcagcattacctgcctctgtttcaatctgttcctttccgttagcatcacgcgctaaaatatctattcctgacgaatccgtagatcgcactcaacgaacaattcatggtggctaccttgcctccaagtcatcactccaaacggcatcaccatgaccggtcttctcatccacacacgcactcaaatcgttcatcacaggacacgaatcaggaacagagtgcgcatgtcccagccgatcctacagaggcgaaaaaaatgaacagagtgctggtcgtgctgatgagacggttgggcgccagtaagacgttcggagagaatttgatattcatgttgaatcgagctggtatgttttgttccccttgtttctatgtgcaacttacttcccttctacaaaagcaaaagtgtcgaagaattgacctgatcgaaacaatgtctcaaaccaacagaggacaccgcggaggatctatgcatgcaattactcatcctcaagattctctacctgcttttcacaacgcctggcacgaaagagtacttttacacaaacgatctcaaagtcctggtagacgtgtttgttcgagaactaagcgatctaccagaagagagcgagtctcttcgacatacctatctccgagtgcttcatccactcttgacgagtactcaactgcgtaccctgccctacaaacgcgctcacctccaacgagttctccgatcgttgacggccaatccacatgggatccgggagatctctccatccactaaacgacttgttgatagatgtctctccggcgaatggtgtatccaagaagattccgccaaacgggccgacggaaagccggccgtcagccttctaccatccagtcagccccatagagttggagttaatggagcacaacaacaagggagcttggatacactcaacagtctagcaggaacgctaggtgtggacgcaatggcagaagggaccgatgtcgaaccaggggcggatctctcaaagagtctggatcatctgtcgttgttggatcctccaaacagaaacgggaacggctacgcccatcgcgcagatgggagacgactctccagctctacatctgcctcttcctctggacgtcctcaccctgatccgtccgggtcgttccgatcgcacaacacacatctggatgaagttgacaatcttccgttatcaagagctgttccccaggtcgctcgatccgccccaattcagtcgagtccgctggcgatgacggctgctgggaagccggcgagaaggaaaccacctgcaccaccggtaaatcgagccaccaaaggccttctcagaacaaacacgtcgggagcaggggcgggatcagaagataatcaaaggattgggtctggaaccgacgacggaggacggtgctcgcctagacaagagtgggagacgttcgcctgaaggatgtgtatttttcttaggctctttctttttgcgtccttttcttcttctttcctcttccttctcctcctccatccgccttactcttctttccatcgttccactcttattttacagaatacacaccatacaatctgtacccgttccgatacacatttgaatatctacttcttcttttccattgcttcaagcatgtttgttccttttctctctctctattgttgtgttttccgctgctggtctttctcgctcgcactgtaaaccaaaacgacatcaatcgttccgtcgtcccatcgcatgtacatctcatcaattcatatcttcgtccttctcacgtatgttctcttggctttttcttttcttttctttttcctcgtcttcctatcgtattgtggtcgtttatttgatccgggattctgtcacttttcgcgtcttgttcatcatgtctattgttgtttccgaccttcttttcctcttctttctattggaagggagaaaaaaggtcgactgcaccaccaatcggtcccaattgaattctgttggaccccgcctcctcgtccttctcctcgtccctcctttcttttgtcttttcgacgtatcgtacttgttttgcccatcctcttgtttcgatcatgtatcttcgatctttcttcttcttcttccgatcgagaagggcgaataagaggaccccatatgcaaaagacaagtttgttcatggtcatgtatatacatagacccgaaggggattccgttcgaaaagacaaacgaaggatgaggacgactgggatgtgcttgctctgagggtgagacgaacaaagagagaagaagttgtgtgatgcgatgcgatgaagtctgatgtggagcgatttgatgcaagggatgcgatgggatctgggagaggatgatcaggattgatggcgtgcgagagagagagagagaaagagatgtcgagaagaagatctatgaaactaggaaaacaagatgagaagaaaaaaactacaaaggattacaacaagcgagcccggaagagaaagagagaataacgaatacaaagaacaggaagagcacagatgtttttaagtgggagggaggaagagtggga

SEQ ID NO: 518 - DNA, 2398 bp, Xanthophyllomyces dendrorhous
catctacccagaaatcaccatctcctaaataatcccctttccactcctcaagcttgcgaagtgcagaatctcctgcgcttgcgcccgcgttcatggctgtgcctggagggacacttctcgatcttctgatggatagatcggtttccgcagggacgggaaccgctcggacctgatctgggaagaaagtgtatcgtttgccggtcgaaggggatgttccgacttggttaccgctgtttgagatcaaccgagccgacaacaggtgggtttcaacaaatcattcccagtctttgagaatgcgtatatggaccgttgataaagaaagcgaaacataccaggtcagacaacacactttcatattgccccaaactgtgtcctgcagcaagccgacgcccgaggcttctcttgcttcccataccgggttgacttccttccccatgaaggcttttggattcgcactcggtcggaaagcacgataggagaggaccccgtcgcacgtttccgtcgagggatgatgtgtggctctgtccatcggcgtcgacgtggtggaccccgacggagggagaaaggatggcggggacaacaggcgccggtgatgttcgagtttgatgtttctcgacttgcgccctggtgaggactgtggtgtggatgacggaggtgcctgacgggatggatctcctcgtgaggaggcagaggaggggtggcagtagaggatgtagtggttcggatcgagatggacggactctttcgatcggttgatggctgcctggctgtcgatggagaacgaccaggtgggatcacgatctgtgatctgctcgtccgtttcaccgtcctcttcttcctctgggaacgtccgttccgatacccggggtccttgtctgtagagcgcagagaaggaggggggatgtcgagggaacggaacggacatccgattcacgctggagaacgtcgatgaggatgagatcgatgggagcgattggtttagcaccgagcttcgatggatagcgcctcgacggcggagtagagaaacttggcctgtgagcagggagtgagaaagcatctgctgtagggatggaagatgatcaagatgtattagacgtcgagtgaacagacgttttgcgtaggagaaagaaaagactaacagtgggttcgtcttcatcttcttcgttatcgttgtcattgccgttattattcccattgtcgttgtcgttgttgtctccgccgtcgtcattggtatcgtcgtgtccatcctcccgctcattattctcaccctctgcttgccggccctgctgatttgtagctgccgatgcgggacgatctggtccaaaggcgatggcaccatacctttcttgttcctctcctagcgtcctgacctcctcgagagcctggtcgatccgatcgagccatcctctcatctcggtcgttctctcccccctgccgtcgtctccagggatgacgccgagaccatctgggagtctgccgacgccggctcgactgctggaccgattgctggccgggacgctccagtcgatctcgttccagctgaggagggcggcgatgatcctccggacggtgttcagccgatgaacgatctggcctctgctgtttgccatgaagcgaaggtagatctctctatctatccctgcttcttcctccgtccgtccggatccgacggacagtctgagggtcgacgtatcaggggacgaggcagcgagccgggagaggatcaggttgagtgtgtttgagatggtggcgtagagtgtctggtccgggagtgtttccagactgagggccggaagggccgggggggttcggaggtcatcgaggagggacaccggctgggtctctcccggggagagggccgaatgggtgggcgacggccgttcgatcggggaaacggctgatgccgatgtcggagcggaggtagaatcgggagtgcgaagatttggaggagtggatatgtccatagcgtctggcagacggatggatataggaggaggactcgaaggatgatgggcgggttgtgctgatggtgattcgagtgaagaaggctcaacgtcatgggtggtcgtcggcgtcgagctcctcggtggtggttgtgccggtgtgatggacatgtctgatattgatgctaccacgggcggcagggagcgacgagagagggctgtctgtctgtcgatcggcatgcttgctgctgttggtggtgatgatgataaggacgatgatgtcgacggtgatggtgacgacgatgatgatggttagatggaggaagagaacggaaaggatgaaaaggcgcggctctcaaattcttctgcccccccccccttgacgaccatcctcacctgggaccccttgctttggagacgcaacgccgagttcatatatatacacacacacacac

SEQ ID NO: 519 - DNA, 683 bp, Xanthophyllomyces dendrorhous
cacacacacacacacacaaggccaggctggaccgcaagaacgcagggaaagaaagatccaaccgaaatgtttgcctcgatctttgttcgatctagaccgctcatcaggagtgagctctccttccggatgatgcctagtgtgagccggatgggatccaccagccggtacactactcctccaccaccgccggtttccaagggagtcccacccggctcgggctctttggccgatgggaacggacaggcaaggaaggtcaaggtgccgatcaggagtctcgcagagatcaggagggagaaggagctggcagagcaggctaggttggaagcaatgggagccgcttggagggctagtaccgccgagggcgagtccgaggagtgggtgttttctttcctcttcttcttcttcttcttttttctcgctttctgtctgagatgctcctttgtttctgctgactggatgtgtgtatgcggtttgccttgaaagacggacagtatatgaacggccgatggtcccttctaacggacttatctgggctttcatcatttctcaggcgatctttctgtgagtttctctgctttgtttctctttttgcttgcttgcttgcttgcttgcttgcttgcttgcttgcttgcttgcttgcttgcttgcttgcttgcttgcttgcttgcttgcttgcttgcttg

SEQ ID NO: 520 - DNA, 2947 bp, Xanthophyllomyces dendrorhous
cttgcttgcttgcttgcttgttttgttttgttttgttttgtttctgaccgaatgggatatcggtacaatacggctcatctggggtacacaggctagttgcgatagatatgcagcgcgaatactcgatactcttacctcatgccaagcctcgaacgaatgtgatcccatcgaattccacgccttcgccgagtgcagatccggccgggagcagaccggacagcggtgtggattctgtgggtgctctggtggatgctacagccgcggggagcaccacggagagtgctcctgggacgacggtggtggagggcaaatacgagacaccggtcaagacgttggcgtttatctcgcttctggcgatctcgattccgtacgtcgctctgcaggtgtgggcaaagaagtcagtggtcaagctggtctcgtaccggccgagcggacggacgagggtgatctcgaggagagaccggatgttcagttggtttgccggcgggaaggagatcggaagggtggttgactatggactttgtcagcaaggtcgtcgaaacggaggtatgtctcttttgcctgtgtgtgtgtgtgggtgtgggtgtgtgcgctttagtacggggtgattaattctaatttgtttatttttgttttcttctttctctctacacgactggctcgacgttttgaacaaacagagttgatcccttcggtcgaactcgttctcccgacgggcaaggcgaacgggccagagagctaccgaatcgatctgaccaagcctgctcgttcagagctcgaacgggccaggttgagaggagagggtgtggtggtcgagagagagctggtcgagcaggctttgttggggatcgatgtcttggttgagaccgtgcccgtttcgaagtgagggtgggcagggaggagtgacgaatgggaagggaagatgaggggtgaggagagggaacggaggaacaaggtagcagaacacacgaggcataggatgctccaaaagaaggattagaagaaagaaagaaaagaaaaagaaaagaaaaggcccatgtatggatcatatagccatctctctgtgtcgcgtgcgcgcgacgactacattcttattttattgattctcgataaggagggacaaacaaagcaaaagaaacacgaaccctagggaaagaaaagaaaagaagaaaagatagaaaagaaaggaccaagaacggacgacccatctaagagatactgcagagcgggcgaccagctttactttttcttgccaccggcggcaggcgcaggagtcggacccctggcggcagcctccaacgcgtcaaagtccggggtaggaagagctgttttgagaggtagcatcgggagtagggacatggtggtcaggaagaacgtacagacgcggagaaagctgagagagagagagagagaatcggatactcaccactctgtagaagggcagaaagaagacgacgaggaagaccaaacagaaagaaagcgaaatcaggcagagcacaacaaagaggcagagagataggagagggtacgtacgtgctttgcttgccagtgttcgatgatgttgttcttgtttgccgtaggcagcttgcaggacggacagacgagcttgacggcggctgcctgggccttcaggtttgagcttccaccggccgccttcttcagcttttccgcgttcttctgtctttgtgagggagatcatgggttttgacatcaggaagggttgatagttgtttaggtacatcacaaagagagaaagagagagtagagacgtactgtgattgagcctgtgagggagggatgaggacaagaacgaagacgagacgagaaaaaacgatcaaaagccgtcagcgcccaaacctaccgaaccagatcgacgacaagcaagagagactgaccttctggagtcctcgagccatgatgaaagagtgtactactaaggaatcgggggggggtgggggaatgagaggatgcgctgcagaacggaccaagagagcgagagaagaagaaagaaagaaaaaaaacaaggcaggaaaccctaacaggtggaggttgattcatctattctcagaaggttattcaaatataagcggtgctgaatatggttgtgcacgtgatgcatgcaccgccctgtcgatcccacgtgaaacacctgctccgcgatcacgaaacatccgaccacgtgggatcagagcggaaattctcgtcggagccgagcctggggtcccttgttgttcacttggtttcgttctaatttgttagctcggccgaaggaccggtctgcatgatcatcccctgggctgggcgaacggagaaacccgtggagactagagacagggcacgccaagcgagcacgtccggcggacaaagacagaaagcacactaaacagaaacagtcagcatccagaggcgacgaatagggtgattaccggtcggaacaaaggcacgaagccgagagggaagatcaaatgaaaccgggtgtgtcgaggggagaggaaggggttggcttggggccaaagacatcgagggatttatgctcgagccgagccgaaacgtggcgaaggcaatcgaccaggaacgaaataactcaaacctcgtggacgcccatgtttgtcgtaccttctttaaggtttccgacgcgttcaaacacgtgtacagcggcagacggcggagattctccttccgcaggcacagccacactgcgcgcaggctgccacgaggcgcgctcgcgtggatgtgaccgacccaacattccggcatcttcttgtgtcttctctttttttcttctgcctgctctctcctccgcgcgggggatggcaggtgggcagaaggccgggggaggaggccgaagaaggaaagcgtttgatgagtaagagaactttcggatcccacagggtgataggccaactgggggagaggagaaggaggagaaggaggagaaggaggagga

SEQ ID NO: 521 - DNA, 465 bp, Xanthophyllomyces dendrorhous
ggatggagggggagcgaggcaggcaggcaggcaggggcgaggggcgagggcaaccaggagctggggtcatcttcatcggcaggatgggcaaaggcaaaggcaaggccgaggaaatgcaaagagggatggaaagattgatcatgttgttcatcgccatccaccatcagcattgttgaaagagcatcgtcaaaagcattgtcaagaacatcaagaacagctgtcaacaagatcagtaagcctgctcgctatccctccaccacctgcgggaagaacagacaagcatgggagcagcggcaagattgaaaacacaaaatgctaaaggcagaggagagaagagcgctccatcatcgaccacacgggagatgatgaggggagggggggaacacaaaggattcttcttcttgttctgttctctctcgctctctctatgttgtgtcgagtcgtattgagatcccctctgggatc

SEQ ID NO: 522 - DNA, 1300 bp, Xanthophyllomyces dendrorhous
cttcttcttcttcttctttcgccttcgtccacattccattttcgtccttcttcgagaaacactgatcccccatcactcatctgtcgtcgtgcttgtgtgttgtcagtagcagtagcagcagtagtagcagcagcagtagcaccagtagcaccagtagtagcagcagcagcagcaccaacttcacccacacacgccacaacaagaaacaatacaaatcatggcctcagactcacagggcatcttggtgagtcggcttccctcgcttccgttccacccctcgactctttctctcccattcgtccggccggatcttctgcagtcgtccgggtaattcctccgtccgcttcccctcgccccaccgccgtgcagacatcgcagacagatgggcagagggaaaggacgctgggacgaaacaggcgagagaatagaagaatgaatgaatgaatgaatgaacgaacgaaagaaaaccctctccccataacctttttctctctcttctcttctcgctcttcatcatccgctctacacacatcgattcctcgttcttctctcttgttctttctccctttgcaccttggcccgtggcccgtcgttcgatctccttagtgatcaatcttgcagaagaatatacagagctcgatctcgaccaaactttcatcttaatccttccgaccgccaacatctgtgcttcgtttccttctccttctccttcctacctattgaaccctagccggacgatccatcttctcccctttccttctccttcctctcgctttccgatggctgacactgacaactttgacccggccgcgttcaacgctcagctctgtccttatacttccaccactgtgagtaccatcctgtttgttctcttgtcctcctctccgaggctttcctatcctatctttttactcttttttttcttcttttctttttaaaccttctttctgacctctcttgtgtttttttttctttggcctttctttcttgtattcttcctcctcccttcctcctctattctcattcccactcaccactcctccaaaaacagtgccccttgctcgcgccgtacgcatcgttcgacaacaacggttcagcacaaacaccagtcactccctccgcttgcgctaccgcccatttcacccaaccgagcgccaactcaaaccctgactcaaacagacagtctcaaaaccagtcccacctccaatctcaccctcagccccactctcagtcccagtcacactctcagtcccagtcacactcccagtcccagtcacactcccaatctcaatctcaatcc

SEQ ID NO: 523 - DNA, 9723 bp, Xanthophyllomyces dendrorhous
tcccaatcccacccgcactcccaatcagccgaccagtcttactacccaccaagctaccaccaccagcagagagacgcaaacccaacactctacgacggctcctaccaaccctactcaccaaacaactcatccctcaacacagcatcagcttctccttacggccttaaggaaagagaagatcgatcacccatggtgcccatacattccctcgtgtcctcccactcggccctctcccaacagagaccgccccagtgcaggccgagctatccgtccgtcggactgattcctccttactcaccctactccagggaccaaacgaaactgcagaccacagactcagagtacgactcgtactcgaaatccccagaggattctctcctccccaccatggcctccaccccgtacgcaccctcgcccactctccaaccgatgcccccggttccgttcctccaacgcccaaacttttcacacacctccagctcctcccaacatcgacacggcaacagccagcagcaaggcaccaacggccacaccccctcctccgcccaacagaccccgatctcgttgccctcgccttccgccctgttttccaaccagtccttcatccccgaagatagaccgagcaactcgagatcgtccagtcgcaccggtgccccacccagctcggtcgaaccgaccaccagcccgtacggctcggccgccgcttgcgacatggaagacctcttgttcagacggtcagaccagactggacagagcgaagaccgcaagccgttcgcagagatccatccggacccggcaccctatcagctctcttacgcacagatcccctctcaccagccagtctcgccaccacagacagcagatcactcgacagaccctatccctcctgcctctggcaccaacggcgagcagactgctttcatctccaaggtgagctttccctttccttttggttttcctttgcatagttcctccagctgactctttccttcttctcttcctagctatggcacctgctgagccatccggaatacgcgcgctatctcaaatggaaccagaccggagacgccttcatcctcacaaactccaacgagtttgccatcaacggtttgtcattgtttcttcgtctttgtctttctttctttcttctccttttctatctagtcattcttatcccgttcactgaacgtttccgcgcaatctctcccctcctcacagtccttccaaggttcttcagacactcaaatgtcgctagtttcatcaggcaactcaacctgtattccttccaacgtgtatccaccatccggctcctcgttagtcttttctcttctccttgaatcccccctctccttctatcttgttgttaatctcatcgaccaaccctttcacgcccggtgtttcaaacaggacatggccgactcttccacctcgacctcgatcgttccccacgcccattcccaccatcacgacccaaacagacctcaccatcctcacccccactcccaccaccgatcactatccacagaaatagactcggaggatcatacgagccattcagacgggtccccaccttccaccacttctggtctcagtggagatagtaccatcgccgcgtccggtaggtttacctcaccctatgtgcctctcgttcactgctctctagaacgcatcagctgacgttgcttcttacttctttcacctctctcacctctctcacctctctcacctctctctccctcccaggcttcacccatcctcatttcaaaagagatcatccggagcttctcaaatttctcaaaccgagaggctcaagcaaaaaagtccagtcaaagaagcaggcgcacaccgtcggcggaaacggacccagacgagccggcggaccgggcggaaacaaaaaggtcgacagagccggtccagtcggggctaccctggccggtggaccaggcaggaaacgttgatcgattttcgtgtcctctttcgtttttctttccttctttcttttcttttttcttgatcgattggcttcttcctcctctcatactttctctctctctctctctcgttgtctcattcgcgctctctctctctctctcacccatagactaaatactgtatcatttctcttgtcttttgtctttgaccttctctaatttttccttctcgttctgtctctgttagtgttcttatcaccccatcccaccctggccagcatcagatcatttcgttcgatctctgatctcttttttcttttcttttcttttcttttcttctcggctttcttttttttttccaaggctgtttcattctttcagatatcttgttttccttatctcttccgatccctcttctcttgcctctttcttggttcgtgtggtgtctgatctctgatctctgatctctaatctctaggcctcctccaacccatccagctctactcgacccctagctctatttccatcgttttatatgcttccgtttctttatctttatttctaatatcttgactctaccctttagcgtataggaagaaccataacgatatccaatctgaaacaaaggcgaaaaaaaagagaggaagaaaagaaaagaaaagaaaaaaaaagcccttccccctcgtttccactttgatgatttttttttaaatttaaatcctttcctattctctgcccatctcttatccatacttctttttctctcccttccttccttacggttatcagttgtctataggattattagagtgtaaatatatgtgtcttccttcattctccctctgccctcttcccaggtttgcttgtgcttgtgcgtgtgtgtatgtacgcccgtgtaacgtgggaaggcgtcagtcagagaacgagcggactgaacggatcagtccggggtaagcgggcacgttgtttcttttccttagcgaaagggggagaatgcaacccgaccgttgacaagagagccaaagcgaaaagagaagatgaaggcaaaggcaaatgcaaagagcgtatgacgttttcccgctcctgtgaccttggtttggcttaccggaaagatgacggacgagcgagaaatacatgagattatattagaagacaaacagacagacaaatagattggaaaaagagtgtatcgaccgaagcttgggctttgatcaggctgtcatagtctatatcatttcacgctcccgaccccgaccgcggtcctggctacacgatctatcgacatctaaagctctttcttgagctccgggaccgaaccagacggaggagccgaagcgaggtagccctcgagtttcttccaggcataatccgtggcgtgctcgacgggttcgtcaaacaagtacgggagcagcgggacgaccgccagacctagtttcgtattcagtttcccccccacgattcacccgccagcccgatcaatcccgtcgtaaacaaaactcattcagccttccggcctcacgagaaagaagaaagaaaagagaaaagcgagaacagatggacgaaccggtgagagtaggtccccaggtcttcaacctcgggttcttcacgttcacaaacagccggccgctctgcttgacgacggtatggatggtgaaagccggaagtgccatcgaagccactccttggaacaccgctcgtttcgaagcgactgagaggatcgagagaaaacggttgcatttccaaaggagaaaagataaagggaaagcaagtacaaagacaagaacgtcggggtatgttggtgtcagcccgtagtgggtactaggattagcgaactggctcaaacggacgtacgaagggatagccgggtagtctctgaaaagttggcggcctcgagcgcgttaggaccatgtttcttggctgcacacacaaaaaagcaaaagaaaagacgtgtcagatcgatagccatgagtcggcgcccagaagcaaaatcactaacctttgtaagtctcgtacgagacatctccaatcaaatctacatacaacccgaaccccgtttgattagtcttcttgctcattcaagtaacagccatcctgactatcacgtcgaaatcaaacgtacatgcccaagagacaccgtactaatcaagcatagaagtcacacatacaaaacttagtcacgtgtacgacgccaagaaaaagagacagaaaaaaaaaggcaagggagaagcgtcacatacaccagcggtgacgacccacggagggacgaccggtcggaaagactctcctacatcacttgtgtacgcgacataactagataaaatcgttttttccaagatgcaaaacatagacataaaaccccgggttaagatgtcgaaaacagcagtcatgtaagcatcaagacaaacttaccgggtaccggctctgagcgcggttcgtagtcggtttccgtacgctgagggacaaacagcccaaaaagacatacatgtaagtatgaacgaaatctgtcatcagatttaacacagtatcctaccagcatatcggagatcagagtccgtagtatcgaaactatgggcacacagaaggtggtcagaccagggtcctcagcacgtttgtttcacttagagactggccctgttctactgagtgtgatggacgaactcttccttgacgaggtcgtcgagctttccctctgctgccttctctccctgctggatctttgcctctccggccttcttgtagtcctcggcggccttgacgatcttatcggctatgagtttgccggcgaagaaacgcggttggccggatgcggagggagggaaaatattgagtaagcgttcgcgaaggctacaaataagtctcagtgccctaagatgtactgactgttggtagacatggtgagctaggatgtgcgcttgtatcaaatggttaagagacagaggaggaagaacgacggcggatacaacagcaagaaagagtgatggtcgaaaggaaagaacggaggagagagaaaaagaacgatatcaacgggctgtaaccatgttggatgacgtcagcgccggaaacggcgatcacgcccagatggttacaatattacataagcataaccctaacatccgccctgagttcctacttcttattcctactaagcatcgtcaccgctgctctcaccttcaacctcgaccccaacaacggcttgcctcatcatgtctttgggtctcagtcgtcagatccttaggctgccagaccatctaaggctgccacacctggcagccaagcttccatcaactctcgattttagccgtcataatcctctctttgcgctctcctctccatcataccccattcctcaaggcttcacgttctttccagtattctacaacccattcgaacaacagatccttttggaatcagctttgatgaggctagatcatatgggaggtataaaacgaatcaatggcaagaaaatcaaaagatctaaagctcagatcgcccaagatagagaatcccttggcctacagggttggttcctccccacagacgcctacaactttgagcaggtgtgtttcttgattagaaatcagatcgcaaggacgtatttgagtcgatgtctgaccaaccatgcagagtcactttgataaagtcatccagagctatcgagagactcttgtatcaaacggtcttccagacttaccgcaatcccagacatcctttgccccgacgccgtccgagttgatcaaacgactacactccttcttccctgaccagagccgtcgacttaccacacacgctcttcatctcagtccgacaggctcaataggtggtcatgtcgactcggtgaatgctatgggcgacatcatcgtcggagtcagtctcggagcggatagggtgcttcgattggaaaaagagggcgagcatgaactgggcgcactcgatatcgtgctccctagcggaagtgtctacatccaatcgttcgttgtctgtctttctgaaacgcatcatcgtcgtcaacgccacgagaagcttacatatgtttcgacattgacgaatgaaataccatatcagcggagaagcgcgttataaatatagacattctgtcttgaatgttcccgaattcaatggtcaactgcttagcccaggccatagagttagcatcatgatccgggatgaaaagccgtttaacgaacaggtcggtgttttacatctttgcttcccttacttatcgcctcgagttccactttgaatgtcctctatttgagattcttaaattcctaatcctgatctttaaaaacccctaaatgtccaagatagaatttacccagtgacccgaatcccactcccccgcctcccgcttctttgcctacgttccatccacctaccgagctcgaactggccgctcgcttacaagcagacacggcactcgcgctcgaaagagccagagccctccaacctacatccttcgttcctctatcgtcggcggatgagatgatactagccggagaagatcctagtctagtagagagcgcattggagcagccgaaaaagacgctcgacaagagtttaccgctctcccagcgggcaagagaatggaggaatagaaagggggaagaaaagttgcctcaagatctgttgaaggctggcatgagagctagaagatggaagtagcgtccttcgtttcctgccatggtggggatgcgtttgacacttccagtcttctcattgatacctgttgtaaaacattctatgctaattacaatctatgaaacacaaaaaagggatgctcctctggttcctattcaaaacaacaacgtcgcatcagaagtaagagtctatgctaaaggcaaatagatcacttcttccactcagtaaccttccactctccgacgttccaaagctcgaatccccccggtcctgaatgaggcatcttcatttttcgcatttctgaccagagccatcgtttcgtaagaagagcgagtgatcttcccccccagctaacattctcaaacacagacaatgtacgtcatacgtcaagttcagttgtttgcaccgctcccaagcaaaacatcagaaggattagaaagggaaatcgtgagcttacgttccccaatggatggccacccctgttccactgttctttcccaagatacccattaattcgaccgcatcccctggtgtcatatgaactccactggtcaacactcctagattgaccatttcatccgttatccagttcgagactgctgagaatgggtacggaacgaaactcgatagatacggcagggatgaaccaggagatatcgggaggaacaagagggaaaatgacgaggtcagggttgatgcagtttgggagaaggctgggcagatgtattttggatcggtcactccgaactgtcggtaccctgtgtctctgtttctcgggaaaacaagagaagattaggacctagaggagataggaaaaaaaggacaagagcggaagtttatataaaaacgatggaaaaaagactcacccagcaaagtagattgtacaaggcatgttatcccaatcctttgttgattttcctttactacccgttgattttccatcgcgctctttctcttcaactcctacggcccaggaacaccaaagagaagtgctcttgtcccaacctgaccgaccacttccatgttgacagggtgtgcaagccaccctgagcgatcgctcaactgaggaatccggctgggctgaatccgacggcgacgacgacgaggagatagaagaaggatggcttaacgtgatttggtcccaccagtctagctccgagactcggtcttcagggatcccaacagatttgaaccatgatttcaaaccgaggggcacgatccatcggatatgcgccttgtggattgcccataatgcttgggttgttgggagagacaggtgatcgtaatgtgaatgagatatcaacactacgtgaataggctatgggagatgtataccttgacatcagtctcttgttccagtggatcagatgtgcgaagggaaagaaaagagaaaggaccctagcttacgggcagatccttgacatcgcatggcgggctgatatctctcacaggtccgacaaatccacttggagaacatcgctcctcaaataccggatcgaacagcacacctacttcgtcatccccctcactcctcagaggaaccatgacgagcacactcgcatgacctaaccagcagcttctgaccttgccctgctctttctttccccatctactcctagttggctgtactgatgaagcaatcgagtttccctcttgagcctgtccgcctgtccgttcctctgtatccgaccacttgatacacctgacaggatgctcctcctcctcgtatctcctttgagattgtccattttctttcagctccagctctatctcttgctgctcgtcctcctccgtaaaatcctgatggttgtcttccggccgccagaatgcgtgtggtaaaacatttgttggtggcaggtcggatggccaagggttcttgaacgtcttcgttggaaagaagaatgttggtttgacgtgatgatctttcggagaagctggctccgctgaagcaaccgcctgcacagatagcagtcctgtagccatctgaggtaaactcgaagaaaggaaagaggtaaagaggaaagacggttgagtgagagtgaggtgtactaccaagaaccgccaaggatggaaaagggtaggataactaaatgacgttctcgtatcacgtgatctctgactaatttcaaggctgtgttttttcctatgttgccctcactttatttgactctacattctctctctactctcgtcttcgctcggacgaccttgatagacaagaccatacatcatgtttccgatagctagatcgatacggggaccaacaggagccctgtcaagctgggtatgcttggggaaagcttcgatttcaagacccgtcaaggcaacatgttcccattcgttttctacatcgacttcggctcgttcttcatccgcctcatctccttccccttctccttctccttcacacccatcctcttcttcaagtcgcccgtcgatctatacgttgaaagcagtcgagtcgtctccttatccatatccgattcctcaagacatggaagactttcttcgtggctacccaaacttccaaaggaacgctagacgcgaggcaaatacacttttttaccaaggagaacaggaagcatggccatcagagttaacgattgacgaactgttgaatgaacttaaagaccatccagacgaagcaagaaaggccttgtaagattccgttgcactttcatgttttttaatagatagctggatctgtcaacttaataggtgcttgaactcttgctcttgttttatgcttggtctaatttctccgacagactcgtctatccctgtaggtcctacgtgtacccaatatcgattacgatgagatcaatcaatctgacactatatattgcgcatcttcacaatagggctgtttcccacaccggacgctggacctaataagtatgcttcgaagcttcaaccgcacgaggtgtcggcaatttcgtcggatccgttgtgtattcacaggttgcagcaagcgtactcattggtcagtctgcgctgattttcctttgttaatcttgatcgatttgtgacaaaacaagaagactgaatcatcttctatctttgaattgcgttctatcagactctcaagatgtacgggatacggctgatcgaccccgcatccggactgcttgtccccacctgggactttgaagac

SEQ ID NO: 524 - DNA, 344 bp, Xanthophyllomyces dendrorhous
gcttcccagcagggggtcagacagggcgatccgttcgggcctctcttcttttctcttgccatcagacggttcatgtctcagcttcgtcagtttgtaggcctcgacggtctggtcgtcagctatctagatgatgtgttcatcctgacaaatgactctggagcactcgagaaagtcatcgcgttcgtagaagcaagtagcacatctttatcactaaacaaatcaaagtcaaagatacatgacctgttttctatcgagtcccatggcctcgagcttctcggcaccgccatcggcagcacacagttccgagcggccttcctccaacgcaagatccaccacgagcttgc

SEQ ID NO: 525 - DNA, 5083 bp, Xanthophyllomyces dendrorhous
agaactatctatgaatctaagaccctaacccataagccatatcactaccggcgaatccgagattaacgctgcgtcgacgattatggccttggtgctgaacccaatgttcgacttgaaaaccacgtacttctttatcggtggcattgccggtatcacacctcattgtggtacgttgggaagtgtcaactttgccaggtttaccgtccaggttgccctgtcctatgaggtcgacgccaaacagaagcccgaaaacttctctaccggatacttcttgcaggtatatataatttctagtcttcggatcagactgtgtatgtttcaagtctaacagttctcttcgtttgcatcgcttctctttacagggttcttctgcgccgggcgagcctgcaggaaatatctatggaaccgaggtgtttgaagtcaataccaacctgcttgataaggtgttgaacgtcacgaaaaacgtcgtgctgaacgacagtaccgacgtcgctgcctacagagctctctatggttacgcgcctgtcagcgaacctccttcggtaagtgaagggaccaggttgaacgagagtggaaatgaatcgcaagaaaatcgactaacctgtgatgattgtgacaggttgtccaaggaactgtcaccacgagtgacgtctacttcttcggctcgctcctcggcgaggtctttgcgaacgtcacaaagatctttactggcggaaagggagcgggatccgattattgcacgactgcccaggaggataatgcgacactcgagtctcttatccgagccgctcgggctggacttgttgacttttctcgaatcatcatcatgcgaactgcctccgaccttgaccgagcacctcccggtgtagacgagtacaccagcttcactgccgatcagggcgggttcgagattgcgctggagcatatctacgttgccggtaagccggtgatcgacagcatcattcaggagtgggacgatctctatctcgaaggaatcgcgccacaggcaaacttcaccaccactgccgacgatatccagagtctggacatccccgagacgtacacttaccgaaagagatcgatgcaggggaaggcctcgatgtttgccaagagaaggtagacactgtaacagcaatcaatgacggaaactttgccggccttggggaacgttggaccgtatgtagtctgttctcaagaatctacatgtcatattcattcctattcagaatgcttggcagaattgagccggtaaattcggctgaagaagaggaaaggtttaaacatgtttcaagttcctagtatacatacacatatgcacatagatacacacatatgaaagcatacaaaccctccttcgttctcatctatccaggtcacccaccaccgattgatggtatcagatatgagtagactatggcacacacacacacacacacacagagcacgaacgtgaaccttgggctcacctgacgaatgtggaattcctcatgcctgtgtctatttttacaacctctggcgcgtggtagagctgtaactgcgggattcttcacgttggattaatcaccatgtctaataataaaccaatatatgttcgtgagggggtgatcgcaagatattttagagtgccccgccggtttgtgccttccccggcacgttcgacttcacggacgtctccgatcctgtcgagcgaccatttctccggatcagctttcagcttaccccaaacgtctcttcatcttccgatcacaccgatcacatctctcagtctccctcgcccctccgagatctatgatctcgctcagacgaacgttgtttgagcaaagactatcggacggacgatgatcatgtttgagcctttccgaacagaaaggaaaaaattcaatcccttgcaatattcttgatcgaccgctcaggtgagtattataaaaaccctttagttaattccattcctgctatccgtttctctttcctcactctgctcatcttccgtcgcaagtctttcttacaacaaaaactacagacatgaacgctgtcgttctcgcctcccttcttcccatcctcgccgctgccggacctttgggtcagagagcctctgtggctccctctgccaccgttgctgcatccttcgtcggctcccacacctcggatatcttccctcctccttctggtgagcttctcttcatcagctgttaacgcacgaacgcgtcgataacatactcatcctgctttcggcccaacagccactgtcaacccgaccttgttcccctccgagcctgttattggcttccctggagtgactgctaccggagttgagcccgccgcgatccagaccgctgctgcttacgcctacaacgaccagcagactcatcactaccccctcgtggcggacaagccctctgatgtcaaccaaacgaccgagttcgacatcttcaagtactggggtaacctcgctccctggtactctgttcagtccagcgcgtacggtctcccagaggccaacccgttgatgcccgagagctgctcggtcactcaggttcaccttctctaccgacacggtgccaggtacccgaccactggagccctcccttacgcctttgccgccaccgtggccaaccagaccgctcacggtgggttctccgccactggtgatcttgagttccttaacacctggacctacaagcttggtgccgaacttctcacccccttcggccgacttcagaacttcgagctcggtgtcgccatgaggcagcagtacggacacctgctcaacaacttcaccgagcagggtactttgcccgttttccgaacgcagtcacaggatcgaatggtcaagaccgccgagaagtaggtggtatctatctattcttattaacaaacgatccatgctgataggttcaacttctcgccagcttcgccgccggattcttcggagttcccgagtacctcgaggaggtgaacattgagatcgtcgttgaggcccttggtttcaacaacaccggtgctccttacgaggttagtgcgagtatcttgactttaccctttgttctttgctacattttactcatatccttcttggtcgttcacgcatcccatagatgtgtcctaacgccaaccttgccaagtatggttccatcggctccaccgctgccaatgccttcgccaccactgccttcaatgccaccgccgcccgagtccagaagctcgtcaccggcttgactatcacccccaccaccatcctctccatgttgcagctttgctcctacgagactgatgccttgggttactcttcattctgcaagctcttcaccgctgaggacttcaagaactacgagtactactacgatctttctttctactacaacaacggagtcggatcccctgtcgctgccgcccagggtctcggttacctccaggagttcgtcgcccgattcgaggcctcgtctgacttgctcgccaacgccgattccactgtcaacaccacccttgaccttaaccccgagactttcccccttcaccagtccatctacgctgatgctactcacgaggtcgtcgttctcgacaccctcaccgctttcaacctttctgccttgttcgctggtggtcctctccccctgaccgagaggtcgaccaagagtcagttcaaggccagtcaggttgtccccttcggaactcacttcaccatccaagtcttggaatgctccgaccttaccccctcgaaacagatcaggttcatggtgtaagttcagctttgttcttgtctggtctcgagcgtttcttaagaattcctcagctcaccgatgtttaatatttcttttcgtcgacagtaacgacgccgtccttcctctcaacggaacctacgccggatgcgagtacaacgctgacggtctctgtgctttcgacactgtcttgacctccctcaagaaccgaatcgaggagattgacttcacccatgcttgccacggaaactacaccgccacggctggtgttgactacaacggtcttgccccctcttcgtaaagagcggctggctgttgacggggattcgtttgactaattaattcattactttactttatccataaaactcgatcttttgtatcaatctctactctcagacttatgttcatctctatattcatttctcggcggaactgagccagcgaagtcgactagagaagaacgaaatttagcaagtcaggtattcgatagattgagaaataaaagagaagcgctagatacctatgagttttgtagcttttcggagagacaatcttgggactccgcgtaaaaaggaaatctgagggtgttgccttaaaggaaaaggcaaatcacggctaaaaattccaaaatcaagaattaatgaaaaattgctcaacgtttgcaacatatccaatcaaccttggcaatggaacatcaagatcgtatagtatagtggttagtacttccgcttgtggttcttcaaccgaaacgcagagtcgcggacgacgggtgttcaattcaccctacggtcattcttttgttcctttcgatgaatataccctttttcgttgcttcatattagggttgatcttgtcttctgctctcggctggggttggtcgacatagcctcgttcgtcttaagacttcagccattggagggtctcagtgtgcagactagtgttttgccattcttcaacatgggcgaaagagagggatcaacgagtcaaaagttcctgttctgtctttctcgttttctttcaagacaagaaggattgaacaagcttcatgttattgtgatgcgacgagcgaaagagggaggaaaaaaatcgaaacagtacagacagtgataatgacaagaacggatcgcaagggtatatgtaaattaaagaacagacgagttctggacgaggatcaagcagaatccctggcagcaaaagaaaagggagatcgggcacatggcgaataggtttaattataaaacacgagggatggaacgaaggaagaaagagaagacgagtggtttgagaacacagaggaagcgaaagacagagtgtcctcacgaaactcgccatggtttgacaaggggatcgaacttaatgattga

SEQ ID NO: 526 - DNA, 4642 bp, Xanthophyllomyces dendrorhous
gtataaagggaaagaatttacaggttagagcgataaggctgtgagtgacttgtgaggtacgatagacaaatcgttgagaccagaaaagaaaaaaaggaagagggagtccagatgccgcccacgttactttgatccgaactctgaatccgacccaaccatactagctctgaacgggttgttctctccgacgacgctcctcctgtcagcttcttcccatgcctggcctacgctcggttggccttggctgacactggcagatcggttcctggcggcggcataggccttgagcatatcatctggcgacattggtgatgccgacgatgggtcgatcgacaccgccggagggggcccagggaaacaagcgcttgtcggagtgagtgaaggcgacaggatagtagggttggctgctttggaagggatctgaagccttggcagctggttcttcgacgggttcacatttgactcgggcacgtcccgcagattttcttgatcctctgaaataacatcctgtcctctttgttgtccgaaccggtcgacctcgtcgacgccgaggacccagggaccggacgtttgactcgggctggtcgagagttccagactgttccctcgtctagcttccgagtggttgcccatgtcgactcttggtcggagaatacccgagagcgaggactttgatttggcatgtccagaggcatggtgtgcttgcgtggggacttcatgtgggtctgatcgacgggaatatatcgaaccttgggttcggctcgagtagtgcgtcgcccggttttgatcggttgacgaacgagcccccggctcggcaaacgacacggctcgactatttcgttcggcgtcggtgaacattgttcgtggtcgggcgaaggaagcaggatcgatctcggacatatccggttgaccggcctggtgggtaccgaacccggcatggttggagtaggtcgacatgactgtccgtctgttttgagagaatgcttcggattttcgaggagactcgccctgtccggtcccaggttgccatgcgttggaaagaaccgactacaagaagcgtatgccatgagtttaagacggtcagatctgcctagtagtgtattggaaaggtaacaaaggcagagttgacttaccatcctgttgtctgtttttttaagagatgagacgcgaggaaaggcaggaaaagaagaggatagacgatcaggtgccctccggtcagtgatggaatacgaggcgcaagaggagaagaagctagagaaactatgtacgaaccgattgcttgagaccatctctgtctcttctttgcttgtttcgccctcgtccatctgacgtagataaagataccggccacaatgaccacgatggggaagaacacagccgcaaagatactaccggcaggaagggaacccgagccagtgccgatcttaacgacgactggatccgagatggctggagagagggaatagaagattgaattacaaaagaaaagaaaagaaaagaaaagtacatgagtaacggagtattcattttggtgaaaatgtaagtcatgaaactaaccagtgttagccgctggggcagccacggtacttcctccaaccgttgtagtcaccagtgctgattctgggtaggtcacagtgaattgcggaccaacaggtaaggaactaaagacactgtcgatcagcgagccggagggcgagatgatgatctgcatgccaatggacgtagtcgaattccacctgtgtgtgtgtgttttggacagagattgaacagtaaaagagctggtaagtgtcccggacacgtaggtttggctcatgtgctcagctttctatttgtcaaaacaggcagttcacgacgtaccacctaggaaggagttcctcggagagcgagccggtggaggcatcgatcgattcccaaatcttgtgaaacacaatgtaaaggtcgatttgaatgcaaactgattgagtttcactctggacgagatgtctgcagcttaatgaaaagatagcacgtactttgatggtggggtctgcagagttgggcgcgaaaagtttgagattgatcttggaactcgagatgcaggtcttgtcccatttgaaagttatcggaccgcttgaagcatcgaacgtagataacgattcaggcgagaggtaaagttgagcggtcgtgcaacctttgaaggaaggagttgagaagagaacaaagaaaacaagagaaacaatcgtcagtacgcgtcggacacgtgacataaagaaggacgacgaaggagaccctcgaagagacagaaggacggtgtgacgacgatgaacgcgatctcctttcatctgcctctgcctctgcctctgcggatatagtttcagagctttccttctcgaagcagcacggacacgcgtgcgtgtatatgagagcaaggatgctgtagggagatatggacaaaagacatggaaagtgtctgtggcctacctctcttagtcaatgatcgtttcttcatcatgagggacgattcatcgagcgcgtctgattcgtcgagactggcaagaacctgatcgagtgttgacaggcgagtagacgccaaggtagacgagatgacggatgacatggattattcgattaggcacacgattagtagatcttgatgataatttagatggagagagcgagagaacgaaaagattgacgattggtgaggattattaaagaaggactgaagaaagaggaggaataagtgagcggattgggcaagccaaggaagattaaaacggccaaaagtcggggaacaacaacggagaaagagcggagtgagttggactggaagcgaactgataaagacttgtgccggaaacactggagagcaagaagaaggtcgaggtgatgtaagagaactcagaagaaggaggagggaggaatggaaaaacaacaacaaaggtggctgacgcgtcggtcacgtgagctgccaggagccacgtgtctgtgtggctgtgcagtcctcgtctccgagcccatcctctccatcctcctttgggacatcttgtaccgaatgcgcaccccatggtcctctgctctcgaccatcatcgggacaatgctgcaacacagaccgtcgcatgtcatcccgggtggaacggtagctcttgttttgttcgtcgtctccctcgtttcgttcacggcccagtcgcaactcgcccagtacctccagacgacgctcggtcagtcctttcaacctgtagagtctacgctggctgtttgtgaatcttatatgacttctgtttcggtgttcttttaactatgtgtttttgatgaacagaataccagaagtcgtactttatactctactgtgcacattcgtcctttctcctgcttctccctcttcacctggcctttctatatgtgtggccgggtgagaccgtgccgataagattgatcttgagagagctcaagtttcaggtgagacatcaactggatgggacgtcggcctcgaccgagcttgctgccaaacgtgtgggctggccatgggctaaagcggccatcagttctatcggtttgaccgctgggatgacgatccctgccggttgttggtatgcgagtgtacccttgactaggtgagtgaaggggggctgtgggttggtccagactacgtcgcgcctgttgcgctcacaccttttcttttcttttcttttcttttccaaacgactccttaccacggccaattagcatgactagcatcaccacgatctacaacacctcggctctgtttgcctacgcgttctccgtgctctttctcgctgtgccactggagttgaagaaggtgacggctgtaggggtggcgaccgtgggtgtcgcgctggtcgcttatggcggagcggcctcgcctgacggacaagaggaggacgaacggtcgaaggacagaaaattgggtgctagtttcttgggagacctcctggcgctaggaggagcggcgagctatggactctacgaggtcggtcttctatctgtctttgttattactatcatatgaaaacaaggatgtctgatatatgcacaatccgtcggtcctgcttgcttcttcctttctctctccctctccctctttgttcttgacaggtcctctacaagagatactgttcgctgcctgacccgcctccatctctgtccagtcgaccgcggacggtcggtctgccgttcgccctacatgcgaacctattgacgtcggtgatcggattgacgacgcttaccgtgctcgccatccccctctacgtgtttgacgcgctcgggtgggaaccattcgagcttccgtccgattggatcacctcgctcaccttggtcgggatcgtcctcggtggtataggtttcaacggatctttcatggttagtagttgttgttattgttgttttgtgttgtcttgctttcttgtgtgagaaggaaagcgtcctcgacctggatagaaagttgctgatgtccatctttgctttttctctttcttcttctttttcctttccctctctttctttctgatcagatcctcttgggtttatggggtccgatcgtaggtacgtcagaacggccccaaccgtcggttctgcctgtcttctctgcgtgtgtatcgattggttgacgaacgcgtctttgccgcattccatctttctgtg

SEQ ID NO: 527 - DNA, 1820 bp, Xanthophyllomyces dendrorhous
ggatgtgtgaacgataaacagcctcggtaggaaacctgctgacgatcatcctcgtcgctctgtctgagtctatcttttccgatggttcctatccggtgagtcgtggtgcagcagcggtggcggcggcggtggcaggcttggcttggcttggttctaccaagacgccactgtctgctgtttttggctctagttttgttttcgttttgttttcctccatcgactgacacacacgcgcacacacacgcacgcactctctctctctctctttctcattatcgaattattgtttctctgaaagctaacgctgacgatcctgacgggcggtctgttggtatgtacctcgtttggagtgctcgtatgggatctatccgaagggacaggagaaagcgtccgagagatcggtagggaacaaggagaaccacgagagagggagtcgttgattgagtctgaagacgaagattgagtcgaggccctgtagtgtgtgtatgtgtgtgacttgggggaataaaccgttgtatcgatagacagacagatagatagattgaaagaaaaagatatcaagaaaagttcgacatgtatggtatcgacccgagagggagaaaggacttgtctacaaggagaaagtgagaaagaacaaggggggaagggaaaaggaaagatcccctgaagaatacattttcgcatgtctatggaatcatcctcgggctttctttgggcttttaaagtatttggttctcttatttttgtaatctcctcgttctttaaaaatcatctgcttcgtcctccaatgcgctgatggcctgatcgatttcttgttggaacgccaggagctcggtcgaggacggatcgtaagagaggccgaggacgagagctctgtgaaagatggacgtagagggagggaagaggaggaggagggatcctgaagatgagttcgtaatcctaggttgcgagaggggaagagagaaaggaaaaggaaaaggaacactgaatggacgtactctttggcaagatatggctgatcgagtgccaagagtgctcttttgataaggtttaaaggcaaaggatatgtttaggaatcaagaccggtttgctgaaaaagagagagaaacatggtctcagaggactcactttgcttttcggaagtgacctttggaccacggtctcttcagtctgatcacgctctctgcgtctgcgtaagagtgggtccactgggagaaagggcgaaaagagagagagagaaagaaaggtgatttgttcgactttgtcagtcgattgacagcaagagacagaggcatctttgagagaaggcgagaagagagaactaacctcgcctagggcggcccaagcggcacttcggttacagagcaacacacttatctcttctttgaccaagcctgacggctcccagggcagacgttcggctgctactttgagtgcgagcgagtatgtgttgaccgagggtgggtactgttttgccttgaattttgtctgtgtgggcaggagtgcggtggtgagaagtggtgaaaggtagtacagagtcagttgcagaacaagggcaacaagatgggagagatgtgtgggggcacgagaaaagaaggacgtacgttgccttcctctttgagctttgcgacctggacggatcgtcctctgtccacgttgtttgggtttggcggaggagggatcgctccgtctggtgctttggaaaagacgttggcgagtaggttgacggtgttgaacaggtcgaccggctggacgtcggcgttgatgggagagagaccgtatggggactgggtggaggccggaccggagacgaacgggga

SEQ ID NO: 528 - DNA, 1093 bp, Xanthophyllomyces dendrorhous
tgtgtgtgtgtgtgtgtgtgtgagagagagagagagagagaaagagagggacggaggttgggtcagtaggaggaaggcaaagacagagtgcgaaacagcagagagagtacaagagagcagacagagagcaggacagcaggaaggaaggcgacgggacacttacctcggcgtcttgaccgacgagggattctgccttttgtaggttcaacagacgttgttgctcgagatgttgtgccatcattattctctgttcgtctggtgacgggccttccgggggtgcacccggctgggggtttcccaccacagggcttgcttccatgggagtgtgtgtggttgttgtgtgtgggtgcgtgggtgtcaatgcgagggatgtacacgctaacagtgacaagcgagatggaagaccgaggggagagaaaggaaggtgaagcgaacggatggagagagggggggtatgttctgtcggttagggttaacacgtgtgccagcgcacagcctgggtgtgcctgtgcctgtgcctgtgcctttaagagtgggcgtcggcgtgagtctgggcttgggctcgtctgacgtaatcacccgatcagtctggagccagcagcataccggggatgatgaggagtgtgtattgggaggacggcgcagaagaggatagtgctcctgacctggactgggttgactacatggtgtttagaacaggtagacacaccgagagatcttacctgaggcaggccatgactgatgatgttatggtaagcggatgacgatagatagaatgcgcgcttgtgttgaaaccagggagagtctgggggttctgttgcttggctgcttgctagcttggttgatcgctcgctagcccgattggtgaccagcatggttgatggcttggttggttgctgacttgcttgctcactcacttgctcatttggtgatcgttccgattcttgccggccgctcttttgcctgctgatccgatcgagggacgggcgggcgcgaggacgaggtgtctgagtgagcgggtcagggcgtgccgagtgaatgggagggatgtgttcctggtgcgtgtgtgtgtgtgtgtgtgtgtgtgtgtgtg

SEQ ID NO: 529 - DNA, 449 bp, Xanthophyllomyces dendrorhous
cccccccccgcccggcctcctcgtctgacgcctgaacgggaaagtatttgattatatttgattctttttttctttctctccgactttccctcccacccgacttttaccttgttttccgctcgtctggcccggtgtcgtcgtcgtttaggtcgctcggtcgctcggttggtgttctctttgctcatccccagctcgtcccaggtcatcccaggtcatccacagctcagctctggtcatcacacatcgtcccggctcgtcctagctgttgcctcgatctattcgctctccattccatccggcgggtcaaaagaaagagcggtccaaagagtacgtcggccgtttctctttcctttcttccttccttccttctttccttcttctcctatcgtgttcttgtgttcttgtgttctctctttcgcactcatatacacacacacacacacacacac

SEQ ID NO: 530 - DNA, 1506 bp, Xanthophyllomyces dendrorhous
  misc_feature (1319)..(1328): n is a, c, g, or t
cacacacacacacacacacacatactcactgacacccacccacccactaaccgatgctctcctcactctttcagcacaacttgatcgcaaagatgaacggctcgggcacgaaaccagtgccaatcagctcactaagcattcaatctgtaatgtcctcttttactcttccttccttctccgctctcctctcgtcatccaacactgatcgagcaatctctctctctttctctctctcacacacacacacacacacacacaacagttccacaacgactctcctcccttcaccggctcggcagattcccccccgcctcacggccagccgtcatacctcgatttgtcccaagcactagagtccgcttcctccatcagcggcagcagcagcaataataacaacaatcaccatcaccccggcacgaccacggcctcgcccgcacccaacccatcatcatcatcatcatcctcatcctccgccgcctcgtcgtcatcatcctcagcagtacaaccacccctcccaccatcatcccttcacgacaccaaccatcactctgatccaaccacaaactcccacttccgcaactactccagtccacccacccaccagatcacacagatcaacggctcgttaaaccaccaccaccaccaacaacaacaagctccccctctacgcaccagacacagccaacccgtcctccctccttccccctcggcctcaaccaggacgatcaaaccgatcagaccgtaccactccgacaccctacccagcccatcctcagcctacccgccgctcacgtcctcacagacgatcgtcccaccctacaaccacggagacccggtacccggcccggccgccgtcagacatacccccgccccttccttcatcagcgcctacgatggtgaaccagacatcgacgttgacggtgacggcgatggagaagcagacgccctcagtctcgtcggcgcagaacgcctgttgcccagcctgggtgactctggaaagtatctccgaggtgaaggagactacctctttcccaagcatcgtctcaaatctgtctgggatggtcagtccagtgtttacccttttttttcttcttttttctttcttttcttttaacacactctctctcttcttggacttacctttacccttcctctcaacaaccaccaccaccatcaccagaccaagaaaagacgccgttggtgatcgtcgcctgtggatcgttctctcctccaacataccttcatctgttcgtaatcctatgttctattctcacgaaccattcctcctttccctctttctgacacacacacacacacannnnnnnnnnctccagccgaatgttcgagatggccaaagatcaaatcttggaaagtgatcaatacgagatcctaggtggctactactcccccgtgtaagccctcccttgtctcggttggatcactcgaattttttcctcctcttgacgcgcgagtccatctgtctcgttttggtgctcgtcctctttc

SEQ ID NO: 531 - DNA, 2052 bp, Xanthophyllomyces dendrorhous
cccaattccagatcggaccactacaagaaagcaggactcgcacccgcacaagacagagtcaagatgtgtgagctagcggtcgagagcacgtcgacctggctcatggtcgatccctgggaggccggtcaggaatcttaccagcggacagccgtcgtcctccaacactttgaggaagaactcaacggtggtcccaacggtggagttcgtacccgaaacggtacgttcctaaaaggccttcctttctctctctctcctctcccgtttcgcacactttctcaaaggttcctttccatcccttcatcctcttcttcttcctccccaggcggccgacaacgcatcaagatcatgctcttggcaggaggagatctcatcgagtcgttcggacatcccggagtctgggcgcccgacgacgtgagtgccttctcctcttcgtgctcaggcctgtacatacaattctcaccccacccttcctctcctctccacacagctacacgtcattctcggtcagtttggttgtctcatcgtcgagagagcaggctcagacgtctgggcgttcttgctatcacatgatatcctctaccaccatcggttcgtgtttcattcatccttcagccttttcgttcgttggtatcgtcccactcatatctcgtcctctccaaccttccgtcacagccggaacatcatcgtcatcaagcagttgatctataacgatatctcgagtacaaaagttcgcttgtttgtccgaagagcgatgagtatcaagtgggtttccttttctttttttccttcaaaaattcatttccaatacctagtctactacaaccctcttcttgttcactctcgggaatactcacccaaacgaacctttttccccttgtcctttccaactttccttaggtaccttctaccgaacagcgtcatccaatacatctacgaccagaaactttatacttcgttcgtctctagccttctctcttccccccccaaagcgcaaaacggctgatcccctctcccttttttccctcctcttttcttcgcttgggtatatctctgttgatagagaagcaccagccgtccctctagaagctgtcaccagtatgttccttttttcctttcctttccttttctctctctcccactccttgtcctcacaatataacaccgaagactcatcctccttgcgtctttgtttcgtccctcctgcccgttcccatcgataaaaagcaacgtcccccccgccgaggacggtcccaccgacgccttccgccttgaccgagcgcaaaaagtttttcgtagcggactccgactcgagaaatagcgccaggacgacgtctgcgtgatggcctgtttctacttcttcttctttttttctccattcctttcgtttacacttcgtctttttcttttcccctcctttatttccttctttattttttaaaaaaaaactttttgcttgtctcgtttgctctggtcagtcgatcggtcctttgcgtgaacgcatcttttcctttcgttcttcatccattcatccatccatccattcattctctccgtctcgtctgtctgtctgcctcggttttgtcctgcttcaccggccttagaacgggcctatgctccaacatcctttcctcccctcctcttttttcttttctttcccactttacatctttgttttttactcatcttgtctctcggatctctggatatctgatattcaggaaattcaaacccgaataaccacacacacacacacattgttctttaaggtaaaataagataagggaagaaaagaaaagagatgaaatgaaataaaggcggcggccagggttctgatggacgtcgagaggaatggagtaaaagccggatgtgagattcatagagcgacgccaagaaagcgaacaaacaacagagaataaaagagcaagaggccaaatcgagatagtacgagaggagagagagagagaagaaaagtaaaatgtttttttaaagggaaaggaagagtctacgatccgggacgatcgattcgactcgttcatctttcctatcaacaac

SEQ ID NO: 532 - DNA, 42425 bp, Xanthophyllomyces dendrorhous
aacatatacacaaaagaaaaaaggcaagagaaacagaagcagccagtaaaacttttgtacccccttttttcgttcttcattcttcttgatatacttcgtttacaacaataacaacaacagaacagaacagaacagaagaaaagactcgcgaccttgatctctccgcactgcccaacatcggctagatcgaaaccacctagggcttgaaaagtcggtacgtgaggaatcctcccatcagagcgaacgccaagagacaaccctgtaggataatcgagcgcaccgtcaattttcagctcgacaaaggaacgaaggaaggaaggaaaccccgagacgattcagaactaaaacacgtacgacgataccccagaaccaagccaaacccggtgcattctgtccgggaactatcacgttctgttttcgacccacccacccatacacacacagaaagcgcgaaaccaaccgtcagtgtcacatccccccaaaggcgtctttatttatggtcaaatgaactgaccattccccacagaccagtcaccaagttcatcggactggtagaaaccacgagtaaagatgtatcgttagtctcgccaggtaacatttgatagaaaaggaaagagccatatgaagagaaaaaaaagagagaaagttcttcacattaaaaccgttccgagctaaagagaacgagtcaaacggccgtaagcatacgttatgatatgattgattaatacaaacaaaaacaaaaaaggaagaagaaacgtacggcggtcatccttccaagcacatcgttcatcttgttgtttgcatctacacgtttagaaggaaaaaaagcgacatcaaacaaggccatgcagcgtcagacccatgtacaccatgccagaaaggagccagaggcatccaaagacgaacctgtcatctcgatcgagatctgagccaagtagttactatgcgctctcgatagaatcttttcaaacacgttgagcgagctcgtcatcgtgatcaaatggtcctatcacacacaagacgcacaaccgatcaagttagctgtggtgcatggcaatctgcatctagacgatctagagcggaaaaaggtacctgaatatccgatagatagagtcctatgtctgatcgaggagccacactcctatcgatcccaatgagcaagccagatggtctacgggtcaacaaccagatttgtatcctagcacagacaacccaaggacttaccaattctcattgcatcgctttgctagacccttaacgacatccgccttgttacccatcaatcggagcaaacccatcaccttctttcgacaggttccgattctgatttatcccataaattccagagtattcagtgatgcagtcttattgtccttttttttggtgagcacccagatcgacagggacgcaccttcgaagcatatcactttgttcggtctccttgatgataagtaccaactacaagacgaaaaacacaaaggggttcacaaaacatagccaacaattagtaaccctcattgcaaaagattcatcattgagcgacatcaacaaactcacctcatccaccgaatcgacctcgtactcaatactctggatcaacggaccgaacgcatcagtcacgtcatcgataagcgcgtacgagatccagtccgaagtcacagtaatgtaatcctttagctgcttgattcgacgtcgcacattttgcggatggggagttgctcggaagtggaactttgattgcccaaacaaacaaacaaacgtcagtaacgggtgcattctaggataaacacagacgaaacctacagagatgactccctccctgaaaacgaggagatacaagttgagaggcctgttggtggagaggggtttttcttagtttccagagatcaaatcttccaagatgacaacaaaagactacgcaagatacttactctagatgagtagagctgtaaaagtcctggtcgaacgacctgaaacagaccagataatagtttcggaacagttcaatcttttctctcgtctcttccatttggatatcttccgtagtaagcggatggattccaaagacctgatcatggccaaataaacagacggcatgataaactttttagcatatctgatcgaccatgtcccgcataaaataggtctgaacgatgtaacgtaccttgctcagcatcttcatctcatcgtccgtcgggcaaagcacgtccaaccaccaagtactcgcctccgggtccccgtcgacgtctcccagaatcgagccttcattttttgggctgtagccatgagagaatcctcctcccccatttgaacctgctgtttgtccttgaccggcggcagcggctccttgcaacgccttgtgtaacagaccctggctactgccacctgtagtgttggtgggggccgtcccaaacgggctcacattctctgatgcgtcgcctctcacactttcttcgtccgccttggtttccctgccggtgaacaaatcctcaaacgactggccctccgcaggcaactctgagatggacctcgcgtggatcgttgcaggcagcgcgttcgaatagaatgagaatctgaacggtcgttcctccctctgaacgggctgaggcacccaggatggtaggtctccgttggccgggaggtgggaatcaaacgaagacgtgcttccgtgtcgttggttgtcttggtaaggacccttcagcaaaggcgactgatgaggaaccggagcagatccttcgaagagagcgagctttccctgtcgacgggcatgtggagacgggtcagactgagaaagctttcgttggcgccgacgtgtgaatgcctgactttctttcggaggagatttgggtccgatgtcgataagagacacatgggggattgaagctggctttgagtcaggcgacgatgtcaagattgactcggggatttgctgcggttgacgtcgtccaaacccatcgatctcgtcctcatcctcatcttcctcctcaatcttgtctgggtcatctctatagggttcatcctcatttgccacgacgtttctctttcttctcgagtgaagccctccagaccgaggctggctcttcaatgcctcccgttcgagctcgagcctttccttggaggcccagttttcaaactgggaaaagtcaaagacattccgaccgacaaagccaccgttcatgccggcccttcgtatggtgtagtcgttcatcccgttgttcatcgtcatgccacctcccaaggtgccaccaccgttgacggtactacccccaccgattgaccgagtctcatcctcatcgccaaacggcgacggaggcgaacgatcacgctcatcatgggatgaaggaacccgatgagcatagtccacctcgaccggttggatgtgtcttccgtcggactcgtccgtgatggcagcttcggggatgtacgttccactttccaggtgactctcctcgtcctcctttgcctcggataggataggaaactgggtggcgtccagatgcttcaatggcgatcggccagcaccctggtgggaggaagaatgtcgagctcgcagaccggtgttgttggtgtttgattggttcagaccgctgctgccatcggaagaatgaccagacgtatgagatggataagatacgagcgaagggatgtttgggccgagtgagctgctgagtgtgggcgaggttgagacgttggcagagatagactctgaacgagctcggactgtttacacatcacacataagagtgaacgaagcatggtgggtaagcatcagaatggtatcctgaacagatggtcgggaaaagattgctaaagggagccatgctgtgatgataggtagccttcgattagagaatcggatagccaatcgctttccccttcatctttcttcccgcaagacccttccgatgccaacgctcattcgcacacccgaagacctccagccacatattcaagtgagtggatagagcaggctaagcaagaggaaggaggaactgatctcgtcttgtaccaggcttttagagaaccaagagaagaaggaaaaaggatggacacccacagagtgccatggccgagtccaggtcctgcgcccgctgtctctcccgatggtgagaagtgttcatgcttctacctgacggaagcgtcagccctgcagatggagaattagaagtcttaggaggaggtgatgatgacaagctaggcattgagatgtcgagcttatagtgttcagagtcgggatggtcgtcgctcggtcaaatcgatttcctttggaaggcgaggaggaatgagaacaccgaccgagggggatgtaaccatgactgatgacgcatcgtaaccatcggtgtgattacgtaatatggcttcgtttgcttaggaaagaagagcatacaggtatatgcgtatatgtatatgtgtattgatctctcttggatgtgtgtgcttcagacgatgacagaagacaagatggaagagagcaagaagagcgagaagaggaagaaaggcatgaataaacaatggttttaaccgtacaccctgaagtacatgacgaaagaagaaccagaagaaggcattgttagactctgagcctgtgcgagtgtccagaggaaaggaagcttacaatcggaaaacgtcgttgaatctataatattcagagtcgagcgccagcagaagggagatgaattgtcaggtcagcaaggatagcttacacccaattgtaacacaactcaaacttacacccagtaggttgctccctccttgatgagctgaaacacctgggagaactggagcgggggagagtcgtcgatctattcaggttcaaacatcgtcacatccatcaagatagattattgtacccgacaggcaaatgataaataaattaaaaaaaaagagtcagtaaatcgcaaagacgatcgagatggagtgaaagatgcacgtacgatgagctgaccggtcacaagaaccatcaggtgctcctgtccaggctgagacggctgagcgtcagtggtaacaatcttgtgctggacctttccgaagggaagctcctgtatgcgacaaacaagcgacaagagaattgagagttccaaagaacaaggaaaatatgtatgcgtagggtgagtttggctagctggaagatctattgaggagaacgacataggaaagagacgaatggatcaacgaaccacaaggtgcttgacaatagcatctccactcaagaactgcttctcctcccaggtaagcatagagacatctcgcttttaaagagaagcagaagaagaagaaaagaagaaattacacaaaagccatgtttgatagcggagaccgatctgggattagtctccagaattctttctagtcatgatcaacataagggagaagtagagggactaacgtagagatccttcaaagcaggtcggttggtagcgaacagagagtagtagtactctgttcagacgaaagccatgcccaacagttgagcgagacaacgaaaacgacggaaataacaaggcaaaaaaagggtaattcagcgatagtcgattagatgatggaattttcttttgtctctctgaatctccaagaggtgacttttgaggagcggataagaacaagacgataacaacaacaatagaggagagatagatacgaacgggtgaagctggtagcgacggcgttgaggtcggccatggttgctgtatgattcctttgaatttgttgaaggtctaaagagaagagaagaaaagaagaaaagaaggcaagctcgcttcacgtggagggaaacagaggtggattgagaattgttagggttgcacagatccgtcaagttaaatcaagtttagaaattccaagaaagggtttcgctctcagctgattgacataagatttctataagagattgaatacaatgttgtttgtatgaagatgaagatgaagatgatggagcacagaacactacgagaaccaaaaaagaaaaaaaaagcaagagagagagaggaaaaggagagaagaacaacaaaggaggagagtgtctggattcgtatgaatgcagtgtattgttgtgttgaccttcgaggggtcaagagattaggaaaccgctctatatcgttctagttttggaaattaacaaatgactaagtttggtttctggtgtatgaagaggagatgaagaagaaggagaaaaagaaaggatcggagagtaaaggatagaaaccttggaatgcaaaatacgcatggaagcaaaaaaggaaggagctttctctaatctccgctcatgtatgatcctacgacctcgtaacaactgaccatgatggcacaagcaggcgcgacctttgccagcctaggaacaagtccggcaaaaagagcggtgaagccctcgttcttgatgatctcgcgaagcagaggaattgtcgacgatggcggtcgagggctggtcgatagaagtgaggaggaggtcgggttggaggtgatttgacgccgagtcttgagaacgtcgaacggggtcgtaactaatgcagcaaactaaaggagagtgttgaacccgcaagacaagatcagagagagaagatacctctgatgagcaataaaataaaataaacgaaccattccactcccagctccagccaccatcgctctgccccattcaccctcaccagaccctgccttctcccaccttggtccggttagaactcttcctttcaaccattcataccctccccagtaaattccactgaatgggacatccctccataatgtcgcgccgatgcctctccacaaacttcggacgccagactcgccaaccatctttcgaagatcgatcacagtcgacttaactgttggctgaggtcggcctggaggtggatgcgcctggagacgagtcctaaaaagttcgacaggagagattatagtagcggagaacgtcctagcaagcgagccagcaaaaaggggggtcgacgtggccaagaaggaagagttctgaatagagggctgctggatcagatacgttcgaaggtgatcatatccaaccatatagattgcggaggatggcacgcccattgttctgtcaaacgtcaagagttgtaacgttagccagcacgaacataaagaccagataggaagaagacaagggcaaaaaccaactcacatcgtggttcccacacctctccagaacccacgaactccactttctctccagacgctgacgagttcatctctaaatccatgggcaaccctaccactagccttgaactcctctaccaacgctctccacccagaaggactggcacatccaactggctcccgatccaagaccaaagtattgccttgagctcgtattgaggccgtcatggcggctgacgagaccgatgttggaagcggagcggtggcgcagtggatctggtggtatgaacggagagaggatgaagatgaggacgatgaggaagacaagagtgtatgctgacaacacgaagatgatgacgtgggtgagaatgagggtagagatgatgcagatgcaggtggcggccgtgattgaagacgagtcttgaggacatcgaacggcgtcactttttttttttgtttttggtatgcaacaaataacgatcgaatcggcaaatagaatacaatacaggccaagcgttagggataagtagataagagatggagaagaacgaaagacaagtacgcaactgagcaaagaagtagcgaccgctccggtcatggcacctgttccttttgctcctatcttggccatcaaccctttttggggtacacgatcatcgggtggggagggagaaatctctgacggaaacggggtgtgggcggtgtggggatcgatttcgagcaggtgctggtcgagaagaggggtagccatcgtctggcgaaaagaagggtattatgttctcgtgcgttccgactcttgcgtgtgtgggatgatatgtattatgtatgtgaagcagagataaaagcaaaagcacaaggagagccgaaggagttatccgtatgaagaaggaaagaacttagggaaattaggcggacgcgctaatggagcggagacggatttgggcggtagcacagcatttgggtcacgtgagactggccgtgtcctattcgtcattcattttctccttcgatagtgtattctacctactctgggcgaacagagagagtcagagtgaactctaacaaggaccgacctcatgacagctcaagtgagtgacaagagacgagagcgcaatatgtttgaaaccgatgagtttcttccatcatacaggatgttctgaatgattcgtttacataactccatgaaattaaactcccatacttacattcacaagacagaccttgcgctgttagccgttgatacagatatgatcgtccgcggattcattcgtttgtcagattattctgaactaagcatactaatacacacgcagactaagaaacatgtacatgggaacgatctctctcactcacagaggaatagctgtcgagaggtacaccgatagaagagacctgttcattacgggtcacgtgagagtgtttggacgaaagccaaatgctgtgcgtgatcgatcaactgacgtcatccaatgtcgtaacccggccagaagagatgaaaaaaaaaacatcagatgagcgttcaacttctttctcttcctttctctctccacatcctaaccttccaactgtttcatcactcatagtcgaatgtcgtcctcagctcaagcttcttccactcgtcagcgcaactcatcctccctcttggcaggtcaggattctgacggtgtcgatcacactaccgatgctccccagggaaagcggatcaagcagcagcctgtgacatcttgtacggttcctttttatgttctgtgcttctttgttgattagatgctgatggtgttgagcgtatttatgtcttgcagtcacaagcaagctcatcttggttgccatcgctgtcacatccttctacgcatggtttgtccatcaacactaacctgtttgttctcgagtctttcgaatcgtggtgactgactgatagatccttctctcgggtgataccgtatcttcaggcgattctctgttcagtccgctgaggttggtggttggtggaacttgatcactggacataggccggtaaacacacccatcgctgctgttggtatccattcaatactttccctttcttgcatgtttgtgccctttcgctgacttgtgtgcatacgtacttatgatctcctcttggtttgtcatctgcctttggtagcagaaagccgctgcctcagcagctgcccttcaacatttctctacaggctctgccggatccgactctcgagctccttccggccaaatcggtgtcgaggaccaaatcatccgactggctgactcccttggtgtcaagttcgtctcatctcttctttatattttacatcttgatgttcttctgctaaaacaaattccctctgtatttgtcaaacacaaaaaaaggcctcgacagttgactgaagctatcgcccctctgctccaacccgctttgctctccaagaccgattctgccatccacaatgacaagaccccggaagagattgcagctgaagaagcagctcaggcttcggcggccgagacggctgcccatgccgcaggtggagttctcggtggggtgggaacgatcttggatgctctagcggattaaaccgcaagatcaaacgatcttgcgttcttgtgtttgtgcgagcttcatccacatccttcttattatctgtatcgtcatggctttttttcctcattcagtacatctttttgttgtctagctatccattgtgtctgtagattgaatgtgatctctcttgcttgagcttgtatttgtcaaggtgcagagtcgtaacgtcacatcgatacgaaggcatatctactcagctttcctccatccgtaacctcattctgaccgtgatccgaatcccaatctctgttgaatcaacccaagtccaacccactctgtgcctatcatcgttgttctcgtccagacaccgcttagaccgcctcctccggcactgcctaagaaactaaagccaacggcgaataccaaaacgacgatagccagcctgatgcttcttcctcctgtccctcgtactactccaagacgtcgtgcttgagcgagaagcaaacgaggcaagaattcacgccatcgggttcctaaacggcctgctatagagccaccgccaccagctccagggttacctgccgaccggtttcgatgaccgaccgttcgtttctccgatccaagtgctgtatcttcgtcttccgaatcggacaaggaaagtgaggaggaggaacagacgatacactcgagagggcccagaaggatttgctcggcctcttgaacctcatctgtgttttcgtgcccgggtttgtcgtcgtcgtcgtcgtcgtcgtcgttggcgtcagagctttggacactatcggcaacaccagccttgtcggatcccgcgtgcgccatctttctggcccattcggcctcgtaggtgaacacaacagattgagggcccatgaaagtgtctagctgaaggtcaggacccagaacagggaaccgtgtttgaagtcgaatcgttcggtcaaacaaatctggaagagagataggcaacaccgttgatttctctgtgggcgtggatagtggtgatgtagctggaagagggttggaagagggtgtagaagagatgaaagggggcagttcggacaatgtcgagtgaaggattccggggtcttcagccaaaagttctttcattgagagaatcaactcttttttcgacaggataatctaagaaaacaccacattccgaggaaacctgatgttgtcagaaacttgctgattgattgattgatcgatcgatcgataagttgaggtaagagtgagaaaaaaaatactaacagctactgagaggtaaacgacaaccaccgggttgttagcaagaaggaaatcaaataataattgtatgtgggggaacgagtcgacgtcatgggagaaaagcgtaagaagccaagacagggcaaagaacgggaggggtgttgccctaaaagtagagggtaagaaggagaggggcaagaataagtgaaggttcaaagaacgactcaaaaatggctccaagaaaataagcaagataagaggagcgtagacaacgtactggttcacaattctatataactctggatcagccagtttgaggagtcgtttcatcactctgtaaagttaggaacagattcagaaagtcgtccacgagaagaacacatcatatgagagacctctggctggcccgtctgaaactaaaagaacataccgaagcaaacccatgaccggctcaaggcctgatcccatgccatctctgattctgaacaagctgactctttctaaacagtctactagagttttgattgaggtagggtctaatggcgtctctgcggtttctgctggctcacaaagacggacgtcgaatgtagaaactggatctgatgaagtctgagtgccatcaggtttggatgcagagcgggcacaccgagcttgggaagaggatcgtgaacacaattggcggcgcgcaggaacaaggcatcgtaaaggaatgaaagttaggagaaataccgaagcgatatcgtggtagccctaagatcattgtgagcaacatgtgacattcaagtcagcaggccaaccatcaggggggttctcactacaagagtaacgtgctgacctgaaagtatcgcaaaggccgatggcgtctgagaactgtcacgatcaacgcgtgaagctctgtctggagaatctctcggtcgttggcttccactgggggatatacaacgaagcctctccgagtgtcgagcttgacctgaccttcgtctgggtggggttctaacgactcgccgtgctgagaggcgaaatgtccccatgtgactggcgtaggtgtctttgaagatgagaatgtctttggcgaacatacgcctggttcctgagttaagggctgaagggaggacgaaggaagggcctctgatatgtcaaccgagccttcaaccggcgaagaagatggagtttcatccaagggggagccgtcgagctcattgagtgtgattggagttgtcgcatgggtgtcaagagatgccgaatcgacgatcggtgatgctaggatagacgtccccagctgtatgaactctgagctgtcatctgcaacagcatcttcacagctatcgtcaccaccgctatccaagcaaccacggttagactcctgactgatagagtctgccaacgaagtcatcgtagattcagaagagtgaatccagctctctcctagacaggatggcggattggatagtgcgctcgaagtagaagccagatcggattgaatatcgacaggcgaggcaggacgcgaggccaaagcgacggacggctctacttcagacgaaccaatagaagaaacatctggataaacacctaggagaaacggcctggagcaaggacgagattgttatgatgagggtctatccattgatggtcaaccgagagcatcccagagggacggtagaaatcaaaggaggagcaagagcagacttggacaaaccagacacgtttgcgaatgtcatcagtgagaaagcctccttctcgagctgcaaactgacggagagcgagcacatcctctctctccagtgcgtctgatataagctgtgtgggcgttggctccatttagaatgggataagatctgtctgaaagcggtcgatggtactctgatatgctgttatgccactatctcggtgtctgggttagctgatggaggtgatcgactgaagcggcaaatgccgagtcactttccatattttatttccgtctttcttgccttcaccataaccatcgccaccatcatcgcccatgagtagcacttccacttggtcgccctcctcatggaggtcaaagacagtcgctcaggtgagcgcccgtttctgtctgggtatgatgagatctagctcacaatcatgttctttaacctctctaggatgtcgtttaccctgatcagtcaaaactcgataggtttgctttcactcccgttcttcttttttcttttctttttctttttcttgtcattcgccaactgagaccttttcatctttagtgtgctcaacaagcttaagcaccttccacctttagtcaccccaaccgagatccttcgccttcgtgctcatctggccagtgtatcgagaggagagagctttttactgcagggaggagactgtgcggagctgttcgactattgctctcaggcaagccatgccttccattgaattcgctcataatgccgtcgttctgatctgttgaaccctatttatgcgaatccgtttgcgtgtatttcaccaggacccgatcgagcacaaactctcactgattctgctcatgtcgctcatcatcatctggggaggcagactgccggtggtacgaatcgcaaggatcgctggacaatatgccaagccaagaagtaaggccacagagtttgttgagggctatggagagatcatgagcttccggtaggttcattctatcttagcttatcttttgttttgtcaataccatcgatcatagacaagttgccgtcacgaactcattactgaccgatggcgtctgtacaacttatctgcccgatcagaggagataacgtgaacgggtatgaaccaaaagatcgagcgcctgatccagaccgacttctagggtgcgtttcccgtctcttccttctatctatcatccgttcatactatctgactgtaagacatcgacataccttcgccatttatagagcctacttccattctgctgccacgctcaattacatccgatcccttctctcctcttcgtttgcctccctatcgacacctacatcttggtcgttctctcacgtacggtcacctacgcttcaggcagaattctccgacgtaatggaccgtttgtcggacgcgcttggtttcatgcagaccatcggagcagacctgggcggatcgatcgaaggagtcgagatattcacttctcatgagggtttgagccttgaatacgaagaatgtctcaccaggtctctcaaaattccgatgtcggcggaggacagaaagagaaaagatttggaggaaaaagtgaggagaagaagagaaggttcgatcagcccggtaagaaatccagtggaggaaaagaaagcatactttaacgcagggtcccattatctctggatcggagaccgaactagacagatcgacggcggtcacgtcgaatacttccgaggcctagaaaacccagtagggatcaaagtcggaccgtctatgcctgctggtgaacttactaggttgttgtccatcctggatccagagaagcaagatggaaagatttcactcatcactcggtacggggcgagcaagattgaccagttccttccggctcatatagatgaagtcgaatcatccggtcatcgagtggtctgggtctgtgatccgatgcacggtaacaccaagacggctgagaattcatcgctcaagacgagagctttctcagacatcattcatgagatcactcgatcaatgaagattcattcagagaaaggatcgaacctcggtggcgttcatctcgagcttactggagaggtcaatgaggaagggttctctgtcaccgagtgcgtgggtggctcgatggaacttgccgataaagatctatcgaccaactaccagacgttctgcgatccccgagtacgttctcatctttcttttcctttcttgcttgtcaaactcttcgatccgacgtgtccgtgtcgatctcaataaaatcaaacgaaccactaattaacattttaaaaaacatatacgtcgctttcaaaagttgaactacgaacaatctctggatgtggcgttcctcatatccgatcacctccaagccgctcgaaaaggaagagtgtcggaagaacgtctcctacatgctctgaggggccgagtcgaggcgagagtcgagagaagagcttcaatggcagcggcggcggcggtggtacaaacagagaaggaaaaagactcaaattaggaatgaggtgaaatggaatgagacggagattcgtttggatcaatccatatctgtactcttcgtatctgacggggaacgtaagaaaatgtctttacattcttgatgtttcgctttcatcttgtcttatcttggtcatctcctatgattcgaactgagtttacatcaatcttgaacagaacggagaggaaggaaacaaagaagaggaggagagagaaaaggagacgcaaagaaaaagaaaaagaaacgaatcatcaaagagtccaatcgtcagaactaaaacgacagaacggaatcaggatgcctgaaacaaggattgaacttcgctcaatcttcttcttgtttaacttcgattcttcctcgaacttagaaagacagagatggaaaagaagaatagcagaacagatcgagattgactgtgacatgaagaaacggtgtttacgtcgcttataaaccaaagcagaggattgagaaaggaagagaaagaagggaaccaggatatgagcagggcatcatagcatatctcttcagacttgatgagtcaaaagaaaggaatgaaagatatgagacgataaacatgatgaaaacaagaagcgagagacagaatgagggtaaaggcgaatagtgaatgttggatataaagaatgaatgtatggaacgtattataggactaaggactctggtagaggaaacgtgaatggttatgccggtagagaaaggagtagaatctgtgaaagaaagagtctgacagcatggtaaaaaggcgtttgattgggaataaagaagaatgggtggaatcaataaaagcttggggagaatcacacaaacatacaggcacagaagacgagaagagaacttgagagagaaaaggaaagaaagtgaagaggaagagaaagcaaagaaaaaacaaataacatttactctactctatgagagatgcaacgaagagatcacccggtcgagctcatccgtcggatcattgcctaccaacaaaaggaatttcgtcaaactctataatacttctagcttgtctctcctcacacaaagaaaaaacctaccatggtagaactgttcttcgagcgtcccggggaacaaacttgatcgagccgatccgggtggggaaaacccacctgatccgttgaccctagcgtttgagctaccaggaaacgagccaacagagtacacactctgtccatgcccctggtgattatgatggaagctgttgcggtgattatgggtatgttggttgttctggtgattctgttggtgtcctttattgtatccagcataagtcaaagatgtcatatctagcgactgtgctctatttgagccagatcggttgaccgaaccgatttccctcatctttgcagccaacgtcgagtcggagtctcgcttcgaaatctcttccacaggcgatcggggagcagacgttggtacaggaggcggaggcatcgaagagaggatggtggataatgtaggttgagacgattgtgatcgttcatggcccatattagaagccctggtctgagacgtttgcgattgagtaggaatccagaggtccgacagctgttgacgatgccccaacccgttccgaccttgtgttctcggtggctcgtaaggcgtcgaaccgctaaagagcgagttcgagcctccaccacttccaccgagagagactgaaggaatatgcctacttggtcgttctggactgtgtctgatttctcggtcatccgaggttgactgattttggaaagaagactctgtatagaacgtctgagtagagttgaagagtgctttgacgtcttgggcagaagctgctggccggagtcgccgttgaactaaagactcgccttgagtcggcacttctgtttcggctagaggatagaacgccaacaatcgacggctcacgatgagtcaaccaagacacatccgagcaaatcaatttgagggaacgacagaatcgagactcaccaatgttaaatttagaaggaagaagagcagaattgaagtgggagaacgcatcggcatatgaatctggtgcagcgtgtgagtctgaaggatagatcaaaatctatagcaaagattgacaagaggttgagatttaagtaatctgcgtcagcgataaaagtctgaatacaaagagaggaagagagaactgaccttcctagcgagcagatactcttccaatgcatctttggctggtcccaggaaatcgaggtttgatcgttgacatttgaacttgaataccgagtcctctccttgttcctgttggtagatcctcgcaggtggcacaatcgccacttgagcttctctgttgatcctctcaattagttggacaaactctggggttcccagcacagaggctaattccatactgaacgggacgtgtagatcggcttcgaaagggacatggtcgagcaacatagcagcagcgatgtgagcctgggattcaggtccatagatcgttaccacatcagacgcggtctccttgtggggaaaacggatggtcgagtttgtcttgctttcgatgtcgtgaatgaaaattgatttttcgccaaggagcgtccgatgatatcttctcgggatcgataccgtctctacaatgtaatctttatccttggggctgacgagctccatgacagactgtttgagctgctcgagattcatcgcgttcttcgccggtgtccgagccacgacattgtccgtgttgtcctcatagccacccaacaacgcgaattcctctgcgttcgagaacttgacgtagactgagagagggaccagcagagatagggcacgatcagtaagtggcccttcgaatagagaaggtgagagaagtacaagaagacgataaacttctccggactaacctccatacttcttcataattcgctgaatattctttcctccaacaccgatgatccgcttgtgataactctcgggtacatggaacgatacttctgccggcagctcctcctgaagcatcgacaatccagaaagcgcatccgtatcatttccagcgaggtccatcaagaagttgtagtcgttaaacgtctcaaacttgatcttgacgttctccatcttcatgatcttgttgatctttccgttcttctttccagagatgaattcgcgatgctcgtttgcaagctcgatctgaaaccgaatctctcgatgaaagttctgatgccacgaagaagaggagaaaaaagattaggacgaagcttttctatatgtccacaaggaaaaaaagaggagaaaatcaagacgaaaagagtaccttgacttcttctagatcgagtgccatccccacggctaacctgacgggaccttccaagccgtggaactcaaaacaattactcttccaaacgacctctgcacctgaagcgtttgcgatgtgcaacaacgccggttggatgcctatcgggttgatcgagtttgaaggcatgagcacatcaaacgaaagtggaagaagccagaaagaagcatctaagaattgacaggcaagtgccatgacggatcggatcgtccgttcgatcacgactctggagtcaccaaatacggtgatcaagctaccttgactgccaagggttggaaattgaatgaacgttccgttgtcaatcatgatccctcggacttcatccactcgttcggtcgccagccagtccaactttcgaggcaagatcggagtgtctctcgaaatgatgcatttgctctgtaattgagtaaaaagagaggtgatgagaatcgatgacaaaacaaggaaaaaccctaaaacgtactctgatctttccaccagcgatctggtagatcatgtccctagctctctgaacaccaaagaactcgcccgtgatccagatcgtattctttgcttctcctgatccagatccgggaccggtcatctgagcggactgattagattcccacgggccattcccattcagccgaagcgctttctcaattccgcctcctggggctcttcctccaaccggccctggaccgatgctaataccgacaccggcaccggcaccggcactgactgctccagggaagccagtgtatcctccttgctgctgctgctgctgctgctgtggagacggcccgtaagggtttgaatacacagaatacgcaggataagacgatcctggggcctgctggagctgggattggggataaggcagcatgtttctgtgcggaggggtaaaagcattcataggctgtgaatgagcgtgagggtgtaacgacgacgatgccggcgaggaagatgccgacggctgcggaggcattgagagagggggaggaggcagatacggcagattggtccgattgtgtcccggttggaatggcctcacgtttgattgttgtccgggcggaggaagagggatagggccaccaggtccaccgaacggacggacgagcagaggagagggcatcgatggactaggcggaagcgccgagagaggcgaggacggtggcatcgaagaaggtagtaaagagagcgaggcggtcgggaaataaatgttcgtccctgtttcctcctggatggtctgaatgacctgtcgtttccgaccggcgatgattgaatgaagcttgtagtcgatctcacaagaggccgaatgaagtccagtctgtaaatgtgcgagatcaaaagaaaatcaggacgctattaagaaactcatgataagtaaaggtgctagacggaaacaaaacttgccaattcgtccagaaaaactagcaccctaactttggccgcgtcaaccgagctcgactcgccctcgacgatgatgccacaagtgcgttcggtttcaagtccaaaagcctgtttttctctgctgtcctctgacataccctgtgctctggctgagttgccgagggctgaagaggccgtctggtcaaatgaaacggtgaccgaggcacctgtaagtgtggagatatcatctagcctggcctgaacgcctggcttgaaactatcctggttgatgattgctgccgacggggagtctaaaacgtctgatcgaggcactttgatccggtggacaatcgatcgttggcagtctctgaggaaggcgcccttggcatggaggacctgagcgtgagttccagatatgaggatgttgtaccctctagtctgatgataagactcgtccgcggaccgacggggcgagcggggctgattaggaaacggatatgaaaattgtgtttggggctgaggctgagcatacgcatggcctgcgggctgacggagatgagattgctgaaagctaggataatgaagcagggaaggcgaggtcgatgctactgtagtcggactagcagaggacgggggagatgttgaggctggaggattgttgctgttactattactgctgttgtaagtcgtcgtagttgttgtcggattcgtcactctggaggctggagtgacagtgagcaagcagccctctctggagccaatctctgaagcgagtcgttgaagagcttctgtaggtgtttgtgagctgccatccggtagattggccgaaaacgggatgagtggtggggatgagaggaagaaggatgtagtaaagagatccatgttgagtaggattcaagaagagtgatgagggataagtgaaatttagaaagacaacgggaagaaatgcgacgtgaaagggcacaagaggaagggggtataagatccttccaagaaaaaagttgtacaataaacgcgaatgaactgaggtggggaaggtggatagaagagtaagtcaacccaaggacgtgaatcgaacggagaagagaagaggaggacgtatacggactgaacgatgggatacgagaggacgacctgacagtccagacaagaagagagagcaaaggagtgcaagaagagtgtttatgcaaagagctcagagaccaacacgggtcacggaagcaaaggcacaggggtgactgaaccaaatgagcaaaagacacgaccgtccagagtagatgggatctcggcctgttgaatgaattgttttaacagcaggacgatcgtttgctgatggaaacgataagacggcctgaagacaaaccgaaggaaggcaagaaaagaggagcgagtgactgttggtgttgattatagaagcagcagccaaggaacaagagggaggaatcggaaagaaacgcttggacgatgaggatggatggggtataggctgacgttctctcttgctgttcctcttctaggaaagaaatatgtcgatatgagtgtacgtatggaagagtttactcttggtttcctcctcctggacaagagttataggaacgggataaacggaggaaggaaggtagtcgggtgggtaagaaagggaacaaactcaacggggacggatggaacgaagacgagagatggaaatcagaggcgtggctgtatgcgcatacagctcagggctacgaattttccttattgtcgtctgtaatctgacctagtcatctttctagtaatttttctcaactgtttttttgacgtggtacacctgaaatctctgtacaggtccgttgtgtttctgtgcggttctttgcatcaccttgtagcatcgttgttgtcattcataagatcttgttgtagttctttatggaacctcgtcatagacgtcttgtattttgttgtgactcctgaaggaggtatggtgcatcatctttgacagtgtcttgcagatatctattaagttcaactctattctctatccagctttgtcgtggtacgcgttatagtccgggctgaaagtctcttgatgggattctcttccagttcttcaaacagacactctgctttgcctctctctctctctctatcgccaatctcatcctgtccaaggatgtttcgactctgccgaatctctccaagtactcacatctcatctgcagagtatttttccatcaatatgtctgatgttcttaggtacatcctagtcgtgttgtcgcgtctatttctttccctaaccattctagtctctaccgccctgtcgtgtctccaagttaaatctcgtaccagctgtacatcacgtgtgagagaggcgattacgttttcgcctacgatataattcataattttagcgtaattacatcgtattatggattgtaaccatacagatgaccacacgtgttctttctgatctctatccatctatatctctttcagcctccatctcgaccccgctctctctctctcttcagtcattcttacttaacacacttgaacatatagacagtcatgtcctacaataaagcaggcgtttatccacccaatccggttactacaaggttcgttcgataaaatcgtgaaggtttccctatactcatgactgataaccgagtgacctacaaacaaaaacagaggccgggcctgtaagatcagctcggatggtaaaggtgaaaagctcgtgtacgttaacgaaaaggccgtcgtggtgagtatacaaccttgcaatcgtcgatgttgggttctgaaactagatatctcatcttcttcgctcattccctttccgaccgaacgtcctagattcgagacatccgcgtgcgttcttttcctccgacggacattccatgagttgcctcagtcctaaccttattagctcctcataaaacataaataccatcccagaacctagcacagtcgatcacgtacactcaacaccttacccctccgactatcgcaagactctctccctcaggctactactgcgcgagcgccgatgcatccggtaccgtccgcgtttgggatgtcgccgggtccgatcagatcctcaaactcgaatccaagtcgcttctcggaggaagggcaaacgatctcgcctgggattcggagagcaaacgtcttgtagtcgtcggtgagggtagagaatccttcggcaaggccatccttgtcgacggaggcacttcttgcggtgagattagtggtcattccaaagccatcaacgccgtcaccctgcgtcctaagcgtccattcagggcggtcacctgcggtgatgatggaaacatcgtacttcttaacggagttccctataaattctccaaggttggtctttccttcataaggtcgttcatcatgcgcaatactgtcatcccatcagcttacaccctaagctatacggacgcctttcatgacagattatcaaatctcactcatccttcatcaacgatgttcaatatgcaccctccggagacgtctttgcttccgttggtgccgacggcaaagttttcctctatgaaggcgccgagggagatatcaaaggagagctgagcgcaggagcgtcctcgtcttccctggtgagttttctctcggtttttgtcatttgtagttcatcttgctgatactttatgatgtttctttctcccatttctctcctcctttaatttcaacacgactcagtatggccttgcattctccccagactctgcttctttggcgacctcctcagcgtcgtccatcatccaactttatgacccctcaacgctctccgctaccacctcgttcaacctgtctttctcttcctcttcagatccttccagccagcagcttggattaacctacctgactcctcaaaccttagcatctgtctcgctctcaggtgcactacacatcctcgatacacgagagcctgacagaaggacgtctctcttaggcccaaccagaggaatcaccgctactggtttcgtcaccggtgagaccgaaggaaccttttgggcaggagggttcgacggcggagtcaaacggctcgaagagaacacatggaaggacgttgtcggagttggccatggcggacagctcgtcggatttgctaacggagtcgatggcgtttggtctgccggctgggacgattctgtcagagaggtcaagcaaggagaatactcgttcgctcttttcttctctctctcttgcccttttctccggatgataataacatatcattatgttttggttatagatcaaatactctcccgacaggcgctcagcctacttccatcgcctccctctcagcaaaggatctcgtcgcagtcagcacaggtcaggcggtcgatgtgctcgtcagcggcaagaaggtcgcttccaggtcttttgagggcgagcgcgtactaagcgtcgatctagcagacggcctcttggccgtcggtacagaggtttgtcttttcgttttcgcttcccctttcctctttctctttctctttctttttctttttcatactgatggagttttcggtttggtggcgcatgaatctttcattcgttctatcgcttcccgcgcggctggtaggcaaacaaagtttatgtcttcgagttttcaaaggaagcccctgagaaactcagttctgcaaacccaacgacgacgttcacagataacaggaacccggtctatgtcgtctcttttaatcctgagggaactctactcgctgctggagaagtaggtcatcgtcagctctcttttcgagcggttctgacatttgagaagctcatcaatgctgttcaacacgtccggctgttacacacacactctctttgttcagtcaggaggaaagatccaggtgtacgacataaccggacgtaaagtatgtgtccccacctccttatctgtctatccctcatttggaaagagtttctgatattcatgggtcgaggacacgtagatcaagatctcaggcagatggggttcgcatacaggtcgaatcacttctcttcgatggacaactgacggtaaacattgtgcgagttcgagcttggacacgaatgttttcgtttggagcgtggaaagaccattgaggtctatcaaaatacctgtatgattggtttctcttttcgcacttggtttgttgatcttctcctcagtcgactgaccggctggtacaattcaactcactggaaacacgcaacagaatgcacatgcaggcggagcgacaggtgtggaatgggttaacccatcgcgactcgctagtgccggatccgacgccaccgtcagattctgggacatcgtcttccattgagaaaaacactaggctccctctctgctcgaggatcaaccgatcctcgagcagaacccttctgtcttccactgtcgtattgttctttctctgtatgaatcttattctgttctttttttgatgagtagtcgaggcaagttaggagaggggtccgcattacatcatcgtcttgccttatccattgtctattaagttgggtttcgaaatacaaacaattcaggtcatcatagattttgcatctgttgagtgttcgattatcaaaataaataacaaaaagagggtgaataacagatatgacactgggtggaggatcggatgaaggaatgaatcgaaggggacatccaatcgagataataaggatcgataatccagagacagaataatgacaaagagggaaagacgacaaggataggggcatagatggggaaaagcgtcccaatagaagagaagatagagtttggaaactagaaactgtgtcccgaataaatatagaaaaaacgatgaaagagaagaagagcgaggcaaacagaaaagagtcgcagaaagtcaatgtggttcttccttcaaaagaagtagatcctcaatgaacctttaaaagaaacatgagcggtcctacaatgacaacggtaaatctagaagtttctgtctggatttattcctgtttaaatccctcatagatgcgcgggtcaatcaactgagcgataagggtttcaaaagaaccttgaagggagataaggagggtaaaatagttaagaaagaggaatgatttatcgtctcccacctttgtttttttgaactcctgttccccagaaccatcataagatccataatgccatcctttgatcctcttctccatcctctccgccctttttttcccgttcttctcatttaggtatcgtgtccttgccagacgagtttcgtcttggtaatttggcccgacaggcttcgcaagatttttgacgaatccgacgtcatcggcgtcagcgacgccgacactgaaaagctggatcacgcagagaaggtggaagagcgaggacgagaatggccggaaatacatcccttagatctcccagagtcgatttctagaaggtcgatatcgaatcgttaatcggttgatccatctactttcgtcccagtcggctcttatactttgatacctgataccaaaatacattacataacaagagacaaacagggcttcttgttttttttctctctttagacttggatattttattcaacttactccggttcagtcagtattaggaacacatcagacgaaaataatatcggacggagaggaaatacgacgtggctgttcgatcagttcacgtaaagagaaagaaaaagaaaaacacagataggaagagaaaggaggctgtgagcaacgcaagtgaaaacggtcggtcagggcgtcaattcagggcgcttcgttagtccgatgcttccccaacttgataagtcattcccagtataatatacatggtaatccctttttattcgtttagtcgactttgaccgagaagctctggaaaccagaaacatattcgccatccttgcctctcacgaaaacaccgaggcgcccttgttggatttatgatcccaatcccaaactttccacttagcattgaacctatcgtcccaagtcaagggtgagttctttttcaaaagctcgtaacctgctagatctcctttcgctcgtctctctctcttgatctggccttcgaggtactcttccagagagaacggagggtgtcgttgttcggcatcggtgggttctaataaaattcagagacaggtaagaaggtgtgaaaccccatggagagagcacagctttcattcagagagacgcaaagagacaaacctcgagttccctttcgcagctcccaaacggctttcaacttgggtggtaaaccttcgtagtacgtcttcattcgttcttcgacctgttttggcgtcttttcaaaattcccgggtactctccattcaccatcctccaaatcaaaatcaagatctcctccttgctccttcccgagttctactagctcattcgttggcccttggaaatctctactaggctcttgaaggatgaatgccatggctgcctcagcacccatcttgacgtccgctcgggtgttgaaaaacgagaggatcgaccgaggaatcgatgagaatccgagttcgggatgataaggaatcagaatcgtcggtgggagcggaggaagcatcgaaggcgcgggctgaagaggagggagttcagcagacgtcggcgtctgaaccgcgatcggcgaggtcgaccgaggtggaccaagaggagaaaacaatgacgaaggcggtttcgaagatgcttctggaacttcaggaagcgaggacgaagaaccctcctggtctttcaacgccggatcctcgtagatcgaccggtcaagcttatcaatccaactctcgtctggtcggtcttcgaaccaacccttcttgagaccatcaagatactctttaagagtgtgtcgaccgatgatcataacacccccgtcgagttcgcgctgaatgagttgctcgggcgagagctgggttggtgtgcggggttgaaacggcacagaggatgaagtagatcgaatagtacggtatttgttggcaagatgttcagacagggaggtatactcagggagagaaggaagcgtgtaatccactgcagcagccactaggtagggctaagagaaagatttaggaggagctatgagtcaacgagccaggatgaacaaagcacagaaacgaaggaagcaaccaactttgacatatcgtttccaccaagcggccgctttgccttcttcctcacccggccatctggacgcataaacagtgcaagtcctgactccaccaagatgaccatcttctaagggcttctcagctaggaatttgactttggcaagatactcttgtttgatggcctctgccttttgacggtcatcgtaccaaaagtacgtcgggatggagacgatggctgcagcgatgaaccaacctttgtgaggtagttttgacggaagagtcggcacgatataagctggaagtggttggtttgccggtggcttgggtaccaccgggggcgtcggagtaggtgtcgccatggctagtcgttcaatgcttgctgttggtgatggtctagatggtctgacgaggagaagttgagtggttatgaaaactgaaaaaactaagaattcataaatgtattcgaattttatataagtgaccttatactttgtgaggccccgtcaagtctctcttctacctctcatctgttgttccatcgccatcaccatcaccatcaccatcgacaccgacaccgatatcaccattagctctcaactagtcatgcttagaccaaacactctcgtcaagatgtatagaccagttcttttcgttccagtctctccccagcttttggcttcacaaaagagatttgctcacggattcaatgagcctaccggttaccttttcggtgaaaaggtctgttttctctggtttatcaatctgattcgttacactataatgtatcgtttgctctctgctgatgagattgtttcttcgtttgacagcctcttccaaaaggccaaaagagacagaaagagtgtaggtcttggattcatcatgtctggttcttcaatgaacgctctgccctactgaattgaccctccttttcgtgatctcttatacctctcctgttgatgattagtatgggaatacatcttttgtgagcttcatcctgtctattcctcttttcatcataaccacaactcctgagaccgctggcatttttttttttgaatcactcataattggaatgttttgcaatatgaacagtttggccgatgataggtggtgcggccgcgttctgtactctcaattactactttggaggacagtcagtcaaacattttcctacttctatctcatcgttcacttttgaatgagaagctcagactgaccatatatctaataccttgtatgtgtactcgtctttctctttttcttttttggtaccgatttcatttgacactcgtaggagacgagaatgggctatgaaagaggctgcgcgacgattgaaggaaagaggcgaataccccacctacgtatgtccgtttcgggttgtcttcccatttctgcatatcgccttttctatgtgtgctgatcgcgagttatcaaccatcctttcctccatccgcttccattagactcccacagtgccggctggagtgaactttaaccctcctcatccagacaaacaataaattgaacacgctcccattggatcctgccagttgatcctcttctgttctcatcttacagttgcctctttcttccatcatcaattttgccagtgttttgtgtctgttcttttattcttgtatgggctatgtccccttgtgttcttgccttatctcttgtgcaaaagttattttttccatgtcaatcccatcgtgatggtcggtaggttgattccctccgctctagttacatcttagttgacacaacatgtttcgaagattaagcatttagtgggtgagaacggctaactaactgacgcattagagaagaccgctatatgctcatcaagcgacacagtttggagtgctcgcttatccagcttactgttgtccgttaatcctgatttcctccccttgtcaagtccttatcgcgttgccaactctcgcgagctctactttcagcttcgcaacgttctagtagcttgcaatatctttttttcgtacgaccagatcgtgatacagaacatagacaggaacaggaacatggatatatcggtcccttacagcctccccgtccctctttctctttccatatatctcctgtcgttgcttctcaacatccatcctctcgttcggtatccttctgtgtcacacactcaccgcctttcatttgactgttagtgaatacccttatcgatcaactatcaagctcacaactgtgcccgctaccgaattttcccccatagatctgtctgcaaggccaatccgatagccggctcctgacttctctcgtctgaatatacaactacctatgacatctttgtttggaaaaagaaaggctgccctgtcggccaagaagtctggccagactgaccaagacccatatccacatagccaaccctccacacccacacctcatcctcgacctcgatcaatgctccttcccatgttgacccaacctccctcatcctcccccttcgcctcttcgacgcccacaggaacgttctccaatgccctgaagctcttttcaaggcgaaggtcgttatcggcgcgtacccctttggaagaatcgaaagcaagaccaagatcgtctctaagtaacgctcctcagctcgagctgaatttcaccgatttgatcaatggtcatcctcgagatggacataccgaagaatcaccggtagaagaagaagaagatccgggagagaaacaaaagcgggaggaaaggatccttgagaatatttggttcagagaagaagaagtcagagagttcttcgatatcgtagggaaggcaatgaaaggaaaaggtatgttctccaagtctacaagttcctttcggttcgatatactatttctgttgcagagttgactcaggcaccgttgttgttttgtttacatttttcccttgtcaggaatcgcgacccctgggttatttttaccacacagaccctctcagtctccttccatccaacatgcgctcttgatttattttgctcaaacgcataggccaagtctcttttctctcaggtcatcttcattgtcacttagtcagcctagtcctcaatatctcttcctcactgagctcaaatatgcgcttaatgtccatgatcttgcttccgtcatccggttctcgctccgccatctcgattcatccaagggaatgtcaagacgtgctttgtatgatacattcgcggtttctgagcgagaggctggatttccctctcagagctggtcgacatttgtgccagaaggagaagataaagaactgattcgttcagtcttggaggtcctgatgtccgcagcatcagtggtcgacacaagtggggtcagtatcgggaaactgtcgatgatcatagggttttgggtgtttcgaagtagaggttgggctgtcggagaaagagaggcaagaggtgtcgaggagttgtttaaagagtgggaaatttggggaagaagactggagcatctccttctggcttacatcaggtcagcctcctctcgcttttgtgaggtttctgattgtttgaagaattgctgatcattaatcttggtcttttggtcgttcatagagatcaagcttcccgaatgcaaattcaaacccgacttctgcctctgattcaatcctacccaaatagctcacgtctcgctcagtcccatttgactcagacctcctcgccaaaaccagcttcccatcgccagccggatgctgccccttctgtctctggtttattcttaactagtcaccgactcaagcgagtgttgcatcttcggatcagagctgcgccttgtcggaccgtgcccctccttgagaaggaagtccggacaagtcctgtccaattaatcaattgggcagtagaagctagggtagaaggctcttcatggtcgaatgcaaaggcaggcccgcagcggagggaagaagaagaggccatggggatctggattgagatgagacggcaggcgagggaagagaaggagatgagtttggaagggatctttaccggggagacgatccgtatcttaggaataacttcggacaaggtgcagatttccaaggacagtagtgatactctatccacgaaggagaccggacagaaaaaagtagaatgtgaaacacacgaactatacagacccttcggggctagtagatcctcgtttgcattacaggatagcgtgaaaagtcatcagaagaatgcttctcctttagtaactctcgatcacttgaagtctacgccctccataaaacgaccagagctgaaggcggagacatggacggatttctctctagctggatttggagactcacctggtgttcccttaaaaggagagatgcatcaaggtctatttcaagacgcaagtaccaatttaccgtgggaggagaccttaggagaggaagaggaaggctcgaagaggatcagtgcgcggagcttagacatggagaggatcatgagagacgagtcggttgagacagctaggacgaatcttctgaagttggatgacgagggatggaacggagcgatggaagtggctggagcgtccatgttggttagtatatggccgcctcttttccctaggatccaaactagagcctgggattgacctgaacttggaatttgttgatttttatcctcatccttagaacatggacgaagctttcgtagagttctctcaggacattcaacttgatccgggctcggtttctcaaacgacgtttccaactttcgcgctgtatgagctcaaggcttcctctttctccccagaatggcttatggtttccatctcttctcttcttccttcaatcggtacccgggctccgattcgatccgatcaagcagctcttactcctatgacttcggccataatgaatctatcagcgcccaagtccagaagacaagcaagcttcctcgaatcgctcactccaaatttctttggtcataagctctctgctcgatcgtctagtgaagagaaaccttccttactcccggctgaccttcctggtcgaaggtctggcattccatctccggagctctctgtgacagccatcgaggtttcctcagtccagccacctccttctaaaccatcgagaaagagcgtatcagacgattatgtcataactgatggattgatcgatcgaagaagtaaaaacatatcgtctgcttcgccatcccctttgctcgaaagggatcagccggtgcttaaagaacatgattcagtactcgtagatcaaaaaataacctcgacagggcctcttcgtcggcttagaagcttcctaggtgggaaaaataccttgaacgctatcgatgacaacgaggaagaggatgtcacaccaaccagaacaacgttcgcggctgtctcttcttcggcgcaggcttctttcccaagttcctggacagatgacactcaggagggtagaattgtcgatatcggtcggacgtcctctcctcatccagtcggactcaactcgaggaccggtttggtgatcttaggcccaactatatctgatctcccggtagatgctgaagaagatacagggaacgaaccatctgtggatatagggaacgactcggacctggcgataatcgccgagatactttctctcgggaaggatcagtcagtgaatactcaagaaagggacagggaaggaagtgtgcagtgggaaggagtcctaccaaaggttgagatcagcccgccttgcgctccatctgaagattctgcagttgatcccaaacaagaaatgagtaacagtgaggagataaacactccatcttttgtctcatttgtcactcctgctgaagatgaggacggggaaggtctagcaacggagaaactcccatcagaagattcccagggatctatccattcgtctgtttctgaacgatcaacccaaagatcagaactcggatcggtagcaacaacagtcgagtcttgtgctgtaaaatcgcctttgcaggctgtacatggaaacattcctcagatcgaagatcttggcagagaaatatttgttgatgatactgttcgtattctgaatctgttttggatggttggtctgacaaaagtattgactaacgtttgattgttcgtcatcattgggtttctcaggtgactgaggaaattgaaggcacgcttggagaagatacgtcggaggtcgagtataagcctacgctcaagcagttaacgttacttgctcgacctcactcaccgccgccgcctctgcctgcccgttcggctagtagggaacgacttgttcggccagtcaaaatgatagcgcctgagatggttcctttgccttctagcccttgatcgtacgatcaatcggtatacatcaaagttgtattttttttcttctctttatctttttaaagattcctcccttacgtgtctcttccttttgcttcaatttggttctcggtgactgttctgatgtctgcgcgtcaacttgttaaactttctttttttgatcaatccctattaaaaatccaatcttagcatatacgtcctttctagtctgttctactattctattatatcatatatgggagcaacatcaaccatcttttctctctctttgtagtgatatacatgctcattcatccaccttttcctccgacttcatgagatagaaaccccaaaattcacttatcatctccaaatccagtgccccattttccagctttaggtccccacctggcaactccccaaaaatgtttctctttcatccgaggagggtcatcttttgagatgtcagtacgaggttgtttgcgtgtccgaagaggcgtgtcgtatgatgcttcatgagcaaagtcgtctggatgaacttggtgagggaccggatttgggagggaagagcgcggaaggggggtgacaaggtccgacgaagaagaggatgacgaaaatgaagcccgaggtgaaggcgaaggcgatagtgaagcagggacggaatcgagcaaagaaacttttggtgcctgagaagagaaacgtgatggagagagagactcccatgtgcggagggagataggtataggcgtccaacgtctggcgggaaggagagggtttgtgagttccgttagtcttgagagtgctcgtttctgtgtgttttattttaagtcgataagaaagagttgtcagtgaaggggcgagagagaagtgtcagagaacagaggaatgaaggacaggctcatcgattaagagaataagcaggaaaaagagacgaacaaaggcaaaccgttcatcctcccctgtgaagattgctaaattcgcaaaagcccctcccttcagtcctgatttcaagcccttcgtttgctcttcatcgatcgcagttgatgaactcccttctcttgtaatcactggctcgctaatggtagactcaggctggtgattttgattgtaaagagagatattgggtcttgtgggctcctccatctccttctgcatctcgctcaacgcttcctgttcgagagaatctctaaggaaaagttcatcaggagtgatagaagatgcgtctgggaagaaaagaccgtgtaaggatgtcaaagaatgaatgtgaagtcttgatcttgattcgtactgttcgccaaggtttccaaaggagatagatggtggttaagctttggttgtacatctttgattgaaggatgtcaaacagatgaaactgacgagagcatcgagcaggttgatcaatcgacgtgcttcattcttcatcgatgtcttgataggtggaatgtctgagacaaagatcgtagagtatgttgaggcaatcgagatgtagtctgccggaccgagggcctacgcgcaaagataaatgcgcaaatcagcgaacattgtgatgaaagaaatgaaatgcgacgatcaaggattcgactaactgtttcacagatctcggagaaagtgaatcgagcaatgcctcccacagtgggacaatcctccagtgtcgttgagcctgatgagagatctggtgatacttgggcaggaacaagaatcggccgattgtacaccaacagtgtcgcaggtgtgactaaggaatgaagagtggtgtctatccggttagagaaaagaaaagtaatatctcggagaaaagcactgatcaaacgtaccctggcgcccctggacaagtcgttcccatttgtcttcccacgctttccttcctgcgtctccgatgttccaacttccacctctgttatcatttgcctgctgatctaatagctgtttagtctgttcaacctctctgtaatcctttcctccgtcgacctcaagaacgtcgcatctgctcttgagacaactgagaaagctttcgatccgccttctttggacacccatagtgtatatatcatctggaatccgattggatgtggcgagtatgacaccacctaggcgccagaagtgagtaatgattgaggtaaacagagaggcggtcgctgggtcgaggatctgaagttcgtcgaatctgttgggacacgatttacaagtcaattactgatatatgagcgaagagaagggattgttgtctgatagattcaatacaaacaggatgagccacccctcctcgacgatcaatctctttgctactctgaatgctaactcgtcatctcttctggctcgctccaccaagcttcctactttctcctcctgcccgtcctggaacttcccgccggcgaagacagtcctccagcctcccttcaaagctttctctgccacaatttttctagcctgttcggtggttccctcattcatggctttgccttcgagatgtaggagtcggtagacattcaacaggaacgcatgataatgccttcttgtctttttctctcctgggagtaagctgaggtgctcaaacgcgagatcaagaaggaacgtttttccacttccaggaggaccagtaagtagaactccggttggggtacttaacgcagcgagttcttcttcgatagataatattcgagtgaggtctagagattcttcaggttgcggttgcgcccggggactgaacggccaccaagattcatttgaaggaggatttttgagaggaggaagaggaggaaggtcatccagtagatatgctggaggtttatatgttgccagtctccggcatagcgatcgaagctgtcaagattgttagagagaaaaaatcagcacagaaacctagtatagggatgagatctataacatgacgttacctgtaacaagatccgaacttggtgatcatcccactggagttctcctctgtggactttatctcggtagatttcgataagatcggttgttttctttatctgtttcgaccgtgaattttctgaaagcttgatgttatcttttctacagaccgctgaagagttcgagggcaaggcatatgttcgtataccggctggtgagcgagattgcctggatagagtggtagaaagagaataagttcctgagtatgagagcactttatgtcttccactcagattacaacatccgattctggtgctaactagcatggtgatggttgtcgatgttgtattggtaggtacgttggttgctcgtagacgagggacaaggagacgatgagtggagcgagcgaagggaacgagatcgatcggaagggaaaaatgtaatctgataagaatgcaatttgcacagccagaatattggtgatcgtggttacctcaacagtaatagccgttacgttgtccatcttctagctctcccttcgttcccctggggcttcatctctcgaatggtggtcctcccagagtaagaacacctaggtgccaaaggaggatcttatccaagcccggctgaaacttacgctgaatggcgcattgtacagacatccgtggcttctcttgtgtatgctatagacggctgacatcagacgtcatgatttgggccacgacgcagagcacgtgtctcgaacgacatgagaatttgcactgcatataacagtaggatattaataggcaaagtatgctgatatcttaccgtgcaagctcatgtaacacctcgcgctggcgtctctttacccccgcctttcctcttgaatgacgctgctcactttggtgtcactcttccagccaacaatgtccggctcaacgcctgcgctggtcaagaggccatcttcattattctcatcaataggcagatcatctcgtccggatcagtcagaccatactcccttttatgcgctcaccgattggcacacagagagcaatcaacagggtcaccatctccaggccgaatttgattccagtgaggacgagcaggacgttgatatcacaaccgataaatcttcagaaggtgacttgaccgccctagagcaaacacttgatgagattgggataggatcttatcgtgagaacatcgtgttcactcatttctagtagagacatgtattctctaaagtgacactcgtctttcatttgtaaaagaatggaaacttctcgtgagccattcccatctttcctatcctaaccttctaccttggttcctgatctctctgatacgtacgtctatattcacaacagatactatgtggtatgggatggtaagttctggtgtttgaaatagagtggtcttatcatgaatcgcactaaccggcgtgttttgttccgatatgtaggctttgtgacgtacgtttgagctctggtgtcgttcagtaatcaaagaatataacgagttctaagcagactcttactgtgtgccctcattgtttctacaataaattgtctcgcggtgtaaacgctcgcgacagaacatgtatctccaagtaagtaaagcagattcacactgtatcagttgatggctgctctccagtgaagatatctgatttgtacatcattagtgtttaggtgcagcttccttgtttggtatactgcttgacattagcccactctcgtcggcatttgcttacccgtcctgactaaaataccatagccatcatccttcctcgtgttcaggatcactttgacgtgcctgcctctcagatcgggactctgacggcgtgtatgatggtcggcatgatgatcgtatgtccatcctctgcttcgcggctcttttgagcttcgtttctcagataatctcgttcggttactgtggttcatgatttctgtcagggtgctgtcgcctggggctcagcagctgatatctggggccgaacgattccgttcaacgcaacactagcgctcaccgggctctttggtcttctgagtagttatgctcgaggattcacagaactcaggatatccgtgctcctactgggctcagctgttggaggatctatgcccaccggtatggtcttttttcttaatcaaatctcgcttcctctgaatcgattggtactccgaaaagaaagaaaaaaccacacactcacctttcaatcttttctttcagacggcacaatctttttagaaaacatgccaagaaaatcacagtacctactcactggattgtctgtatttttctctctcggcgctgtgatctcctccttgataggtctctggatcctacctggctcgagttgtcccgaacatagtccgagttcctcatatgaatgttcagtcgagacagataaccttggttggagatatatgctccgcactctgggtgcaatcgtatgatcactttcttcggtttgcctaatcaacattcgttagcttttactgacttgattcgaaccatcatcttcttcttcttcttcttcttcttcttcttcttcttcctactgtctattcagacaataattatgtttcttctccgcctttttgctttcagactgtacgagtctcctcgatacttactcgccacacatcggaaaccatcatgcgttcaagctctctgtcacatcatttcggtgaacggtcgtccggatctcatcatccatctagaaacctccgaggggcgctcaagcaatgatggtcagacaggattgaataggacagcctcgagagatcaggaggaggttgggagaagagaagcaaactacgtacttcacaaacctgccggggaccctgaaggacaagaagccggacggacctcgatcgaacacccagaaagagggcaattacgcccgtctgataggctaaacagaccagggatgatcgttcgcttaggaagtcgatctcctctaaggcagccgagtgaaccaccgaaaaatggcagaggtagtggtgtggattggagagtaggttggagaaagacggtgaagaagttgaaagagatctggaagccagagtggaggttgacgactggattgatgtgtgtcatctggggagcaatgtctctcggtgtgtagcttcttcacatggttctctcagttaacaagtcttctctttctcaactgactctaatcatggtacccatcgatgatcgggcgaccctctcagcgtacactatgttcaacgcattcttaccaatccttctagaagatagagtaccagaagactcggcgaaaggtggaaggattgaagcgttgcaggaactggtgctatacaccctagctggctgtccaggcgctttggtttgtcgctttccgtttcataccctgaccattttatcctcttgcgagaggagacttattgtctgagatctcccctttttttccagattggggcatacctcgtcgaaacgacgtttggcagacgaaagtccttagcgggcctgaccgcgcttacatctttggccaccacgctcttctcgctcgtcagttctaaaagtggagttgtctggagctcatgcgctatttcgatctctggtacagcgatgtatgctgttctttgtgagtttcttcttcttcttcttctccttcttctttttcttcttcatctcatgaggggtggataatctataatcgaggtctaatcgaggcttggttgaatggcttgcggaatagatggtatgactccagagatattcgaaacggacatcagaggaactgcttgtggaacgagtgctgctgtatctagattgtgagatctcatatttcggttctgtttctatctagaccatcatctgttcgctcacacgctgttgatgatggacgatcatacagagcgggcatcgtcgcaccgctccttacgggaaagcttctttcgataaaaaagtcgtctccaatgtgggtctcctcaggagtgtttgtcgtagcactcggatgtacacttctactcccgtttgagcgagcagaggataatccgaggggttcaaatggtggaagagttgagtacgatgctttggctttgcaggccgacggggaagtgtagaccaataaggactttgatggcctttttctatccttctccttccttactatgggatgattatgtatgactatgagtaagaaaacacgtgatgttccctatatagacatgaccttgactgtcaggaaccagagttaggtaacatatacacgacagcgtgaccatgctcacattccattattcatcatgccttccatttcgttatgctccttctcctcaccttatgcgcttgataatccttctcagctacgttcccttgattagtgataggattagtgatatggattagtgatctgttgcttgataatctctagttgataatcctgtagtttagtaatcgagtggcaaccaggtggccacttcatcgtagctagaacacataaaaggatcgcgtgcgcgctccttcaagatgtggttcttcaagttaggatccttgttaaataacctagtagctaccagtgctattcaatcacgattcatcctctcttccctgagcctggaagcctaaacctccacgcctcgagcatccctagtcaactacagtcaccttgcgtaaccctgtaacccggccccttacattgaccacttatcctgcatgatctagcggacgagcggatctctcgacggagttccgtcgaagtgtaattctctcgatattttatttcggagacatccggcgaaaagttgacaaattaaaatcatctatttagacaaaacagaaaacgaacgtttgggtaacattccaagaaaccatctacagatttgtcgactatggacaggatagatcttcaatcagatagtcatgcccaggaggatctcttccgaacagaaaagacagcgacagccgaagaaattcaggagtcgaagaccaagagagccagggaacgggcgttggttaggaaaatcgatcttcttcgtgagacgaaccttcttttgctcacacctgtgttcttgacctcgagtttacctcgatcgagcctcaattatgatgaccgagttacttggaagcaccagacagtgtattgaatcgtctgaactgactctgacgtgtttgtggatttcggtctggttgaaaagtgatgcctattttgacgatcagttatgggcttcaatacgtgagtccagggttactttttctttttcaaaataaattcccgttcgtttctctgcgctttctaattattctacaccttctcctccatgggaatggatgactgtataatggacggaataagtatgacaaagctgttttaggctctgctggtgttttcggaatcatcaaagatctcgttcgttcattcttccctcagaatttcattaagttacaactcttttcttgagtgtcctcgttcaatattccccttctttctttccccccccccccgaaccttgcagggcctttcaac

SEQ ID NO: 533 - DNA, 37642 bp, Xanthophyllomyces dendrorhous
gcctttcaacgacatcggctacaggtgtcgtctcgacaaaaaggttttcaacggcgacagctgctttctactatgggtatatcgctgctgtatgtccaagctttctgtaaacaaatctgtttcttgtcacggtcttgacccgtttgattcgatttaaaaccatcggattttcaaggtcctgccatttgcgctcgtgcttcagagagtcaatctgtcccgaacactctctctatgcgtgtatggtttcttttatttcttcgagtcagttttgaccgaaagaacgagtgtagctcactagagtcgattgttcgacacgcaggttcatttggggagtcatatgtattctgaccgtcgtcgtctcagattataaaggtcggacttctttctctatctatctacaaaccggtcaaccgagaaaagagaccaaactaactgaaggagatcattgcttttccgggttatgtccgtatgatccaggcctggttgttcaggttagttcgcaatgcatcatcactctaaagaatggcgcgttacttactgtcgaagacttcggattatattatgctcaccttctttctatctaaatttagcgtttcttccttggtctagttgaggtatgtttttgatcttcatctgaaaagttcccggactattctcaattcatacaatccaaatttctgatggggtcaataggctgcggtgtcaccgggtttcttggcgatcaccacgatgtggtacaagaaggaagaacgtatgtcgctttcagatgtttctctcacggattgtgattcggctgacatcgttggtcgggatcacttctattttttgtcatgataacgatggtgatgggggtggtgtagaggccataagattggggatttggtattcggcaaccggcatcttctcgatggtgattatctagtcgttcatatatcgtcaaattgaatttcacctgatagcttgtgtgttcattacagttgtctggcgcgctgaactatggactaggtgatcacttctcactacaactacttgacatgaaacctaccaactgacaacttccttttcgttttgttctcaatcataggatctgccaagggatctcttcccccttggaagaacctatacctatttgcaggtgccatcacactcgcctggtcgtttgtcatcctcgcgtttgttccgtcgtcaccgacccagcttggaaaattcggttcctggttctttcaggatgaatctgaacgtgcgcttctgagggaacgaatgagaggaagagaaaagggattgagaggagaacagtttagttggagtcaggcgaaggaggcggctttggatccaaaagtttggagtttcttcctcatggggtgagttccttttctcttgttatccgtgtctttgccttccttgtgagatgaactaacgcttgtgtatggtgttgctccgcctgttaacattcgaaagagctgccatatatgtaagctgatacaacattgtatataatccctcgaaacccaaagtcaatgatagagtacttacttgtttcgatcgaatctactctgtatcaggtatgcaagtaggtcgttcggttgattctgatattttttactcttgtgcctgctgttcgtatactcacactttcctcccccgacgaacacaactcgtctcgcccggtccccctagtatgtacaacctgttaccttcccccattatttgttttcagaagtcatgactgacgtactcttctgacgattatggtttttttttttttcaaaatcaggtggtggagtcaccgcatttggcgcaaggattgtttcctcattcggatatacttctctacagacgatcgccatctccatcccaggtggagcattcaccatggtatcgatttatatcgtcgggtaaggtttcacaaactcttttcagcacatgttcctacgagttgaatctcataacttgtcgtgattttgtggatcttgggtgagtgtgttaggtggatagccgatagatacaagaatatgagatgttacctcgtggcggtcagttgcttgccagttatcgtaggctcgatcatcatttggaagggatcctggtttgtcttcttcttttttttgtcgctcaaccctgaagccgataccacatgtactccactaaccttcctgtgcactttgggtgtcccaacacatacaaggatccatcgagggttgcctctatttggatattacctacttccatgtttcggcgcaccttatgtcatcgttctcgctctctctgccgccaacattcaaggctcgacgaagagagctatctccggtggatctatctttataggatataacgttggaaagtttgtctccttttttttctctttctctctctctttctctgatgcatatatgaatagaaattgctgaactgataggaaccttctcatgtgaaatttgatgtaactaaacagcattatcggtccatatatcgtgttcacccaagagaaaccaatcaaataccgatcgacctggatctcattgattgtctgcatgtcatttactatcgttctttctttggttctccgagtttggatgagccgggagaacgctcgacgggacaagacttacggtgttgtcgttgtcgatggctctggcgagaagagtagcggtggacgtgagagtcagggagcctggaagaagaaagaacaaaacggacttcagggaagggaagatcaggaagaagatccggaggagttggttgatatgactgatggtcaggataaggattttaggtattctctttgatcccaaaatctgccctagtctttctcttctatttatacttgccaggttccatcgagccgtcaagttttgtttattctatcataaactattatcttttagtctatgcttcttactttctatgaaacatctgtttctctctcttgatgtcgtccccgtattctttttccgctttgaagagatgaatatgattgataacattttggggatgactatagaagtacaacacaatttcttctttccgtttgggttttagtgtatgctccacacagggagacaaagatgttacagatagaattacatgtacaagaaaacgagagaaaaaaccagaaaataagaaactaaatgtgtacaacagcgtagagaaaagaaacaagtgattaaaaagttaagaaaacacaaaggacttccttgagagaactcaaactcagatcatgaaacacagttctgctctcgtgtactgttcactctcctctttctcgctcagaccttctttggatgctgacctatccctggacctttccttctcctccagcatattgatccaatcggctcttgagctttcccctggcataaatatcctactcgcccttcttccttgtatgctcttctcgacttctgatctcccgaccgatccatcccgagtttttcgtctctggttcgtagcagcagcagcagcacggttgtcaaatccgaaagcggaggtggagccataaccggtagaaccgatgggtgaggtaggggagtatgtattccagcatggatgagagctcatgaggactgatggatgaggaagaagtggaatagctgatggaccagtcgacatcctttttgctccgttcgatcgaggatgaaacggatgggcctgggtctgaggtagtggacgacggtggtgaggctcactggaggatgatcggatcggttcagaccgtttggtgtttggaccgatctggctaggaggggccttcggtcggttgggatcggtcgacgcaagcaccgaagtgggattaggccgatgagtgatcgtttgtgtcggtgcgggtatcgctggttggaaccctacgacagttgaattactttgagaggaaagttgagaagaattagtgccagtgacagagagagcgccagaggcagtggatggaccggctactttccttccaaatgacgaccgaccaaagaaagaagggaacgatccgtcgaacgggctggttggactggtcgggctgataggttcattgggagaagtactagaatgagagccgaaaaagttgtgagtcgagatccgtttgcgaagtgttttcttgttcgtcgtggtcgtggttgttgatctttctatgggagacttaacctgggcaaactctacgagtcggctgagaatctggaccggtgattgaggagtcgatggcatgggatcatcctctgttgaagaagtcagggagagttcgtccggtggatcgattggagagtccgagcagagtccttcagaggatgacatcaagtcgaggggtagtgaatctgtgttggggtctgacaacgcagcattctcctctggttcaagtatcggagagataggcaagggaatcaagcagggctggacggcaatgaaatcactgatctcgagacccacggggtcaatgagtgtgtccgatgaaggactggacgggagaggaattagccgaggatcgatcccaatcacgcgatcaagttcttctgtagaaattgacgggagaaatgagactagtggttccggcgacggagaggatggtaatggagtcgagcacgctagatcgaacgacgagatgtcttccactggcgacgacagatcaaccaagatggtctggtttgaatcgaatattaggtccatattggagattggttgtggtgtttcgatcgatggcatagtcaacgccttttggccagactgctctggtgcactgatcggactagccacggagacctttgaatcgttgttggctgctgccggtcggacgacaggtgatctagaaggatctggtgtggaggaggtatttggagaggaaagcttggtggtcatcagtcggggtaaacctttgactttggctatcctgcctgaggagaaagtcactctcagaaatgaactttttttgctgccctcgttggacatggtgtcgagaccgaagtcagagagagaaggagacaaagacggaaaagaggaaagaaagagaaagagaaagaagcggaggtgtggaaaagaagaaaccggaaagagaacgaagaagaaatcggaaaagaaaaacagtcgtcagttttgaaatgaaagaacaagcggatgtgagtgcgttcgttctttgctgttagttggtcgagacagtctaggtcggtcagtgtttagatgggtctctcggatggacttgttccccctaccggaagtaggcgcagagggaaacaagggcatgatcaggcacagaaagaggcacacaagagagtattagccttttggctttttggcctagacccatatcggggtcggctcagggaccgattggaacccgcagcagaaagccgccgggcactctgacagagtgcccacccggtgaagaacatcggtccaaggaaaagtccagactctgcgtcatccgcagttgatcggcaatataattgatctcacgtgaacaacggtttcgtcttacatggccgccccacaaccctaacaaagcttctcaagtgtgagctttctctcccctcgtctccttcgccatttgagattgagcctggttcgacaagtatcgttctggaccgagatgttcaaccaaagaagtcaccgttcataaatccagtcaatcagttccgtgacaagagccaccgtcaggcaagagagtcacctgaaagaacagacagatcaataaagaacttaccgtagatctcggcgtaatactctttatcgctcgtcgagtcaataatgctcttcctgtttacacaagagctcacccagctctcgaacttttcgcccacctcagactgcttgaatcctcggttttcctccaggatatacagcctgggcagaagcaagatacggtctgatcagctcgctcttttccatcaagcaaacatacccacacctacctggcaaagaagggagcgaccgcaatgtcgacaaagccaaaatcgtcgccggagtaaaatggaccttggacccggccggttagttccttcaaagcatccaccagatcggcacggagagaagcctcctgagaggaatcttgattctgtaatagcttgaaccatgcagggttcactttcttcgagaagtagtcgatctattttttttcattcgtataagtctacctgatcgtctcattcagaacaaaaaatcaaaatcagggactcacatcgatacgcgcgagagccttcttcttgggatccgaaggaagcaatggtttcgtctctggaaatgcgtcgtcaaggtactccaacaggatacttgactcgtacacttttttaaccctctcaatgagctcagaatgctttaggtgctttatcaactggcacactcatcacttacgagcatctccgtgatgttggatcgcagggaccaatcctttggggtttatcgccaaaaaatcttttctttaaaatgcatatatgtgttcccatatcgttcatcagttcttttatattgtaccgtcgctcgaccagaatctagaaagagagtaagagacgaacgacttatggtatgggttgacttctcggtattcgtattctatccccttctcttctaatgctacccacactctctactcagcgtttgtaaagatcaagctagttcagttcatctgtattcttcccttgtttcatctccacatcacgccacttccaggttcttttcatctcaatttagccaacacgaggtttggccttccgaagaagaaagagaaaagactaacctgattgaaaggacagaaccagccggaatggaaaatcaaatcttgaggggtcttatgagctgcgacaagctctgctgcttttccagtagccactggatgtatatctgtcgattgtgagttgtgcggattggatgtgtgtgaatatatatatatatgcgcatgagtgagtgagtgagtggacatatatgtcttaactgtcagtcgccataatcctggatgctgtcgtggacgaccaatgaatgcgatctgatcaggtagactcacgggcatcgggaagaggcatctcgactttctttgatatctttaatgtcttctgttctttcacaagaggggatgaagaggtgatagattgggagatgagagcaacgaatctatagacgagaagatgccagtcgttatcatttatatattctatgtatacgattcatccttagtaatctaagtataatagacatgcgattacgatcgatgacgcaagatcttctgatctcatcttctgtcttcctttgcacttgataatacggcttctgacaaccgggcgcatggcgaagagatagatgacgagaggggaatgaacaagaaccatccatcgcaggagatatccgcttgtttaagaaaaaagaaaagaaaaaaattgaccggagaaaaaacgatcaagatcggaaacgaaaccagaggcaaggtcttgttgaggaagagagagagaaagaatcgggtggaataaactaatagtgggatgatctcgaggtatttaaagagttgatcaagaacggatagagaagggagacaccaaaaagcaaaagcgtcgaccaaaaagacggtagatagaagatagggcgtaaggaaagagcacaaagaaaggccgcgcgaaagaaagataactactgtccgaagttgaatccaccctggggagcagagagatccgactggaaagcgaacgagccagtggcatccacctgaggagcatccactcctgtctctcctgcctcgtcctcttccgggaagaacttgtccatgatgtagaacgactttttgtaaatctcgaggttctcgtgatgctgcaaattgtgaatcgcatgcattcctccggcctcctcgacgaagagcgcgtattggtttactccgccaggtccagcagcttccttgtccatctctccaaccttaagaatgttatcaagaccgtccaaactaagggttccagtcaagagaatttctggtcagccaacgtaaactccccctcaagcgttgtacgcatcacacttacgcaacctggatgatcttgttgtccatcgtcttcaataaatcgcacagcggcttgatgcatccctgggaaacaaggtatctgatctgggacggctcctgaagtccgccagaagttgcgttcgatagagcccagcaagcttcttttttagtcttgaaatcagccgtctggagaatgttaatgagaggagggatgatattggcgtcgatgatggcttggatttgatgagtgctgtttttgcaatagtatgacacatattgatcaggatataaggttaccacctctacgcttcacctcaaaggataaatagaccacgaaacaaaccttccggcggtgacgttagagatagtccagcaagcctccttcttgattccctccttggatgagctgagaagggcgagcaaggcagagagtgcaccagacgcaatcaccacctgagtctgaaggtcatctccggtcacgatgtttccaaccgatcgaagagctggagtctggacggatgtggagggatgcctaagagaaaagattatttcaatgattagagatatgagctcgagcatcgaatattgtttgacaagcaggtgcaagacgagagaaacatacatgagaaggtccacaagtcgtcggcaaacaccactctcgatcacagcctggatcttgtcgttggtaccatcggagaggtactacagaaaaacaacaaacaacaaaaaaaaggaaagttttagcatgtgtgatatatgttgcgatggcgggggtagcaaggaggcctcacgctaatagcccagcaggcgtcgatcagaacctcgtcatccaacgagtagatcaacttcgtcaagacagtcaaggcaggtgaaatctgtgataaaaaaaaatacaacgcatataccgatcaaaatgaaattctcaagatcgtcttcacttaggatgatactcaaagctactcaaaactactcaccaattcccactttggctgggggttcttacccctgcagaagttactcaacgtccaagttgcgtttcggagcatgctcaacttatgattctctcccaacaaggccaaaagaggaggaagagcaccctgctcgagaacataatctctgcactttggcgaatcaccagcgatgtttcccaaagcccaaactgcctgctccctgacatccaacacgggcgaggaaagaagctggatgaaaagcggcacggcattcgactggaggacgatctgagtgtgagcggaggtaccggaggcaatgttggtaagggcccaggcggcttcgaactaaggagacaaaagatgaaagagaactgtggcgtcaataacaagatgctctctcggcatgcgtcaggctctacaagaagacagacctgaatcattgagtgggcactagaaaggaactcgacgaatcgagggacgacaccgcattcaatcactcgctcgataggagggttcttctccttggagagaagcctgagaggagaggagcaagtctatcaatatttcacgtcaccgcacaagccaggataggaataagaaggctaatcatactttctgaacttcgtagtggcatctagctgggcatcgacgttgtcagagaacactccctggatcatctggggtaggtcactcagctaataagagtcaaagtttggaagattacatagaatgagcagatgacaaaatgtgtggatggaaaacatcccggatgcacgacctcagatcggtgtttttgttcacgaaaaaacaattcggaccatggacgaaagttgatataatgtgagacaatcaacttacagcagcctctccactggttgaaggagactcatcgtccgagtcgaccgaggtagaggtaaagtttcgtcgcttggccacagagtcctctcgctagttgaggcatcgtcgtgtcataatcagcacgacacaaataagagaaaaacaagaggggcagacgacaggtagagaccaaagtgagacaacaaagtcagcatatagatacgatttaacagcaagataaccaaagagcatccttcacgtctccagctccaaggtagctcaatgaacactctcgttctagaaaaagaaagaagagagagggaaagagatcatgtcaagtaggaacaaaccttttgctttcgaatctccacctgctgctcctctcgacgctttcgcaactcggccggggtgaagttgctcttggacttgtaggctgcccttctgttttcctggtttctagactcagacattgttcaaatagcaagagagagaattgaaagaatcggttgtagagaacaaaaagaaaagaaaaaaagatgaaggaggtagttcaaagatggtgtgtgaaagttgatttttttctctctttacacgtttgttacggtggttacgcgtagaggaaaagagctccgagaaaccatctacctacccaactctccaatgtacatctcgatttcgatatagtcagacgaagaatattgttctacaaatgcttgcgaatctatcgttgttgcgttcttgatagtagcaataaacagagcagaggggtgatgatagtcatattgcttgctgcatttgtacttctctcttgaatccagtcccaactcgaacctcgacatatatgatgttgaaacatgacatcctctttttggtttcttctatacgtctcgtctaaaatcctccagtcccaggatcttctttcccttagcaagcccagagaccatctcgaggggatttgtgtatcctcgccatcctcttttgcgtgctgccggctcggcgtatttctgctcattcgcctttttcaacaccttgtctccttcaacgaactccaccggacgaactcggtcctgaaagtgaaccccaggagtgattcctctgggaagaattttggcaccttctggcaggctgtcgaggtgagagtgtagaacctcgcggaccttgtctcgaattcggcacgtctcccgggatagatatgtcgggttggtgtttaactgaaacgcggatcgtacacagatattcaaaacattattttggtgagtcaaatgaacactggagattgaagctgatcgctggagaatgagagcatacaaggtaattatcgaatcctccccaatctgcaatctttcttgaagccttggcagtcgtaggcattcgaaatttggcatcaagggtctcagagtagagaatcttatcctggacattgggcctgaagaatcggagtgaacgatgaatgaaattcttgtcttttcggttcacgttgtttcctgatagttcgttaaaccgtggaaaacgggaagacgagtgaccgaaaagatgaaggatatatacgcagagaatagatgggcaaacgcaataagaatgagaaagaaaaaggaacatcgagtgattatcagcgacagttcgagaaactagattccttcctttcaacaaagacccaagatacaaacgatcgaggacgaacccttgatcatcatcgttccatgatacactcctcgaagactcttcccggtgatcttaccaccctttgcgtttcggtaattcacaggattaaggatatcgagaatcctagattcaggagtctgcatccgatacctcaccttcgggacagacaagatcaaagaaggtcgcatggctgattaaaagtgtttaatttggtggtcgttttgatgatactggaaaaggatggagagaaagacgaggagggcaaatgaaaggttggccttaaccaggaaagtctcgattaaggaaatattcaagtataataaatgaattcgtcgctaacccctctctcgcctcgttcgtcctcgcgtcgtcggccaaaagttggatctatcaacgacccaattcaacacagagtcaaaacttattcccttgccccttttcacctttatcctttatcatgtccgataatgaaggaaggacctcatcagagggagaaggtgaagatatcgacaacgctagaaaaaaacggtctctcaatccagaggacgattcgagtgaagaagaggaagatgacccggacgaggttcgttttgccttttcttctctatcttccttatattggttgtatacgagtgatttccatacggcacagaagaggtgtggtggaagataatgaagagctgaaggacgacttgactgacgcgtcgatgatgactctgctatctttgattaaaggtccgccgagtccaagctggcttcattgtagatgaagacgaagacgaagacgaggcttcaggctctggcgatggttcagcatccagtggtgaacgaagaaagaagaagcgaaagagcaaaaagaagagaagaagaaaaggtctgtcctcattgctctatctggtcttcctatctatgaagctttcttactcatccgagaatcacatctctgcttgtcttctcccagaacgctctcgttccgccgacagcgcggacaacctatcggatgatgatcttgacttgctagcagaaaacactggatcggcgttccctcgtccgtctaaatcttcgaaatcaaagccgaagaaactacttcgtcggagacagtcgccagctgcttccgaagcgtccaactcaggatctgcgtctgaggatatgcccaacacagacgatctcgctcgcatcttcgaggacatgccaaggaaacgacgagaggccgcggcggccgaggaagagatggatgtagatgaagatgacgatggcttaggagactttattgaggaagatgaatttgatgaagatggtggagaggccgccgagagggcgagggaaagaaagaaggctaagaagcaagcaatgaagaagggcaaagccgggaagaggggcggagagggtggaatcagtaaagcgtaagtcttccttcgaaaagtatcagccaaagataatatgcatcaacatttacgtgcttacatactttctcgttgtgattcaagtgcttgggacgacatctatgacattttcggaaacggagacgaatatgattgggcgttggagggagaggacgagatgttggctggaaacgttacagaccttaaaatagaagacgtacgctgtatcctatcatctcatcgttgaacgtctgactgatcgtctatccttctgcactacgaacaggttttcgagccctcagaaatccaagctcgacacctcacagagtccgataacttgattcgactacgagacatcccggaacgacaccaactcatgaactcgactctttcctcttcgccaacatacattcttggccagttccccaaatttcctgatatcaaacttgctgctaaatggatttcttctcgaatttcagcccgaaccaaaaacactttcctaagcattcctattcaagctgatgagctcgatagctcgaggcccaacatgcatctcaaattcctcactgccgtcgagaaggctctcggtttcatgttcctcgagcattttgaggtcccattcgtttgggaacaccgtcgagactatctcgtacactacgcaaccgactctcaaggtcacatcatcccaaagggtatgatcgagctcatcactcgacctgaattgtggaaaatctttgagcttggactcaagtaccgaaacctgatgaagagaaagcagggcttactgtccacatgggagaagctcaagcagcgactgaaagatcagaccaaacagcacaccgaggaggctaccgccgctcctatcagtattgatggagaggccgaaggagaagaagaaaagaagccgatccgagaggagaaagtcgattggagactgacgtactttgaagagttcgtaatcagcccaatgggcacggcggaagaatcggtggagggtgtagttgacggagcagactggttaggaatccggttcatgaaagaattcaaagagatgaaggaggacgaggatctcgatgaagaaaccaggttgaaggagggtcgatacaagcggcccagcgcacagggacctaaagcctacctaaacacctaccgagacgctagattatctaactttgtcaaggttcgtcttccttttcgatctcgttagtatacagagctgaatcgtatgctaacctatcgaattacttttcttcactttcaggccgcaggtctcccgattgaggaggctgtctctaagaacttattcatgaatgaacaagaagctatccatgccgacatcgaacttttccctgaggactatgctgagcaattcatcgatggcaagatgttgactgacgtaacgatggttcttcgaggtgcgtttcttccatttgacaccttgcctctcaatttgataatgcttgattgtatctgaatttgtttcacttcgcgtctcttctatctctagctgccagagggattctggttcaggactgcttcaaaaatccccatcttcgaagaatcgtccgcgattacttccgagagcagggtcttgtctctgtttaccctactgaggctggtctcacaaagatagatgacttccatccctacaatgtgagacaagaccttctatatatcgattgaacctcaacttacatcattctacgtctgtctgtatcaacagtccttcaagtacctcaaagaaaaatcaatcaccgagctcgcgcaatccgcccgattccttcatattcttgaggccgaacggaataaccttgtcaaggtatcctttacgctatccgagcaaacccaggtttacttagaagagtcattattccaagcctggaaatcaaatgagacctccgacagctcgtcctcagcttggaacgcattccgacggacagtcatcaaagaggcttgggagaaagagttgattcctatgggagccaagtgggcaagggagtggttgagggatgaggtcgagaactttgttgcaggttcttgtgcttcgcttttggagaaggtacttcctatttctctgctgcgttttgtactttgttgtcctgactgggaatttttctatctctgtctttcattaggccgccaatcagtctccgttccgaccgaaagagtatgagaagggagcgtccccctcggttcttgctgtctcacacggaaagggtgatcgaaacgacgcagtaatgtgtgtatttatcgacgagcagggtcgagtccgagaatctacaaagatcgaaactttggacgagaaaaagccatgggagcttgagaagatggcacgacaaggcattgcatccaagactctcccaacggacgaatttaaagcgctcatcactcgacgacagcccagtcttatcgtcgtgggcggtttccgagtgggtactcatcgattgatggagagggttaagactttggtcttggagttggctcaggctaaggtcgataaggagaacgaggcctctcgacctggaggtagtattccgtggggagaggctgccaagacggagctcgagcttgagatggaactgaaagatgccagtatccctgtaacattcgtgcctgatgatgtcgctcggttgtatcaacactctgatcgagcccagcgcgagtttggtctttacccgcctacgtctcgatattgtgtgggactcggtcggtatgctcaatcacctattcacgagtactgtgcccttggatccgatatcgtcgccatcacattcgacgattactcccagaagcttgtaagttttttctacaaaccttaccgacttgctcggttagtccaagttaactaaccgcggcgaattatgggcttgaaatcaattaggttcctcaagagaagcttcttctagctttcgagcgggttctcgtgaatatcgtgaacgacaacggtgtggtaatcaatgatgtcattggggactcgtaccagcatcaaattcttaattacgtctccggctttggacctcgaaaggctcagcagcttattcgagacgtggttcgaattgtgagcacttttcccttctttcgcttaaatcttgctaacaatagtctgatcaactcatcctatttcaacagggtggattcctcacgaaccgtctagaactctttaacaagcaccttcttaccccagtcatgttcgataacgctgccggctttctcgaaattcctcacgagatggacgaacttgagctttccccggaaaaccccacgactcagccagatcctctcgacagcacccgaatacatccagatgactacgagttcgctcgaaagatggcggagaacgcattggagctcgatgatgaggatgtggcagatgaccacccttcgaaatccgtagtcaagctcatgctagacgattctccagaagagaagttgaatgaactcaacttggatgactttgcagataacttgcgggatatccgtggcgtcgaaaaacgttttgccctcaacgttatcaaggacgagatggcttctccaggaagggatcgaagggcggatttccaggtgcctactccttggcagattgtcactatgttgactggtgaatcggagacgacgttggtacctggattccttgtttccggacgagttactcgggttcaccgaggcgaggtgaacatccgacttgattcaggaatcgaggccattgtggacaagacttatgtgtcagacgagcctgtgaactcgtgtgatgaggtcgtcaaggccgacagctatcctcgagcggtcatcatcgctgtttacccggaaaagctgttgatcgagctttctctacgaaacaccgaactggcttatggagacgcagctcttaggaaagtcactcccgatgagcctttcgatcgagaacgggccgaagctgatgctgaggctgctcaaagaaaaaagcgaacggatgttgatcgattgaagcggcagattgaccacccaaactttttcaatatgaacgttgccgaagctgagcaggagctagccagccagcatcgtggggacgtcatcatccgtccgtcctcgaagggtgttgatcatctaaacgtaacatggaaggttgacgatggtctctaccagcatatcggtaagtctccgaatcgttcttgccttcctgtcatcccacacttacagtattctgatgtgtcttttgatgccctctcgatcagacgttttggaggttgataagccgaacccccaaagtttgggacgaatcttgcgagtgggtggacagtattcgtatcacgatttggacgaattaattgtgtcacacgtcaaggcggttgtccgaaagatggaagagttgatgaaccacgaaaaattcaagggaaagaaccaggaagagctcggtaagtattcgagttacgcgtgtgttttccttgtcatctatctgcgaggccttacactgattcgtctatctattcctttttttgatctattcttctaatctagattcatacttgaaaacgttctgtctagctcaacccggaaaagcggtctatgctttcggtcttgatcgtgatcatcctggatacttcaagcttgggtacctcgacaagtctggaggaacgatacactattggggtatcaaagtgaatcctgggtcttacgtgattggaaatgccgaagtaggtggaatgcttgagctttgcaactcgttcaaaacacagttccagaagcagcaacagcagaacaagttgatatctggcggtggcggcggtcgaacgcctggtatgggagctcgaacgcccgccgttggaagtcgaacacctggtgccatgcgaacgggcatgactccgatgcattctggagctgctggctcccgaagtgggatgactccaaacccttacgctcaagcttatacccaagcccaggcggccatgacccaagggatggtgcctggtggctatccagggtactcacaacctcaaccttacgcatatccgaatgccgccggaggataccctgtcggtggcaattacgctgggtactctgttccacagtcgggcgcgtacggagctcctcagagtgcctataatggatatcctgtccagggataccaagcgggttatgaagattccagtggttggggatctcaagcggctgctgctgtgtccggtggattcccaacggctatggcgacaaccaccgtgccttcatcgacaggcggaccgggtatgaacccggcgagaatggcgatgatctcgtcgtcgtcgtcgtcggcggcgctgaactcggatacgatcaaacctggtgctgagggaaataactatgcagcgggtgggtcgaacactgccggcgatagtaaggatgccggctggggtagtcgaggacgtggctaagtttgaaaggatttccacctttcttttctctctaacacctttcttgtgtgctttgcccttctggtttaccttctttcaacaccaaaacgacacaggtagacacgcgtgtcagaaggctttctacatgtaccactattcacataaaatgactattcttcatctgggtgtctgcttatgagattgcagttgaaaggaagaaaggaaaggcagcacaacccgctgcggcgctgtagacggaagagaattttcaaaagggaatacagaaagcaagtctggccaagtgtgaagaacgataaaaagaaaagaacctgtagccgacgactctgatcaaacaagagagagtatgctcttgaatgcaaatacattgtatggtgggtaagagagttgtgtgtctgaacatatacagatgatgcgatagacgttgtgaaacaacagggaaacactacaaacttatctaatgacgtcctgaaagcgactacgcggttttgtagtctaaatgcttttcgcggtcaacaacaccagttaccgaagaaacacgagttaaactcggtcaactccaaaccatcatcgtccatccatctgcgttgtccattcgttctcagatctgactatcgctcttggtctataaggcataaggtgtatccttccggtcgtaacgtgtctttgagctaactatctcctctttcttcgagagtggtacgtccacgtcaacactcgtttctcccccttttttcatctcatctaccctcaaggtctgaataagaaaaaaactcccaaatacacaacagagtcttcttgcagcctgaaagacagaatgtctcatctgttcggtcggtcccagagtggacttcatcaccatcaaaaagcccgtcgatcaccgctgccttcattctcttcatcttcctcgaacgcggccatcaatgaaaaactgtatcagtacaacccagacctccataccgcatcgtcatcttactggacgaccgttttggtccctcttccttttgggaaacaaccgcgaaagttccggctttctataccggtacctcctagactgtaccttcggataagtcggacgagctatatcagagcaaaacttctcgtgcttgcactcggctgtctcgttttctttgtttggctcttaggatcagggaagaagaagaatgacggcgacgacggaggaggtcaaggggatggtggctggccaaatccgtttaaagatccggatacggtggtgatctctaaggaggagattaaggccgtctgggaatgggagatcatcagcggacactggcccagcaggagatcaggtaagactgtgctgttgctgtagaatgagccgatgagaagcaagctgtcttgtcatgaccagtcattgtttttattatatttttgcttcttcttacttacttccgacttgctttgatctcttttgaatcgactccatcctctttggtcacctttagtgcctcaatccaatcttcagagtggatatgtcaacccctcccttccacacagccctccccctgtctcatccaattctccttcgcactactttcaaggttctggtcacgacagaacatacgtgaatttgaccgttccaacagatcctcggacggatggggggttcgactacccgaaaaggcctgtcactgggagcgtggccgacttggacatcattatgaaggaatgtgaccttagtaaaggagcggtgggtacctctccctcttattaagcgtgtcagctcagtgttaagaaataaaagctgacggagcgtgtgaaacattcgttctcaatagtatgtacgagattgtttggaggtccttcgtgtaggtgggaacctcgacggccgacgtgtcaagagaggagacctttcgccctggtcttatgtcttcaccgaacaaccatcgacctctgttccgtccaatattcgcactcaagaagcagatcaacgatcgcgtctcgttcttggactcggtccagcaactagtcttgatcaagactccctgaaaacaaaaccagaaacccccaaacctaaacttaacctgcctaccccctacccagctcgatcatctgctgctacgccttcccagccatgcgaccccaaccgacccaggttgttccatatcttctgggctggacctttcaccgataagccctatatggcgatattgtcatttctttttactcagaatctaggactcgacttgcctcaatctcaatggtcgaagcagacaaatcctccagtgtgccgacctcagttcctggtctggatcaatccaggtcatgccgcgagcgtgccaaatccggcggccaagagggagatgtacgaggctttggcgacaaacccgtggagtgcgccgttcctacattcaagattcaaggacgtagtcaagttcaagatgtggaacacgaccgagcagctcgacggggtgcctgaactgaaggaccactggaggagtatgccaatcctaaactcgggaggatttcagttcacccctcctgccaaggaggacagcgaggttggcgatgaagtcgatgcggacgccatgttaagtgacgaggagctcttggcaggaatcgtggcagatctggcagacgcggccggaggagatcaaaagccgaaaccaccaaagccagccaagattcccaaggtctcgcttggtgcttccgagaaagattatgataagctgtccaccgtgctctcggatatggttcggttcgtgctcctacatcgatttggaggaatctacctcgacgcagacaacatacttttgagagattgggaagagttgtggaactggaaaggagcattcgcctaccgatggagttatcacgataaatacaataccgcgatcatcaagatgcacaaaaagtctgcgttgacaagcttcttattcaagaccgcgttagaaaacaagatggacttccatccgatgacgatctcaagatacctcgaggacgccgggttgagtccgttgctttatcgactgcccgatgcgttgtttgattcggcttggttgaacatggaaaagtaccagcgagagagaccgccgttcccatacttcccagagtacgtgatttgatgtttcttgtccattttcaacgttcctgagtcatgctgaagcaattcaatgccaaccaatcacaaaccaggttcaagaagttttttgtcggtgacaagcagctgacggccgaacctcagcctgctggctttgatgcgttcttccgaggtgcattctgttatcactatcataataactggttcgttcttccccttttctcatctcaaccattgtccgtatgctctcgattgacctcttatatgttatacaatctaggtggcttccgttcgacccagctcgaaattggcctgatctgggccaaaagttcattcgaggcgaacgattgcttcgtgacgccatcttcgcctccaagaagcctagtaaacctcttgcggtgaaagatacccctgaagaagaatcaaatccgagcggcgtggcgattaataatagagcagtcgaaccggttgatacatctctgccggaaaatgcagtagaaagagtcaagagaccggtgtccaccggtgggacaggtaagaagggcgagtgggcggacaagattgaagacgatgagagggatttagcttgggcggcgattatgaagaggacgtttgaggcttatatcagaggagaggccccgaacatgtatgggtacgtcgggcgggattttttgttctgtttcgagactactcggtttctgtaactaactcctattttggccttggacatcacagtgaatggctgaagtgggagtaaaagaccgatcaggataccacagagaagatatcaaggaggtttccaacctattcttgtcagtttcaaaaggaataaaaaacgttgagagaaacccaaccagaaaggagcgaatctggttcataatcagttatatctggccatcctcttgttttcaagttcatcttctttgtcgtcttttctaggcctgtcttcaatgtcaacttgttcaatcatccactattcccattcctttctctttatctcatctagataacattctctatataccttgttctcttctgttccttttgttatcggtttctttaattaaaaaaattacttcgcaacacactgtttcatgggctgtgcatccactcttgttcaactggttcgatcaaatgtttctctgtcacaaggcaaatcagcttcttcctctacttacgaagctctgcatatatttcttttcctcttcttgtgaattcttgcgtatcttttctcctcttaaatatcacctaaagtcctctctttgttctcattgtgcgaggtctctcgaataaccctttctcaaactttcccttaaactcaatccaacacccataataactttttctcgctattgattgctctcaagtcaactgtctttcttctcttggttttaagcactgtcataaatctattcgttcacccctcatacacatacatctagacaagaaaaaggatgcgaaaagaaaacgcaaagaaagaaagatgatcgaaaaaataacaaagaagagtaatgggtacaaaattgcggaatgaaacctttaagtatcttttacttgatgaatctgttgtcatgacaaagcatgtatatgtcaattcagattcaattgttaaacgaaggggaatgacttactttgacatgaatttacctgtatagtcatcgtgagtagaatgagcatgataaattagtcgtcaagcttttaagatctggaatgaagtacaaagcggtggcaagtgaaaataacgaacgatggaaatcggtcctcagcagatcgttcacaaactccttcttcttgttcttatcctccgttccagctgcctggtttttgaaaatcagatcgtcgtcccatcgtctaccaaccttgaaaccagaagctgaagatcctccattggaaacggaatcagaatctccgttttggcctagggcggcagccaggttcaagagaggatttcccatcgcgatctctgcttctctgtcggttgcctcagaggcctgcagagcggcttcctattcaacaagaaaaaaatgataatgccgagagataaaagaagattagtggtggacatggcgtttaaatgtatcttgagcttgcagctaaggggtgtgaaggtcaggaaggcagcgacgaacttgtctctccttctcttctgctcgttctcgcttgattttctccaactctcggaggagctctgccgtctcatcctcagagtcgtcatccgagtcaacatctgaatcttcgtcttcgtctgaatcttccggactttttgaggaagagtggaaaggtagaaaagattcgaaaagattcagcattcaaaacgtatgaactcatccaggctgaacacaaggatcccaattcacatacgttgctttgtcttttcctttcacatcattctcgtctccactgtcatcatcattgtcgtcatcagcatcatcatcatctctgtccaatccaacagcttcttcaagctttcgtctcttgctttcaccctgctcatcgatctctgcactaggagacccgtcttgaatagtcttgagttcctgaccgggaagcaccaaaggaggcagtgcaggcaatcctcgagctttcctcttcttatcctcagcttttcgctcgttaatcaatagttgagttcgaagatctactcgagcgacatcagaggtagaagtctgaccgggctgtcggaatttaagcttggtgtgtgatgcaatctccttgttagagacttgctgagatccactcttagattctcgaccttgggcggggtctgaaggcaagaattaacatgccacaattcttgatatcagtattttatattgaagagaaggacagaaataagacgaatgtttgccaggtgaggcggaggtcgtgacttactccaagtaggtctctatttcgtcccaatgtttagttatcaacatcccgtaatcataccgtcaaaaaaacattcttgacgcgtctttgatcagccttgagcaagacaaaagtacttacgtgagcgttggacatttttgtgtaatttaacgagagcgaacagaggtgatgtggccaggaagaagctcagctgtggaagaagggacgaagatggtcgatgtcggaacacagccggtaaaaatctcattaggggattctccgacgcaaacttgggtttttctgttcgattttcgatcattttctaagtatatttgaagtgatcatcaaacaattacagggagtatcaacggcacaagccatcaccagtgttgaattcggtacagaaactgccatgaggtatataagtaagccggaaagaacataagttcgagataggtatataaaagaacaaaggggcagaagggggctaaaggtagaaagcagagctgggtgaaagctcagaaatcttagataggccagcaggacatctagcgtagtatataatctctgagcaaagtcacaagttcggcctaaaagagaagcatagatagaacagaagacagtcagttttggcacgagatatactactcacaaagggtatcaaactcttacctggcgaaggggttttgaaagatagttttgcctgtggagttcattcgaaagcaaagaaaaagcacatcagacacatctttctattgagttaggaggatgaacaacagacgtacattccagaagaaatacagagcaacttagcactttgctgacctattcgtaagattacaagattaaggtgccaatagatcagctcatattttcaaagcgacaacgaaagtatactcacaatcggcggaaagcccaacgataggtagtctatgactacgacgagatttggattctaacaatcggattcgagcggtggccgagggtccgtcccggaagggcatctagagaggagatttgtgaccagaatcagaatcaaatcagtccgagtgaaaaatcgatgtaagaacggacaaaaacaacatacatgatgatcgaagagtcccaaagaaaaatatccatccggtcgacgttcccattcagttacagcatcgtttccattcacggcggcaacaacaaccaaccccaacctctccaaagtcttacacaacaacttagaagcaaccggattgtccttttaaaaggagagaacaatgtcgatatcagcatcatatcttgaggctggtacgtaggcaaaggtggatatgagaagttggctgacctctgcaatcaagatgtttttggacttgaaaatatcaatttcttcaacagtgaactgatccagcgtcttatgcgggataactgctttcttcacaggtgccgtattggccacattatcgtgcagcagatcgactacgaatttcaggagcttcgctcggcgtataggcttcaggaaaggataggcatcgtccttgggcttgctgttgatgttcgctgccgtagggacaagcaagtagacgatcttcggggcgatcggaagcttttggaccatctttctcacctgcgcaagagaatcctccgcttgactataaacaaaaacgagtgcacaagtcaatggcgagcgatacagtcaacataattatttttttccaaataaagagcttactgatcgaggatgattaatgagaacgactgagatatcaacgctgcttgtgtatcaggcatagaggccgtagtgacgataaaggagccggtcaatgcagacgatatgagagcagtcgtagcagatgatgaagacgagatgagaatggcaggtcgcccgtgatcgcaaagagctgaactaagagcagctcgatcatcaagtgccttcgtgttgaacaagtgttgtatctgttgtcagctttagaggctttgaggaagcagccaatggggccaatagcgatttaaatagggcactcaccttgcgagcctctggcgagtctgagactatcttcgccgggatcgaaaaggaaaatacgcttcctttgttgacttctgactcgacaccgattgtccctcccatcagtttgacgagttgcaaacagatactcaactatttgaagagaaaaccggattgacttattgagtacttgactatacgttctcattgaggaacaccacgtacacctaaaccagttccaccatacactctcgttgtcgatccatccacttgactgaaaggctggaaaagtagaagctgctctgctttggacatgccgatacctgatcgaacagcagaaataattcagtggtcgctttttgaagaatgatgaaccaacaataaacttaccggtgtctgtgacctcaaaacgtaacacaatctcgtcttttcggtggggaacagtactcgattcatcaagagtgcactctagattgacagatccagtatgggtaaactaatgatagagatattatctctgtatcagcatgatcgcttacgtcagaaaaagacataagaatagaagacacccgtactttcaaagcatttcctagcatattcatactgaaataagattaggaaagaaagttaaatttagcaaactgtaggtttttaccgcaaggttaagtagacgtacatgatttgccggattctagaaaaggcataatttgaaagaagaacaggttatttccaagttcgctcacaaacgatatagatcatgccgaaagcagacgcacctcgaaggatcagaaatgatatgcgaaggaaccttcggatcaatgttatatgtcaattcaagacttcgttgagtagcctggtttgattaaattcaaagctaaaaagatgaacaatagttcaggaatatcgacaagaaaactatgatattatttaccaatgtcaataagagctcttgacattcagctatgaggccctctgtttatgtgagaaagtaagccagagaagtataattagttctagtcacctagagaagggtgttcgtgtttcctcggatcacgtacctggagagaaagtgagaagctctagtttgacggcacctgcttctagtttcgaataatccaacaaactatcgatgatctaaaacaagaacgtcaacataagaacttcgagattagtataccgatcatgattctcaagatggaacaagataatgcgataaaggcccacttacctcaagtagcaattcacaactttgtcgggctgttccaacaaattctctctgttccgagtttagagttgtttcgctaagaagacccaataggccgtagaaggaactaaaaggcgtccgaagctcatgggacatagaggccaggaaattggacttgattttggtagcagtcattgcctcttgccttgactttcgagcttcctcgagggctatcatagacaacgatgatatagagtcgatcagccctcaatcaaaatctgagataaaaatgcaagcgaaaccacatacacttcttctgttgatcgatcatccgaatattggcttgtgttgctctatgcagctacacgtacaagtagtaaatggcactatatgagtatatagcgtcgaaggggacgtgaacacaatatacttaccttccggaaaagtaaggcattaccgatcgcgatcgaagcttgtcgcgcgaggatttggagaacattgacattggatggcgtgaaagctttcagatcaggtgtagttaggttgtcgcaatatacagaccacgtagaaggcaagtgagaaagactattcggatagatgggtagtgatgcagatcagagacttaccgttggtctttccagatgttaagtaaatcgcacccaacactaaactcttatgctcaattgccctatcgtggttattatacgatgttgtcagtacattaggatgagaatatataagaacattatatgtctgatgtattcactaacaagcagactaccgattttggatgttggcctggcgctgcttgagttgcagacatgaatcctaagtaaaccaccgaagcagaaatataagcttgagagattaggagacaccgaatgaggaggtttttgacggactgggatcggtagcagcgtttgataagaataccgtctccttagactgtaatacacgtcccatgacggcttgaaataacgggtccgggttttctgatatgaggatgggtcgttcaaagtagacacaatttccaggaagaacaagcttggtggcaattgaaaactggagaaccgagaggaaaagttagtgagtgttgtaagcatcagttgaagtgcgtatacatacttgaccatcttcaagtttgactactatggatgcagtatcagcctgttcacaaccagttcgtcagcttacacagaaccaatgagcaattctctgtgttagaaaataatgattcgccttacaccagagtattctactgtcaactcagttaggctttcctataaatccgcaaacgatcgatgatttcaatatgaaactatgatgtgcactgagataagagaaggcgactcttactagagtagcggaaacattgacatcctgagttagagagaaaaacgggtgttgtcaattaatgatgtgaacgggaacatgagcagtatgaacaaacatacggaagatatgacttgggaagccttaatgatggcagtgagatcgtcggtagtaaggttttcaaagttcgggtgctcttcatccgattccgcagaagggaacgcgttatagaccggtcgttgtggaaccgacactgggcccacagcagtataatcagtctgaaccccgatctagaaatgatgttaaattcaaacaacactgttaaattctatgattttccataaagatacggtgaagagctgcgggcatacttcacttgtgtcagcacacgcgcgagagatgatagtatcggtcatgacgattttgcttgataaataatttgagattccaaaggatccccagtgggtatgccttgcgatagccctgttttgaagccttcgtatcgttgaaatggttaaaacgatgtcaaaattgttcgtagtgataaaaatacgaagattggactcactctgtaccaaattgtctaaaacggacaatatagaaattgataataagtgagtcagaatgttttcagtctgatactaattcagtatatgatcaaaggcaaaatctcacttgactccacttcgcacgaaatgactaccagacaagaacaatgcgtttccctcgtcaagaacccaaccaccatcttgactgatgaataatgagaatcatataagatatcagaaaatcaagtcaggtcactttcgatctcctaccggcacggataaacgctatgaaggaacgtacgcaagtttgacagcttcgtcatagagcctgaacgcatcggaaccattatcaagagaagcaagttcggcttcgaccaaagtgagccaatgcaaaaagttcacagatccggtatcaagccatctaccaatgaatcgctggttttctgcgatctggtctcgatagcgcttctccgtcgctggtggtagagaggttctaagacattcaatcatagccaatgaatgatagtgaagtccagctcgaacatgataatgactagttgacaagactgatcagtgaggtttgattagatcacatagtgacatgagagaaacatactttggattccaatccctatctttccaacataaaaaccctgtttcagccgcagccgcatgccatcctagcgaatatagagcaagcgtctgtgcgtcccatgcgatgtgtcagtatttaacatcttgtgtcttcacaaagtgccaaatgccatcataagaattcaccttgaacgatgcagtccattggttgacctgtggttatgtcagacagaattgagaacaaaaagaaaacattagccttctcgaattcttcagattgagcatgatcttgaagtcaactcacgacttctgctgcgttggcgggataatcagtggcataacaaaaatcttcagagtccagtatagtttctggcgatgtgttgatagtctttccagcaattgctctcatcgtgcctgcaacgcctctaatcaaggtcaccatctcggtttctcctgcccactcgatgacatcggctatagcttcctcgcaaaacagtaaaccatctgagacatgttcggaggaataaagtctggtttcaatataaagtaggacgtgagaatcatgtcaaccattagacaaatgcatgaaaacatcaagcaacactcacttggcggcgagttgatggatgactccgagacaggagtatgtcctgtctcctgcagcgagagaatactggtgatgcaaaacaggaagatgagtatgcatcatggatcaaagagaatttggaataagacctaaaaacgactgaccttagtagattttaagaactaaagatgtccgtatgaacaagaatttatcaagaatcagccatgcatcagggaacatgcaatcgagaagaagagaacctccgagacatacgcgttcatgattagcacgaaggctctctccatcaaagggagcagccaagattccgtaaagcaaagtaactcgtctacgaatcgaatattccaatcatgtcagtttggagaaaagtcggttcgattgtgtggtgcatcaaggagaaaaggcttcaccctttctcggtgttgttcgaccatgtatcggcaagttggagagcgagccttgaaattcctcctgcaaagcggaaggcgtcatggacctcggctatcaattttttgagacaacgttgtaaatgtcagaaagctgcaaatcgattaatccaattagaaaggtcaagatagactgacaggcggttcctccaaaccaggcaaacccaagtgaacttgaggcggtcattccgtgtttcaaagaaagctgcacgatctgttaaagtgttgactcagataagtttcgagtgttctctctctattttgaccgtgagacgcaaagattacgtaccatcaagcctatcacatcgctcaggccgtttctagcccaatacgcagctgtcgcacaatccgacgtaattagatagaaattcagtcagcaaacatgaacatcgtgcaagatttaaagctcaatcagagccattattcatgaggacatactggtgcttgcctccgaaaggatggaagaagcaagttcgattctaggatctgtcgcttttggactggacaatatgttttccatccccgtagccatgaccatactctttgtcaactcatacctgcgagattgaaatcaggagaaggagactttgcaccgttaactattattctgcttgttgtttgattaggaagagaaaaatactgacatctcattgatctcttgttgggagtattgtttgctacatcgaaggattattatcatttgtcagtttcctaggtcttgttcgacttgatcatttcacttacgcgacatggatccccaatataccaagtgctacacacaaaacatcgatcgtaagaaaaagcgtcagtctcaatctgtacatcagcgagatgcttcggacaagagggataattgcccaagatttaccttcaacaaaaagattcaatgcctcttgcaaagcaccacgcatccaaaagcttctcgattccgctcggaatacacgagctctgtctacaggacagatgcatttctcatggagttctttcacaagtactcctgtcatcgtcgagtcacctttccaagtaagaagtctttttgacagagtcatcagttcagagatgtgcttcatcagcccgtgtatccaatgcacatcaggagaaggttgtgactcactctatcaaagatagatacagatcaatcgtattttgatactaaagatgagagataattccagatcgaaatgctgttactatacggacaaggatcatggccgatcgtgttcacaaaaaagttgttaacttacttctgtactccaagagtctggttctaaaagttctttacaggcttgaatatatcgaagagcagtctgccgaaacaagacaggggtttacccatcaactagaactctcaatcgtgatgcgtgcggacgaggatggaggactcacttcatgagcaccctgagcgatcgctatatctccggcagcctgcaagatttttctgtaatgatttcttccatggttctcgactaccaacagtggcacacatttcaatagatgttctgcaatctggaagtaatccgggttagccgacgcgagtaagaggtctgctatcttcagggccatcatctgaacatcgcgaggcacttgttcgagtccaaggttgagagctgcttgtcgatatcgatcgtgcgcaaaggtaacccactacaagggacgaagtatcataaatcatacaaatgatcagagaggaaaaggaagaaaatcagattcataaatataagagagaacaggttggcgatcacgtacttctcgacctctgctaatcaaccaaccctccgcaagtgcaacctggagtccattgatgcttcctcgagcaagtctccctagacggagttcgtcttcagaatcatcactaccagaggtttcctcttgatccatgagcgtgatgatatcttgcggtcggaactatcaaatagagcagtaaatgggcacaaaatacgtcgttggtcaataaagaaagcagaggagaagaaaagaaaaccaaattgattcacctgaccgccaaagaaggaaccccagactagaaatctttgaacatcatggggaagatcattcaggtgttgcagtaagaacgagatgtcattatcatcatcggattgaacgatctgggagaagaaggtggattcgattgtttggatattgaatcgccatatgttgttagtccaatcaaaatagatgtgattatgtcgtttgagcgcgacgagaagatttcgaatggagaatgcgtttcctttagtgtgcctgttttgacggttgcgttagagggtcgctaagacattagagttacattgcaaaacacaagaaacagagaggaaggtgactcgcctatagagcatgttgaccaagggcgtcaatacgttctttaaggatgagattaagggtcaaagaaatcttagtatcgtaaactatgtcatctagccacaacagaatggtgatgatttcgttagagaagcaaggcaaaagatatgatgctaacttcatttgattcgtgcaacgtccctttcaccagtgacataacggatgaagccgagagcggtgagaggtttatataagttgctctggatccattcccaaagatctgtctgacacgggcgacaaaagtctcatcgtctggtcggagggttgtgatgatcagctttacaggcatcgtgtcgacagataatttagggtaaatatgtcagtcggctgttctcacagggaacgagattcagagagcagcttggcaaaagggaactaaccatccggattttagcagaagcgatcgatcgaatcaagcttagcgagggttcatcagcgtagtgtctatcatcgagcaaaaggaaagcataaagttcagccaaatgatcctattggccaggtcgataggacatcattgaaaagatagagaatgcatacaagtcatcgaagaacatcgtgagcacttgggaaagaatcagaagcaggagtgcgaaagaatcagcaaaactagtttccgggaggattccgatacacatacaaagtacactgctcacaatgcatctgagctaatgtagcaatcacattcagacatagtgactgaaaccttgatctgctttcagaactcggcaacggctctgctggagagtgtacttcgaaaccaaagagcgagagaagctccttcaattctgggaccgcgtgctgtttaaagaagatgtatcaaataacattgcccccaacagaaacaacattttcttaggacaaaacatgcaaagaagatacatgaaggacaaaaacggacgaacgaaaagtaactgaatatttgataattgaggacccagccgaagttgaagggcatttacgaacgcatgtaagtcggattggaattctgtgaggagttgcttgaagatcaacgaaagacttgacaaaatagccgagtagggcgatgtctcggtagctatcgggtcaaattgaaacgaaacagaagattatcagatacaaaatctgaacacgtcgagaacaaagctgaccgaaccgtcaaatttggctacaccgtagaatccactacttcggcagactgtttgacttgccagcaccaaagcgctctatcaacgatcaaagacgatcgatatcagccaaaatctcaggtgaagaagagaaagagaacagaggcaactgcagaagagatgacgagaacgaaccttgccgactccagccggcccggtaatgacaatagccctagcggccgccaacctctctttcgcattgccgtgagacctgacattccctcccacaaggccatgtgccaacacatgagcatgtccaagatttgaacttccctgaccggaatgagtggctatggactccgatctctcctgggagcccggtgaatccttcaatgtgccggtaccggtagtctcattaggataaagtgaactgtctagttttagtttgccaaccactccatttccaactcctacactcgttccgcctactccgacagatacgccgacgacgtcgccgctagctgagcctccgatcgaaaatgtggcggaatccatatcgctccctgagtcaaccgtctgggcacctccacctacgaggtaattcgtagtagtggtgggattggagtgagtgacacttcctcctgtggaggaacttggatataagaagttatgggtggcgtaatgatttgtgtgctttaaacgagatgcagttgaggatgagaggtcagtgggcacagaattcgatggaaagaagagagagaaagggagggagatagaagcatacggtagatgcgacgcgtttgatgaccactctcatgatttctaattctttcgacctcccgaactgtatacgatgaagaatcctcatacaacatcagtttggaagaagaagggaagagttgcaacctctgattccgttccagaggaaatagagcttctaacgtaccagtttgttcggcaagacgaattctgaaaatttatcctgactagcgatctcaaaaaatggtaccaactctgctgtctcgtttttcgagttccaaccttcagtcaaccggtgctggcatgttagcagatccgccttcaatccaacgaccgaaagatatctgtcatccggatttttcgacaacaatttgaagatgatggcgctgatgactctagggacgtctggtcgaatctcatgaaccttaggcgggtcatctgcgacgatagatttgaatacttcgaatgagcgacctagaacacagaaaagcgcgcgagtgaagactcttgatcaacagagggaaagggatcacagatacgaagggagagaagagagatgacacgatggataaaccttcgaaagcgacggaaccagtcaagattgagtagaacgtcatccccaggcaatagagatcggttcgatggtctgattgaaactgaactctgcccgtttgttcgggggctagatagttgagcgctctgttcgcgcgtatttatgtatgagttcagatatgtgatgtgtcagatcgatgtatccgaaaatgaagtttcaagatcgcgcgcccgcactcgcttgccatcccaccacgcagaagatccagcaccaagagggaaaggagggaaactgacctgacgatctgttttcgttctttatctcccatcgcttcggaagcgaggaccaacccattcggcccacccattccttccaaagaaattgacctatttccgaaatgtgcccatctgatcgttcctgctgataagttcaagctgagaaacatttgcgagagagtggtgtttcgcgtttgagattcaaggggaaaagacgctaagaggatgagtgaagaagagagcgtactgaaaagcgttcggtcggatctctcgatggatgatgttattactatgaagaagctctacacactgcgtcgcctgaactgcgaacctgttgggagaaagaacaacgaggatttaaggaaatccctggaaagctcgagataccattggacatatgaacgcactctaagaaagaagcaatgtcgatatcgactttccggccttctccgtctctatctacatcctgatctgtaatgattctttccaactcagccatcggcgtgaggtcgcctccgttatcgttgtcatcgtcggcggcggcggcgacggtggcgccatcatcaagatcagtctctatatgatttctcagcccactcatcgttggctgatcttttgtcgtcggtatcatactcatctcctctcttgacatcgggacgtcttcctcttcgactgagccgaccgctccatccgttctcgtgctcggacagagaaagctgtcggtctcgaacgacggaaagtaattgggaagcgtattgacaccaggatgtttaagaatgagcacgcagacatttccctgatccggtggaattacaaaactgttgttgaggtgtcgaggagaggaaagaaagaaagaagaaaagagaaacccaaggatgtcagtacagccatgcgaaagcttctatgaggtaatgctacgcgacagataaaataaggagaatcttacaaatcgatgactctcaagactcggccggaagcctcgtagttctcactcagttttcctaatatgtgcatctctcgctcgatgatgagcgtaccagaagtgctataagaggcgactttggcaaatacattggacccatcctccagactagtcccgagtgagatcatcgtcctaatgataccgtaggcattgtccatatttcgttttgcgagagcaggataacaaggagagaaattaaagagctatgtcaacacacaggtactctccagcttgaaggcggcaaaggtcatatgtataaaacaaaatgaaaaagaaagtaacagagaagaagactgacgaggaccctacgtctatccatggcactgggctcgcaaacttgtatctcggcacgctgaggaccatccttctactatccgatggatctggccgataatataaattcggcatgaactgttccctcccatgcctacgcttgaatggcttcatccttcccgtttgtgtctagaaaagaaacaggtgaggcaagaaagaacgaaatggaaagaggtggaggatgatagagactagcaagaaaaaagcccggtaaatggagcaaacggatagtagttcgactgcgcataatcgcacgcgtcctatgaattgaagcaggtcaggccaggcgttggaaagccacgcgagaagacatccgttgcgctggtgtcagggatgtgacctgagtgttacacctcggtaaccttcttttggttctgttgtttctcctgcctcggtattccttatgctctctcattacatcaacatgcaggtatatagtctggtagcgcaggtacttctagcaccttctatgacctgttctgttatgcataatcgttggagt

SEQ ID NO: 534 - DNA, 13481 bp, Xanthophyllomyces dendrorhous
  misc_feature (234)..(243): n is a, c, g, or t
attccctgcctggttatatttttgtaaccttcccgttatcctctgaacccagatcctgacagctggggtccgtcgagtcacgtgtagacgaaggctgagctgggctgtgccattctatcattctttggtcagactgatattggaaaagaggaatgggtctgatgtatttgatgaaagctttccgacagtcgggatagataaagaaaagaaaagaaaaaaaagaaaaaaaaaggnnnnnnnnnnagaaaagacagagcaggagatggttacaacaagacgagggatgatttaaagagaagaaatcaggatggttctgcactcagtccaactttagcccactgaggttcagatagatttaaccctagttgataaaaaaaagatcgaaaagattccgccagaataaccaaattcgacaattcttttttgcttttattattattttatttcaattggaataatagggtgatcgatgtgatgtttccagtgtatgtgtgcgacgaggtcaagcttttaatttggtaagcaaacatatccatagttcattaacccgggtatgcgagaagatccgatacgacctacagagccaacattttcgacatatacgtctgttgaaaagtagcgcacgacaggatgtagtgctatacacacacacacatacatacagacaggttaacgggcaaatcagtgaacaaatgaaatcatgtatgaatctacagatgtccaaagagtgattggacatcaccgaccaggtacctaccgaagcataaagaggactacaaaaggtgaagaaggcgtcgaaaggaaggaaaacatgaacagcagagaggggatgtttagcgggcttgttaactattgacgatctagttcgatcgaagaactgcctcttttccttgacggaagaagtggaccagagcgagaagaaaagaggagtttttaagcggaagaagaaaaagagagagaaaaaagaaacaaatataggtaggttttcacgaccatcatgtagagactggaaatagaaagggagatgaagaagggagagagatagagatagaaatagaaatagagcattccccgagttaccgttgattcaaatagagcaacttggaaacacttgctagatgtcggagctcgggaggaccgttcgagatgatcccatccatggatcgagcctgagttttagcagacaaagaatcaatctattcacatccctgcctatcagtgttgaaggttagatgtaacaagagtaagaatagtcaacaactgtttgactccttgtgttcttttgaaaacggtgattctttgtctagagtaccccatagcttgaagtgctatggccaagacgcgccaagcgattaaaagacacgtgtggataaaacagaaaaaaaaaaaaagaaactatgaatatttgtagtgaggcatgccggaaaaaaatgaaggttcatattatttcacagttaggcgcatgggccccgttctattgacaactatccacacggtcccttctttccccttgtctgtcgttgtgctgtcaccttttccctccttttacgtctccattgacaaccgcatatacccaatttcacccacatagatctgcatagacctccagactcttccggctgaaccctttccgacaacatatatatatatcatgggctcagttcatagacgtcgggcttctgttcatcatcctccaccctcaccggcagagacgatcacgccttcttccctggcaaccagcacatcaccgacaagttatcatcatccttccttggtcaacgtcagacctagaagaggatccaggtacgtctataacagagaccccgacctaggtgaccgttcaaccaacgtcgccgatcgatcgtcagacaacagtcaacaggatctttctggttgggtagtcgacagagagctcgaagaacagtcccatatggagtcgttccatgtagatgagttctcccatatggactcaccatcgtctacgtctagcccctcctcatcctcctcgtcttgggcagacttttcggatagggatccgtccaggcacaccggttctgcttcgttcctgacggtacctgagatcaactcggccggctcgagtcctcaacagcaaccgatatccctgccttcttcttcatctcatctgttcccttcgcctctatctcctacttcgacaacgtcgttcactccttcatcctctagacgaccaccctcgctgtcagtacggatacccagtccgtccgaaccaatcggcacctcggccattgtctctcgaccggcgtcggctcggtcgaaacctcatatgaacagaaatccgtctagcgtgtactatgacactccgatgatgacatcctcgatgccctatgatgatcctgctcaaattggccaaattcagcctcagagccaacaccctcatcctggaaactatcctccctcttccccagacagaaactctatccactcggctacaagcgacattgacctcctacctatccatctagcagcctcgacctcgtctgcctcagtatctcctcctccttccccactgtccaaccggtctctacctccttacacgcccagctcccacaagtccgtcaatccgtactttactccttaccttgacctccatccgtccgcctcgggctcgtcacttgcctcctcaacagctggtctcacctctggtccgtatctaaactcctcgagcaccactcccttccattcggcctacgcctctccttacgcaactcccggaatctttccagacagtgtctctcatagcgagtactttccgaacggatcgtacccgccgccctctacttctcaagacggggtggttctggagaaattcaccggagacccttcgttcggtcgccctctcagatctgggcaccctgctactaaagatagcgagcgtccccagtcgtcgttctcccatcagacgcagtctactgggaggtcagccaacagactccaatcagttcctcaaggccaggtcgtcaaggagaaaatttcatccctaatcggaggaacccaggtcggttggaacagatggtggaggaaacaagccagaaagcgaagccgggcgagctcgatgggttatgataccatgggctccgttggttctaccgctagagcttcaggtagaaaaaccagaaggaagacatccaaactggttgcgtttggtagatgggcttggcgctgggtgcccgaacggagggagacctatgtgagtggatcctcatcggcttggtttgaacaggttttcgagatggttgagactgacagtgcattgaacctatctttctacatttggaaatagatccttgcgttcttcttattcatcggctttgcctggtcccttaccatgttcctcatgtggttcctcaatccaggtctgtctcttgttttgttagggtgtctgcaactcgatctctttgatagtagttcttatttcctgttttgtatacagacaaacgggcggtttcctggcatccactgtgtctctcacctcacccgagctaccactcaatctctcatacctcttctttagtcctccaaacgatcccccttccgtcgatcgactcgtctctatcgtcccttcactctggccatccgcgccacactaatcccgtccaacatgctctacttcccaccccactccttaccgcgtcctcgatcgagtcggacgcgcttccaccagtgggcgtgttcgtcggcgtcttctcgaccgacaagagttttgaacgaaggatgctcatcagaagcacctgggcgagcagacatcgaatggagggtaagggtgcccatggactgggcagtgttagggtcagattcatcttgggacgaccgagctggcggttgagagagcaagtcatgatggagatggagagtaagtcgagcagagtcgtccttttcgaatttctttctctttccatctgacctaacctcaatcttattttctttgtgcggtccttatttctctcatcgaaaactctagcatacggagatattgtccttcttgacatcactgaaaatatgaattctgggaagactcaggcgtacttctcctgggcagccgagaacgccatggttccttctatcagtacaatcaatgatgaatacggtctagaggaaaagccaccgaactacattgtcaaggcagacgaggattcgtttgtgatgctcggggagcttgagaaacggttgaggatactcagtggaaaaaagatctattggggttgtaagtcttcttatcagctgtcatgtgtcttgtttcaatcgtttccgtggggctaatgaaaaatgtttttacccaatccaacaaaaaaaaagatctggtcaagaaccaattcatgggcggagaatgctatgcgctctctcttgatctcgtccgctacgtttctacatcgcctgccgtgagagatctgatccacggcgcagaagataagctcgtcgcccggtggatgcatttgcacccagagaaagaatcaattctctgggtatccgatgcctgtttcttctatgatcatcctaaagcaggaacagtttattctcatggcttcctctatccaaacactgtccagcggatccgtgccgatttcctttccttgggtcagactggttcggacgaacggagaacggtggaaggagagtacaacccgacgccaggatttaaccggacagcatcatctttggcttactcatccgtttgcacgttcggccgaccgtatagacccccgttaccgaatctgacccctctggaacgggtggaagctctagtcgaagggtcagaaatgtctctcctctcaccatactcttcttccccaaaaacgtcgcctctttcaccagaaacggtgatgaaacgaagaccgtcgatgaaccaaaggtacctcggcgattgggaagcaggtagatggggccgaggaacggtcgtggttcattacgtcaaaaataatgagtggtttctcgagacggctcttgcctttctgggaaccacagggacggacctaggaggcgtacttggtggaggtcgtggagcgctcggtgcgctcggtgccgacgttgatggtgttggtggtgggggatctagaagatcgggtgcgttggccgcgctgaacgctgagatcaaggtcgacactagcccagatgccaaagagatcgataagaaagacttaggaagagttgatcttgattcagagcccgcggagggtctcctgaacaagatcgtcgagcgaacgaagaatgaagatggagtagggaagggaaagtaagaagattggggaattttttaaaaggaaccggccaatcgtcaagtctcaatcgggaaccatgtcaataggatcgggagggatccaacaagatcggttggaggtatcataggtcgagtcctatgaggtggtaataaaataataataccccttctcgctttttttggaggcagacttgtcaacacccgcgaagggggtttttcataggtttagaatctttttatttattctagatttttggatcggattggtttgcttttcatcgctggatcttttcttctcttcctcctctttcttgcctcttggtcaacatctttttttgtctgcctttgcccctgcctttcttgctcctgccattacatcgtcattattcccctctcaatctaacacaacaacaacaaaagttgcatatggtacataaaaccttgcggcaggagaaaccgggactcgacaacaacaataacaaaaaatcctctcgaattcgtacacgctctgctcacacttatacgacacattatatatgtgcacctatacatatacatatatacacatcaccaagatttttttttccgtatatcaaggttttttttacctatacatgtttgtctaattctcatttcagtctcgtgtctttttgaagcgacttcggaaagaaagtctcaaccatcaatatgcgaataaggatgttatatgccgtgcgagagggagcaaagacaaggttacatatgtaagtctatgtataagtttgacctggaattgaaatgaacgaagtagacgagtagtaacgacgagagagcccaatgctaacaatgcgaagatagttaaagagaatgataggaagcgatggaagatacgttgcttagattctgtcccatgtgaagttcgaaacgtgacatctggattttcatcatccatcgcgtcaacagaacgagagccaacgttgattggcatgatcagcttcggtctgtgatttacacggcctcaaaaagaaggaacgatgcacttacagatgaccgcaaccagaagcacaagtttgtccatacacttcgtcgacagttgcacctcccggacctaacttcaagcccagccgatctttttccctctctctttctcttcccctgtctctctctgttttgaaaccactcgaattcagatgtccagtacccaacggtgagatgcctctctcactttccccggctccaggatttacgctaaagcttgaaccgaatgaagtggtagctcgacctggggaatcgcctcggacagtcacatacgaaaggttggattggtaagcaggagatgtttctcgagaggcgttttcgattggatccgtttcttcaaacggttgttcaggtggttcggtgttgaagtaacgttgcatgcagtcctgtttcccattcacatcgatgttgtcaagattgatagaaaaagatgtagatatcagaacatgatgagttggctgaaagggaaaaagatatataaacccacggagtgaccaccatgcccgcattcaccacaaacgataagcatccctttcttcacaggaagaccactgccagcgtgccaacccaacgacgcatatacacaatgagagacatcagactcagagcaaaagaacgggagggataaagacaagataggaacgaaagataaccaagaacgaaccagaaaccacattcaactgcccattcttgggactttgcacaccatccgacacctccgccatggccatgaacatcatttccttcatcatcttgataaggtaacgcatgtgaagggtgattcggacaagagagataggtcgttgtgtttgcctacaaaaatgtcgaccaacataggaatgagaatcgaatcggtcgggctataagcttcgacattaggaaggttagagacggtatttacttgagtgagttgtccaagactatagacaccactgaatcgacgtatgtgggcagcttcgacatacagctccatggacatcaatcgatcttcccaagaagaaaaagaatgaaacgtcttcagttatcaacgacaaggaagaagtcagactctgagatgcagacgcaccatgatacgcagtaacaatccgttcagatcttttgacagaaacgagcttgatcacaggactagtgacgataatgatacaagccgccatctgactatctccctatgtgtttctcaattttagagagatcagatgtagatcgataaattagataaagataaaagagaagaagaacggagcctctagactgaccatgttgagaaacgtctcgacccatcgtctcacactctcaatcctctgttggtgcaactccaaaaaccaatgaaagaccaacgccggatcctgaacaccatcatccaaaccacccagtctatttcgctcattccccttcaaatgagcaagtccgtatgtcaaagatgatcgtctatcgtctagctgtacagcatttagcatcggactgttagaaggcgttaaatctgctctttgagatcccgccttggaagcagtcattttcggctttatagatggcggagtgggctcattggtcttgtgattaattggtagatgggcgtttgacgaataagaggaaggtatgggtggtggcggagcagacccattagagggaagtggggcggcaggagatttggtcggcgtagcagttatggtcattgggttggaaatgatagagtcaaatccataaggtccatatggtccgtccgccatgtcatcgtcctctgagctttctccatcatcactatccacagcgctcaccacattaggcatcttggagtcccgtttgagtagattcgggcgatttacatttgccgatggagatggccttcgtgatcccagatgagactgtgtctggatcactggacggtaggtcgagttgaaggatcgccgaccggactgatacactgaagacataacagaaggtggtaacatcgcaccttcactatctgaagacgaggatgaagatgatagagaagaagagtctatatcagatcctgtcccacctcctgattcgcttgggaattcggtatccatattgagcatcgtcaccggaagagtatgatctgatgggcctcctcttgggcttgactcttcttctagtcggacttctctataatctgcgcttggatttcgggaatgcgattgcctaagcctcgaaccggacgggaagtttgttgcgggtaatggcagctctcttgatgggttgccggataatggagaatgactatgagatcttgaccgaggttttaaacgttccacaccgatgagtagcggggattgttggcgggaagaaggtttaagctggccacgcttgataccagctcggatggcggcgtcctcattgaaggataatcgatgagtaccttgaacgggaatcgctttggtatcggcaagtagcgagcccaacatgctccacaccttgtactcgtaagctagattcgcctcaagagcggcctgaacgatacattccaagaagaagaagaaaactgagtcaactttttacgtcagattgaagtaacatgatatgcagatatatagatacctgagcgttctgctcgcagagtttttccggctcagccccatgaattcgatatcgatcagcaatgaattcaaaccgagatttattgaaccctggaatctcttgttccatcaagacttgatgaggctcgaaccggtcgtcccacaatgatttgggttcctttcccagaagagccaaccggccagcaaagtccggaatacttcgataaagataagatgatttaagttagcgaaaggcgatccctttttgacgagagaagaagagagagagaaattctttacgaacgggtcatcgaaaggaatttccccgggttcatgagcatccgccacaaacgtcaggttatttgactggtcccaagcaaccgtggatcggggaatctgatctaatggccgactgtgatacctgatgtcatgttgaactatccctccgttcttgtaggccgcccagagagtaccgtgagtgttccatgcaagttcttgatgttcgaaggcaaagaaagcgttgatcagatttggttcatttaacggtctctcaagaggaatcgatgtgaggaattatgaagaaaaagctcagaacggaccagctactacgccatcgcctccttcgagaatatactttgggacaaactctcgtctgatatcccaaatctgaattgatggatcacctgacggatcttccgtcattgtcgagactgttgcaaaaggcacgacagcaatttcagtatcatggccgggtcgccaaccgagtttcgacactggatgaggcgtccaaagagttcgatatttggctttatgagggtctgcattattgtagatctaagcaacagacgcgtcaagagagatgatgatgtgtgagaagtcgaatgcaaaagaaaagtcaaagccagggaagaagatcatacgaagacctttctgtccaatccaccgctagcaatccaaccaccatcagactttccctcacccagttccccttccctccctgcttctttccaatccaaacacgcgacgccaccgtccccgtgctcagaaaactttctgcccaacattctgttccctttcctccaatccacccagccgattgttccgttttctagaccgagaacgcacgaaagaggattcgtcggacaaacagcaagcgcagttatgggtgacgttaatgggttgagaaacgagtaggatagagtagctcgggaagaagcaggtagtcgaaagtcatatagacgaagaatcgagtcgtgtccagcggtaagaagacagggaggggtgagttgtccgtgaggtgctagtcgaatgcatgatattggccgtcttgtcggatccacattcagagtgcttactgtttaacgttgattcagaggatggaagtcagacgtctggattgaccacgaacaatctcgagaatcaactcgacagatgaatgtatggaactcacggatttttgtcggtgagttgacatcccaacaaaacactccaccctttctggaactcacaaacactcttcccgtctgggaaccactcccccatctacattcgacgatcccacctcctcctgtcgcgtctctcaaaccttgaagtctggtaatctctcttatctcgacccctcctggtcctctacctaagagtggttcgtcttttgagttcttttgttgctgggattcctttttcagacttggagggggcgtgtatgatgcgcgctgagcggtccgaccagtacgagtcggagcggtcaccggggatacattcggagatgggatgaacggcgcgacggacgtagagcctgaagagatactagatcggttatgggatgaggaacgatcggacgctgaggccgaacgggaaggtggtgcacccggcggtgtgcttgggcgggattgcgaagcgtatgacgcattagatagagagaatatcggaggaacgacgtgcggaggtggtgacaagggtggtagcgaagaggggctgctgattgagatgactctgagaactgatagtatccacaaacgagttagtccagataaagtgacgaccaaactagcgaatagccatgtatgtgagggagagagaacgaaagaagagacaaaacgaactatcgtttccggcgacgaccgctcgatcactcccctctggtcccaacgctagtccagccaaaaggtttccaagttctcctccttcgacagctaaaggcctttccctttcttctcccttccacctaggcgctttcttgctttgttctgaactttggtccttgttcagaatgtgaccctttgcgtatctatcggccagcctaggcagaccatgttccatcccggtctcccggtcataagagcctacaacgtccggtgagacagtgtactctggatacatgagataagagtctctagggtcatagagcgttgaggatctggctggtagtgcagaagtatatgtgactggagaagttgaaagagggaaagaagatggtctgggagggctgagagaattggaagagtagaatgcagaggcatttgaagaaggggtagctgatgacgtggatgataggttggacgcatagctgaagcataagtacgtagaatagaatatacattgggcaagatggtgtatgttgagaatccagaattagcaatccagatgattcgagcaggctaggcgagggctgggagccaacttacctggagagtacattgcctagcttgtgcatcgcaaaatattttcgtccgagacacggactgaacagaaactcctatgattcgattgagatctacaagggtacaagagaagggcacaagagaagggcaagagtgatggcaagagcgatggcgatcgtgatggcagcagttatggtgatggtcaaaagaaggtgagaatgttcggagatcgcctcctgttgtcactcagatttgtcctccggccagtcagctctttgtgtcctttgctttccgtcttgccgcttcctttcttgccatggaaacccagatggacgtatcagggagacatgttatggagacaagttcatctcagagtacaaatcgcgtatattcgagcgcccattccttctgcgatcgtgccaatccagagtgtgctttttcaccgcatctatgcctgatatctagcgtttgtgctttccttcttcatcttcttcaccaaataagccgacgattcatgatctgactgcttcgtatactgtcgagttccttctgacagttgacgtttcgagatccagctggttctctcgacaatttcgagggcatggcgaagaagagcttggaacgcgattttgatttcgtcgtcggtcgtgcctctatcgacggttgcagtaaaccaaagaaggacatggccttcatctggcttgacagtcaacttcagtaaagatgctgctaagttagattggtccagggggcttgtgcgagaccggtcggcaacgacggctactttgaatcagatacaaggtcgaatttgagtttaaacttggacatatgaaaacgtcttgtacaaagaatgaaaccaaaccgaacataccggctaagaatcaatctccttccttgttatattccttcattgagacttgactctttgattatgtctctcttgaccctttctccaagcttgctcttctacaatcgtcaggtacccgcttgtgatcaagttttcgtgctcgacaatctctctccacagatcttccactttcccctcttgccaatgaagctgacaatttccggccggaagcttccgtgtcggcgatgaagatgatggcgacgacggtgaagatgtggaatttgatcgggcgaccttgtgaagcgatgtcgaaactgtacccaagagagaggcatcttgagtggtcgatggaaccgtccaaaatactcgtttgacaccatactggagcatcagatgaatacaccgccagcacggttttgcgctcaaacattcgcccaagttgttccaccgaccgacgtacaccgtcgtgttcgagagttttgtgagtgcatcagtgtagcatcgttttcggtgatgatgaaggtgcttgacttgaggcagatgcttcaagttcgctgccgttgagaagcagggagacgatacagagcccttgctatcatcaccttggcctgagtgggacacgacgggaagagtgtaagaaggaaaggcgaacaatggagttcgtgcgttgaagtgaaggcaagatcggagggcggaagcttcggcatgcagcgacaagtttgggatagatgtgggactgattgggccttcatgagtggatctaagttggtgaacgacgttggtgttaccttcagcttcctgctcttctccttctccttttccttctctttgttctcctcatcgcacgaatgccgagaaagaacgaataagagcttacctgatggacatgttcttccctctgccgatgatcctgttgttcttcaccaccaccgctcccaaacggaacgtcatctgagataaagctgcctgttgagcacacgctttaaagaacgcgacatgtctactgttcgacgacatctcctaacgatgcgtttgggtgttgatggttgatggttgatggttgatggttgatggttgatggttgatggttgatggttgatggttgatggttgatggttgatggttgatggttgtatcgggttgtgagagagcggaaaaaagactacaag

SEQ ID NO: 535 - DNA, 12467 bp, Xanthophyllomyces dendrorhous
  misc_feature (7195)..(7204): n is a, c, g, or t
gttgtgtaaacatcgactacaaaattttgtaatagatatcgttcataatcctaatgtgatgatcggtgactaaccacaaattttgcaatcctcttcttctttcctcgctctccgttctctatcaactcttcccatccatcatctcctttcgttcgctttctttaggttataatatacaggatgaggaagcagttggattcaaggatcccagcgttgatcacaaacaatgtggcttcgaaccataggtcgttctttgttctcgtcggtgacaaaggaagggatcaggtcgtcaacctccacttcttactttcacagaccagagtgtctgcccgacccaatgttctttggtgttacaagaaggacctcggcttcaccaggtatgtgtggtcgtgcatataatatctttgtttttagaaggcgcaagataccccgatttgttaatcctttaacccgcggtttctccacagtcaccgaaagaaacgggaggcaaagatcaagcgagacgtgaagcgaggtatccgagaggctaatgagcaatccccgttcgagctctttgttggagtgacggacatcagatatacctactacaaagattcagccaaaatccttggtcagacattcggtatgcttgttctccaggatttcgaggctgtcactcctaatttgctcgctaggacggtcgagacggtcgagggtggaggaattgttgtgcttcttctgagaactatgagcagtcttcagcagctgtacacaatgtctatggcaagtctctcgcgagcttctctgtcgattcatcgtcaagcctctctctctcgttcaatatgtgctaacccgtctctcgatgttgattgatatacaggacgtccacgctcgataccgaacagcttcccacaacgcgatcaccgctagattcaacgaacgattcatcctttctcttggctcgtgcgacgactgtctcgttctcgacgacgagctgaacgtgttgccgatctcaaaaggaaaggacatcgttcctaacgcagctgccaagggaaagcttggaggaaaggaaggtacggccgagggcagagagttgaggacgttgaaggacagcttggacgagacaaagattgtaggcgacctcgtcaagttaacaaggacggtcgatcaggcaagtgttttcatctttttacaccttggacttgtttgtgtgacataaaaactcaacatatagaatgctttctttacctcgcaaataggccaaagcaattctcaccttcctcgatgccattaccaccaagactctttccactaccgtcaccttgaccgctcctcgaggtcgaggaaagtccgctgcgctcggcctgagcatagccgcctctctcgctcacggatactccaacatctttgttacctcaccctcgcctgaaaacttgaagactttgttcgagttcattttcaaaggactcgatgctcttggttatgaggagcaccaggattacgatattgttcagagcacaaaggccgagtggcagaaagctgtcgtcagggtcaatgtcttcaaaggtcacaggcaaactatccaggtcggtcctcctttctcaatgctttactcgatgcttttttctgtgttctctgcgcgggtgactgatattattttgagtgtgtttacagtacattcaacctcaagatgctcacgtgcttggtcaggccgagttgctcattatcgatgaggctgctgctattcccttgccgcttgtgcgaaacctaatcggaccttacctgatcttcatggcctccacaatcaacggatacgaaggaaccggtcgatctctctccctcaagcttgttaaacaacttcgagaggccaccacggcctctggtccttccaactcgtctgccatcgaggacgccaaggcgacgacatctttgaaacccgaaggttcttcgggcgcgactttgactcgatcgctcaaggagatcaagctggaggaacccatcagatactctcacggagacaaggtcgaaaaatggctcaacacgttactttgcttggacgcttcgatcgtgtcgaagcacaacttggtcggttacccccacccatcgaaatgtcagttgtatcacgtttcgagagacactctgttctcattccatccggcttcagagctgttccttcagaggatgatggcgctgtatgtgtcgtcccactacaaaaactcgccgaatgatctccagttgatgagtgatgctcctgcgcatgagttgttcgttctccttcccccgattggagagaacgaaaacaccttaccggaaccgttggtggtcgttcaagttgctatggaaggaaggatctcgaaggaggtcatcatgacctcgctcagtcaaggtcttcgaagtggaggtgatctcatcccttggttgatggctcagcagttccaagacgatgactttgcgatgctctctggagctcgtgtcgttcgaattgccacccacccggattactccggtaaaggatacggtgcccgagcgttagaagaattatccgccttctacagcggagagttgtctaatctggatgaccttcccgagacgaacgaggatgacgtgatggatcgtggattcaacgaggaagccgatctgttgacggagaacgtatccgttcgatcaccaaacaggatgcctcctctccttcaacggttgtccgaacgacgacctcctcagcttgactatatcggtgtttcttacggtctgacttctcaattactccgattctggaagaaggccggttacgtcccgctttatttgaggcagacgcccaacgagttgacaggtgaacactcgtgtgttatgctgaagacattgggtgagggttcaggtgttggaaaagacgaggaaggttggctaggtgcttttgctgctggtatgtctctgctttctttgctcctttgttccaacacgtttctgtcctaaagcgcgttcgttttcttcgaatggggataatcaagatttccgaaagaggttcttgtcgttactgtcatataaattccgagagtttaacgtttccacctcgatgagcatcattgaagccgcctctgccggtgccaagcgggacgagtctcatcgtgagtttcatcgtttggttttgattgacgcttccatgtacccaccttttttctttttttcttttttcttttttttcttccaaatttcagtcctggctcctagcgagcttccgcttcatttgactccgttcgatatcaaacggttggagtcctacgcaaacaacactctcgactaccacgtcatcctcgatctcctacccaccctcgccacgttcttctttgaccgaaagctcgagcgagaactcaccttgagtcctacccaagcaagcattctcctcggtctcggtctccaacggaagagcatcgaggaggtcgctgtggagctaccggctggtggacttcccgtcaaccaggcactagccctgttcatcaagtctattcgaaaactatcgtcgaaccttcagacgcttcagaaaaagtcgatcgagtcgacactcgctcctgaacgatctgctgccgaagttttcaactcaatctcgagctctaccaacggaggaaaagagaaggcaaaaggagcgaccgactggaagcctatcgagatgagtgtggaggatgagctaaaggaggcaggtactgaggaagagaggaaactaagggagatgaaaagagagatgatcaactctcttgatttgaaacagtgcgttcttcttttttctaaaaaaaactttattttccccttgtgttctgcgttctgtctttgcaccatcgcaacttgcctgactgaccaacacagtctccaacccgaaccccgttctccatctctaccctgtttgtccactctgtccatctgcccttccccttccacgtccactcctactcccgccatcatcactacttcggcctccaccgatcttgacgaaacagatacgagatcgactctacggaaacagactggaccgccgcccaagctcacgtagacgctttgacgtctcaagcaaacgagcctgggaaaggtcggtcgttatcgaccgttgtcagtgtgaaatcgacgaatcctgctcctggcgctggctcggctgatggaaaccagaactcgaacggaaagtcaggtggggacaaaaagaggaaggctgatgatatcggtggtgggaagaagaagaagaaggtcggagggaaaaagtagaatcggtctttgtgtgcctctttctcttttttttttctcttgtatttatccatgcgactctttgtctcctgagttgtcttcaactttgtctctcgcatgatgagagcatgagccgaggacatgaaaacaaaacggaagacgatcttcctcattcttattcgaccttccactctttcgggatccctaaacccaacccgtctgtgctacccagaccagctaatgaacctgtggtattatcctcttctcccggcagtaaaagttctgctgcccagatggaaagaaagagcgtgatggatgccctggggttatcacaaaagaaaagaaagagaaaaggataaagaacaaagggatttccataagaaaggatgttagatacaacaggttatacttcagagacgatggtaataaaacagcgtaccatctccactgagcttgggaatgatcaagaagtaacaagtgagtatacaccgcaatcatgatccctcttctatacgacaacaggacgcttgtgattttggccgactgtgaatgcccaagaaggggaggaccagatgagttttgacatgtgagagtgaatgaatgaaaaaaagagcacagaaaaggaaaggttgaaaagaagatataaagggacaaacaggagcttcgtcattttcttttctctctcttctccttctccgacttgcttcctgaccaatactgattttgttctcccttttctctctcctctctgcctcatcatcgactgcaccttctgctggactcggcccaggtgccgaactcgactcgtcttcatcttcgctcggagttaacgatccaatcgatgctgttctgggtgaaggagagtaactcccgatctgtcgacggatgaagaggatgatccgggaggccacgtggagtactgtcagtctgtaaatcagggcgattacttttgtgttttcgtgaaagagtacaatgaatgtcagttgtcttgggaaagaaaatcttggttgaggcagtatgagacagattgacgtacagagtggaagagggagcgtgtcgagcctattcaccctcaaatgacaaggagattgtgtcgtaccaagcccaggtcaggagaagagtaacaaagaaggaagagagagaaaaaaagggcagactaaaagaaagaaaaaaacgaaagtagaataaacgcttcactgacaatccacgaacgacctctccgactccgccgacagagaacctgacgagctctccgaggtcggtgacgtgtcttcctctgccttttctctctttggcacttcctgattcgtatgctcctagtccaatatcttctccagccggtctagaccatccgccttcctcttccaacagccagacgctccaggctacgtaggcgaggacgagcgcggactcgacgacgttcgtccgacgaagtctgaaaccgacgatagtgaggaagagtgtagtacttagaacgatgccgaggaggaacgatggatagggtgacgtggtcggaggaggagggaagctctaccacaaagaaaagacgcgcaacacagagcagaagcgaaagagtcagaaaaaggccgtcaagaaagacagaggacgagacaaactcacggtgaatagactccagatggcgacgacgtaggcgaccgagctgccaacaaggacaccaaaccctctgacctcttccccttcccgctcacccaggtcaatccaattcttgacggctctaccaagcgcctgaatgacgaggagactggcaagtccttcgaggaggacaaatacaggggaggacgatctgaggaaggacgaccagagcgttggtgctgtagatagcaggacggacaaagtcgaggacgccgatggagggtcaagatgaagcttgaatgtgaggatgagaaagagcgagggtaacgggaggagaagctgtttgagtatcggaggtagtcgtgccagtggtgtgttcttgcaagacatcctacaggaagaaacagaaggatgttttttgagcaagggatgagggagagtctgaatctatttgtatgcgctcgggtaagtaagaatctagtgtatactgacgtgagagtagagtagaatatttggtatccggtcaacatgagcgagtacagcaggaaagactcaaggcctggttgagagttggcagaaagggaatggacgatattgagtgggaaggaagtcaacgatactctgagaggacgagagagaacactgaccgagcacatcgagcaccaacggcaggccgatgactacctgggcaaaggcgatgaacctggagaacgaccggagcaggaaggccatctctctggatgccgttgaggttgagtgctggacgatggaagactgatctagctggggagacggaggagatgtcgagcccaggcgggatatatgaatagatggggcttaggtagatgttgcttaaggggtcttatgtgactggcggtttatttgaatatgtgagaattgaccaagacagtcttaagcaatgtttacttaagtatatatgaatgtcatgtatcgctacttatgtgttcatgtataccgggcaattacggcgatttgccttttatttgaatgatgagcaaacaatcaaataagatatacccctactgtggccgtaggggtttcataccatgctccagtgggtacgggtgggatgaacacgcagacacggacagaggggatacacagatatatgcaaacagagcgatcaagactgatagatcacatgtatacagcatgtcaggagtgttgttccatgctttatgccattttctttgagagagtcttgctggcttggttccaacagatggtcgacggatgggctggacccaggttgaagctaccagggttgctcgaccgggtgtggccatgaacgagaagagcgcaagcggtctcaaggaaagcgagagaacactataggatgttgtgaatgaagcacaacacacacacacacacacacacnnnnnnnnnnacacatacaaaagaaacagcgtctgattgctgtatccgtccatgttaatggaccgattaggaatcgtttgtaattaaaatgatgaaaaagaggattcgaggtcgacgaccgaaatgagttgaaatgtcaccatcggcagacgacagcctcccagagcaaccatcaaaggatctggtgcattcttctctctctctctttttccctcgagcttcatctctccactcaaagtaggacagatcggtccatctttttggtttcctgtcggtggtctattcaaaatcacacaaaagacagagcgttgatctctatcgcaaggcccatgtcgttccaaacaccgtcagatcgttcgctagaccctttctgccaaccgcctccgtctcagccggtagcctcgtcgtcatcttctcatccggcctttagctatccgtctgcatcgtcttctgctactccgtcgtcgtcgtcctcctcctcgaccgcgttctttcccggcggtctttccaaagagttctttccgtccagaccagaggaggacgcagccggacttcgtatcttgggtactggaatggaaggcagggtgccttatcctgcccaatggagttcagagggtttgtctttctgttcttcacggctttcttgctttctttctttccttctttctctctttccttctttctctctttccttccctgctttctctcacagcttgagctgattgaaaatccattggactctcttccgtaaggatcggccgaaagatcgaaaggtcctctcctcaacgccctcaacggcctcctacgatcctcgacgtccggtccaattcttgaaattgcctctggtttcggaatacacgtcgaggttagccagtcgattctgttatctttccttgttgctcttcttccctcccccttttttttcttgctcatcccttcgacactttgactctggctctcatctcattcacacttcggtcggcctcgcacgtgcaccccgaccaaaccactccagcactttgcatcggcccatccgacactagagttccaaccgaccgaatgtgatccctatctcgtatccgaaattgatagagaccttcaaggaaccccgaatgtgagaaaggccaagttgctcgacgtgctgaaccggtttgattggaaggcactcaaggtgaatcgctcaaaggatggcttatcaggcgaggtcgttttcagcggagtcgtcattggtgggtcctcggcagcttttctccttgagcactgttctgtttgccctctttctcacgtcctgtctttcaccatatctccctacgcgctaccagagaacctccttcacgtagcaccaccggaatgtacgaccgcgatcttccaggcattaagtccggcctcgccgttaagtctactcgacaaacaccaaggttggatcgcgatctatggtgctttcgtcgaggacggtcaatacctaggcgagaatgatcgagctgtatgtcctttcgtgttttcttttctttttcttttcttctttcggcctttgcctttgctcacttggactatgttgcttcttgctatttctattcaaagtttgacgcacacatcaaatctcagtcgccatactttggactccgagatatcgcccggtttgtcctgccggaagcagaacggaatggctttctcctggtcgagagattatccatgcctagaggaaacacccttctgctcttcaagcctaacggtaacgggagcatgaactcgagtttgtcaaatacccaggttgagagttcaagtgggaaggaccacgtcacggatgggaaggttgatagacatataccgtccatatgatgaaaacacccgttctcttcttcaattcttttttttttttccacacatgtctctctctgtctctgacttttcaaatttcgtcaccaggtgcacaagaggacacatgagagccacccattgaatcgaatgcaaatacgcggaaagaccaaaaggatcacacaaccaggaggtcgacgagagaatgttcagactcttgtagatcagcctcgatccattcgaccgccttgtccttccgcttctcgtctcctccactctcttcgctcttttgtcttatcctctctttggtttttatttcgttttcgggaacgatcacagaaccggaggtttaacgtcagatcatggtcgtgcctaaacaaggagaagatgagcgaaacgaagagaggagaacactcagcgcaccctttgacttttccccaaccacccagagggacgaccatcgcgctacaattatctcttgatccacagtcttctgcgaaactgacgatcgatctagcggctgctacaggcgtcggtgctgttctcgccacgtcagagatctcctggtcggtcgcctgagatgaaatcccatctctttttttgtcgatcagcatttcgatggcagaaagcatcaaaggggcgaaggaggaaacaagtcagtactccaggatgtcaacatgtcggttcgcaaagccagatagagtcggaacggacgagatcaagattagataactataatcttggcctaaagagtagagttcaagagtcgatagagtaaatcagaactggattcatatggaaagagaaaagtttcgaatagaacgaaccgtttatcgtccgacttgttatctgcggttcgcctaagaagaaaattcaaacaaatatgaaaaaagacaacatcttcagctcccttgaccaggtaagaagcgaggctaggaagagtggcaacgaaactggtgacaccggtcgatttccatcttccatccccgaatgctctagtgttctccaaaacgcccataaacctagattccccaaatgcatcggcaacgctccccacgttctttcccatctttctcaaccggccgtcttcgactcgggcatccgcatggtgtttttctgtcagcgctcggcacaagccgtctgtgaagaagcgagacaaacgtatcatgagacattgagcctgtaaagcctgtaagcgagatagacacaagaaaagagaccggcactaaccagactttcgggtcaggagaatctttgtatcgcccacgtgagcgatcgtgatgtttaacctctttgcttggaagaaggggctcgatgggttatctagtgaatgaaggagggcgcaggagccggttgatccttggttggctgaagataatgtggtcaagattcgacggtcagccttgaggtcgggtggaaagcaaaacagtcgatcgagtaagcagatataattttcagcacggcatcggaaaagaatttaaatggtgtttactcgaaggtatgctagcgtcagtcgttcggctagcgtcatcaacggtggtgatggtgatgccttgcctgctagcgaatatcgactggacaacaagcctgaggaatcccaggtccagcgtggaaaaaaaaaccctggattatcagcccatgtgttctcctcatcgtcttggtcgaccgagcgtcaagccatgagaagaaagaaacatgcttgatagaagacagacgtacctccattgaaccttcgaaagtatccaccaaggctctgcatatactcaaccactccgttgacatcatcccccttcgtagattccacatagtctgccatgtgttcactcagccaggcgcttacgtccttcccgccatgaccatcgaatattcccaagagagccaactctgaggctgtaggtgatgtaggttcccatcctcttgctccttcgccggtgtcttgaccccaaaactcgacaccttcgccgaggctgctaccgggctgcttccgagatttgcctgtccctccgtccagtcggagagagtatttgagttcttccggtttgatctgaacggccgatgcgagcaaggcatcttcctgatagggtcttgttccacgggattggtatgaaccaaccagtttcggaagtgaatatttgattttgtttcctgggttggacaagtgaatgaagtttggaaagtgagaacgtattatctacatgatgcatgtcatggaaactcctttatcatcttatttcatcacagcataaaaatggctgaggaagatgaagacggacctgcaggcgagacacctctcacataatctgagacagaccgtttggctggctgacccaataagatctcactaaaagacgtctgacgcaataaggttctacgagcttgaattgaaacacatgttggacatgaagctgacaccgaggaaagtggcatgcaaacaaagagagatggagagtcgaggagaaggaagaacaagcaacgagatggggtgtgtctggtagagaaagtgatggttcctcttaatcttcccccaaggcgttctctcccgtttcatctaacgtcatcgtccgtcagaagactttgatggattctttcaaagggagatgcacgagagccaacgacattgtatatcccgttcttttgatcgttcgtctcactgatatcgactagacacccagtcggaaggatctcaacgtttttaagcagccatcagtgtacatctagaccgctacacaccatggtgtttcggtcaacaaaccgcctcggaaataattccaaattctgcctttcgattcgtcaaaaaaacaaaaaaacaaaaagcgcgaactaggactcatgacttgacattcgattcgatctgtatctctcaaacgacatgcacaccaacaacttgacccagacgatgtatgggaagaaggaaaaaaaaatagggtggaacaaaaaaaacttgccaaggcccgtctcgatcaggcgacctccgggttatgagcccggcgcgcttccactgcgctacttggcaggctgacgaccatgaacttttggttgtatataaggatatcatgattctcaccctcatcgtttgcatccagctaataatcaattctagctatacatcattcacaggactcatgggataaacagcatgcctcctttccatcgactctttcctaacctatccctctcccaaaccccttcaccccgctcttcaaactccaacatcagcccgtatttaccctcttgtaggttcgtccattctagccagactccgggtcctatactacccagatgagcttggcctcctccctttcgtgtgggttcaccgaacgcatcgagaacgtctagcgcgttcgtcgtagagctcagaggatggggaagtatttgttgcggtgtagatacgtaggtcgggttccgggatgtcgtctttgtaggtactgacgaacgaggcggtgggttatatatatcta

SEQ ID NO: 536 - DNA, 2229 bp, Xanthophyllomyces dendrorhous
gggttatatatatctatctgggagaggactgaagctccagttggcttgggaggtgtgaacgagagggaaagaccgagggtatgatacgctagatatgttgtgtcggctgtatgcaaacggtcaaagtagccaaataagcagaggatagaccagtctgtgaacaatcaaaggagacgtacgatacacctgaacaactggctcgggcacttcatccagaccagccagtcctgtagccttctgaatgagatccttgatctgagaatcttcaggtatgagtccgagtagcttgaaaaggtctatctctagaaggaaaaggaaagaatattgacaaagaaaggttcgattgccgattaattctcagatacgctcaatatcaaccgactcaatatttccaactgaccagctgatcggagtgtctcgattgaagctgcgctcgagagtaatgatgccatggtggtgatggtggcagttctggtctagaaggtaaaggacacgtaaaggagaaaaaagtagcatgggatcgccttatctaatctgttggtcacgtgatgtgacccatttggtcccggctcgaaaaagtgctttttcttctccttacagtcttcttcttcctgtttttcatcaaagaagataccatcagcacaaagagacaatattgcttcagcgtaataggcgggctgtaataaatatgagcttttcttccgaaacaaaacctgtagtggtctatcttggacctgaaggcacgttttctcatcaagtacgtatgtcctcggacggatacttttctctctttttgtgatggcgagggctgacaaaatgagctcggaaattgcttaggttgctagagatagattcggatcatccgccgaatacaagccgtgtgctacgatctctggttcgtctgtttttcaactctagtaagcatcatcttcatactggccatcattgacgatcttttcttctcctcattcttcctagatcagatgtctataactatcgcccatccgactctcaaacgaccgttcttcatctgattcctctaaaaaactcaacccatggcgctgttagagaaaccctcgagttactttgtgacgagaaaaagctccgacaagatctggcggtcagggaagaattcaagttgtccgtcaaacactgcttgatcgtcgcaaaggggaatgagaacaaggatctgaaggaattcaaatgggtgagaagtcatgagcaggtaagtgatgtttagaattccttgttcttttccggcatctcatgtccgccacgcaagggaaatacacgcagatgctgacgattttgtttaatatcatacggaaacaggcattaggtcaatgtcaaaagttcctatcggacaacatgtccgaagcgagacgactgccaacttcatcgaccgctttagcagcggtctcattactaccaaatttgccttcagatatgtctccggaggatgcgcttgagcaggaggacggcctaggagcggcgatttcttcgagaacggtcgcagaactatatgatggccttgctgtttggaaggaaggtatcgaagataagaagggtcagtccttctttgcgcgctagaaagccaacgcccatctcaccttcttcttgaccactgctgaacatgcgacctgtctgtcttatttcccttaggtaacaccacacactttcttctcctttcgtcaccctcggtgactgtgccagccaaacaaggcccggatgaagacaagccccgacaaaagatgcatcatggtcttctctacttctcttcggtggacaagatgtctaactttggacctttgcaacaaagtgacccagatgtccctgggcctgggccaagaccgattctgatcgaacatttccagaccgaagggtctgatgagatgaggttactggcgatgtttgaagttgggctgatcgataatccgtgggagttgggcgtggtcgaagaggggattagatgccttggaatgtgggagtatgagaatgaagagttggatgggttgatcagaatgtagagttgaggaaaagtagaaacgatctggaagtcgccgtgtatctttttccatgtatctataggtcggttggctcagagaggtagggataggaagagagaagtttgttctctctcactcatgttatagatatcatgtcaaccattgaacagacttttcactcagggcttcctaagtgcgcttgtgtgtgtgtgtgtgtgtgtgt

SEQ ID NO: 537 - DNA, 1876 bp, Xanthophyllomyces dendrorhous
aacaagacaaaccgaagaaacgaaaagaaaaaccaagaaaaagaacaagaacaagaacaaaaaaggaacgtcgaaaacgcggcaagacgtcccggaaaaggaaatggaaaaggaaaagaagataatggggaaggaaactaatcttttcgaacgaggaaaagtaagagtggccggacgagaggatcccaaagagtacgtgcgtaacactcctctcctctcctcccctttcctttccttctctctcgaacgcctaaccttgtgaatgagaatatgatcatggtcttttctttcttcgtgcgtctgtgtcctcacggacggaacgaggcattcgactcgggggggatggatgtgtgtgtgtgtgtgtgtgtgtgtgtgtctttttctttcgagaggatcaagtcaaacagactgagaagaaagatctcgctttgagaaatagaacgtcgtctctctctctctccccaacttggtttctcagaaatctgtgcgtgcgtggatgtgtgcgccgatcgatggggctcacgtcatgtagttgacgctctaaatctctaagagtcgaccgggtctggcctgagactttgtccgttcgttcacagagcttcatactgtgctacgagcctttcccccccttttttttctcctgccgatgagaacaagagaacacaggtaacgagcagagggaggaaggaaagaaggaaggaagagacggggtttttttttcttataaaggaaaaaaaaagggaaaagaaacaagaaagtacagattcattagataaagctcttggaccattgcgctcgtttctccccttcgacgaaatctaatttcccttttgagctcgaagggggtggcgatgtcgacgaaggagagtttgatattattgatgatgatgatgatgatgatgatgatggtgatggtgatgatggtgatgatgttgtcgtgtttggtgttggattagtgatggaagatgtagatgcgctaggagcggtgttgacgttgaattcttttttgactggaatggagaacgacagagatgtcagccggcgtttacgaaagagagcgggtcgtactgcatggggaaacccaacgctcaaagacagagtggaagaaaggacgaacgttgatcccatgctctctgttctcttgcttcttgttgctgttggaggtccaccagggcggaacgttcaacgaccgaaccgaacgacaaataaacaagcaaacaaacaaacaaagagtcaagtgctaagtggcaagtacttgtgaggcatgacctccgaagggaagtcaaaggaaaggaaaggaaaggactcgtgcttacctcgacagaatcggttccaccgaaccatctctgcaggaacggtttggcgttcaactcttgttgttccctcttgatccgttggtccatcgtttcggcgtagtccttctgggccttccgttctctcaggccggcgaggacgaggactctgtcgacgtcgacgtcgtccttcccggccttcagctcgcccaccaggctttctaacgctcggatctgtctgtccgccttggcgagctcgagggtggatcgcttccgtttgtcgtacgaccagccggcgatcgaggacgcaaacagccaagggatcaagatcgaccggacttgtttcagtcgttgtccgatcgagggacctttgagagagccggacgatggtaggacgcctctcgggatatagatgaatggtagtttcgacgcttgagacatgctggctcgtctccgggggggcaggaggggttcttacttcttcagacaagagtggaggaaagggaaagcagggtcgaacgatttcaaagaccaagtcaaagatgagcttggggtcgtagtctcaagaaaagagagagagagag

SEQ ID NO: 538 - DNA, 83202 bp, Xanthophyllomyces dendrorhous
tgtgtgtgtgtgtgtgtgtgtgttcgtcgtcttttgactgttgagcggtaaactgtgcaagtttaaagtcggatagggttacgattggaaattggctgaagcatgttgagtgatttgtctatgtgtcttgttcatcctttcctcgtccttcctctcgtttgcttccttgtttagcctcttcgagagtgacgacaacgaggtctcactcaactttgggtcgaccagcgtgttcttctgcctttgatcaccatgtctcaccttatcatgcgaataagtggtgaaagacacattgatgatatacccaagaatgtctcttttgccttcacaccttcacaccttcacaccctcataccttcacaccttcgtttcttctcgttatccattcctcgtcattgaagcctttcggttgtgttgcacctcttaagaaaaccaaatcagcaaacacggaccatgctatctctcagatctaacttgattcattctctacctaccttcgttctcgtcctctctcttctcttcctcatcggttcaacaccggcagtagcatcatcatcaatcgttccagctccaacacaaaccattccggactatgaacctacagtacaatctatgcacagacgaacggaagagcaaccaagaagaatcgtgaaaaagtctacatgcccagtgaccacggcggggccaactagcacattggctactgtatatgtcacacataccaacacggtctataccactgtatcgtcttgggtctaagaggcgtcgacagaacgccgacgaagagcaggaagggttcttcatcaatttcacaaggctgttggctgagcttagtccgttgtaagtctcctcttaagcgtataccttactttgccgatcgatgccgtctactctcaaccaaactcgaagactaacccttgaattcttctcgacgttctgaacagaacacctgccgctctgtaccaaaaaccgattcatctttttagccatgtcccaaactatcttccttaatcattcttatgccccaagttctttctataatgtcttaatccatgtatgtgataccctcaagatgcgttgtctgttcgggaaaagtcgcgcagcaaccagattagataagatcgggaattccccattacctccatctttgattgtgttcctgtgagaaaccccaacgaaaaaacaactgaaacctttaaagagagtttctttctttcctcaatccttcatcagcatttatctcctctctcgtttgttcgtgtattccatctcttttttcccagcacgttgatattcagatgttggtcgacccttatcgctcctccatgcggggttcaatcgttcgttctttcagttttcccatctcatctcattcttgtttttttttctcctcttctttcgacctagctcacccagtttaattttcagcccaccgacagacctaccgttctcgtctactcaggtcctggcgcatctcctatctgtatttctcagacggttcgaactctccgagcgattctctcaccaacatacaccgtagattgcatccttccatctgttctcctctccaccagatggtatacaaactgtgcactcctcatcatgccaggtggcagagatctgccttatcaggctagtctgggtactgaaggaaacgacattatcaagcgtttcgtcagttcaggcggtgcgtatttgggattgtgtgccggaggttattatggtgcggccgagtgtaagttcatggttggagacccagatgaagagattgtcggaccaagagagctggctttctggccgacagcctgctggggacctgtgttcgatgggtttgactactacagcgaacgaggctctaaggtcgtcgccatcgagatggacgatgtcaacagtgtgttgttagaggatggcgactactctggagcaagcgtggcaaggatgtactacaatggaggaggcgctttcgagctcgctccagagcaagccgaaaatgccaagatcatagccaggttctcagatcatcccgacgccccaccagccatcgtgttcaataaagtcgatgacggaaaggtcgtccttattgggtttcatccagagttctctttgttgaacgaaccgcttgcaggattgttggagagactgcctgtttccgaggcacccagtcccgaggatgtctaccaagccgagggagagaggatcaggctgatgaggaacatgatgggtttgctcggtttgaaaacttctacccaaacaaaaagaaacgtattcagacataaattggccggatcatccaacatgagttctcgatcgaattcgccttctcatcaaggatttcctcgagtgctagtctctaatccggatcggtcaatcgacattgcggctgagattgagcagaggttttcttcatcactacctaggcggtcggcacctttgcccagtattgctactgaaaccaaggattcatgtagcccgaccatcctggttgatgccgttgatacattccgtcttcacactctttctcctacaaatactgcggaggcgatacaacccatcttatcttctgcatccgatgatcaatccggaggcgagaatcttgctaaggacatttggatagtgagtgttgacgcggatgagaaacaagatagctcatggaattggcttggatactggaatgagctggaccggttggccgaatggaaagagaacagagagattgacggaatttcaaggatgggagatatcgtcatgggagagaatgaacttatggtgggagatgattggacttggttggaaaagtgcgtattgggaaactgtatctttcttttctcattagataagaactggacgttgatatccatcttagtttgttcttctacctgctcctgtcccttttggtatcactcctcttggtgattttcttcatcctctgatcgactgcatccagaaatccgagatttctgcactctctacctactcccctagtgcatctctccatacctgccctcaaccccacgaccagcatgaaattccctttacgtgcacctacaccaacccttcgattttcactcgttcttaaactccccagctctcttgcgcgaagagtcgtgtttgtacagtacttgatggccttggccctatgcgaggttttggatcctttgagttctcgaaaagaagccgagagcattcttttgggaatcaggtggccaggagacgtggtcagtgctcgaaaaaccgatacggtttaccaaagacagagagtagacaaagtagggggtgtagaggtgacatcaagctatagaagtggagagttcaaggttaaaatcagtgagtctctaatcaatctgcttatgaacaagtgttcgattttgctttgactgggaaagatgctaactccaggcttcacgccaaattcttctagactgtcaacttgatcttgtaccaagcatacctttcctttctctggagcctcatctgatactcccccggatcctgtctcatttttcaactctctggaagactttccttctcccctctcccattcacggcgggttcatctcatttctggacagataccacacccgatggaccgatcgaagcgcattggccacgttgcgttcagctgaccttcttacgtcttattctctccaatcaaatcatggatggggcgcggcttcgcgtggaaaggaagttaaagtacaggcggttgggatctcgttaaacggtggtacactgaggttgagaaagatctctgtgtcaaagggggcagttccggccgatcagcttgcggacttggagttaaacggaacggatggatggagaagagaaggaggaggagaggtgatggatcttcagcctggtggagatacttatgtgagtcaatgctttcgattcaagaccgttgttttgacagatcaaccttgactgatacgaaagttcttctgcaacttcttagacattggtgtttgacgaagaacctcgtcataatttgtagaaatatctagtgcatttttttcctcactcgttttcgtttttctttgtttacttggcttcgcatcccttttctgtacgttctcgatactcatgagagaacgcttagcataacagagtgtatctgcacaatctagatgaacgtacaatagtctctggatgataaagatttacagaatatatatagaaaacacaccaggagaacaaccggcacagacagatcgaaaagtaaaacaaaatgatattaaaagagtttttaaaggaagaaagatcaaaccacatcatcccaaccaccattgctcaatcgataagcagcttcactttcggccacatccggagaatcaaccactttgcagattcctgttttgtacaaaaagcgcaaatcaagagctcaaaactcagatttccattcgttcaggaatggttgcattcgaaagaggatgacttacgttcttcgctgtcacatcaacagcgcatgttcaacatgcgatgacacaaagatcgacatcatggttagaaaacttctcaacagtcagaaccagatttataggaatatatctcacgctcggccttttcggagatgtagcctagtagctgaagcatgtgccagcacatgtcctcccacaggctgttaagtgcgtggtgagagtgaagagacagttaattactgatcatcacgcgtggcattttgagttggaaagaatagattagaaatgggcaattcactttggctgaagatgcactggcgaacataagttgtgcgcctgggtcactctggacttggtctacccatgtttggaaataaaggcgaaaacacgtcagaagaaggctgcgaggtgagtaagtcataaaacacccatacttgtcatgaggatggcaatgttgaattcctgagtagacaaggagaaaatagtcacacgtttcctggtcagatgttcgtcgcaatgatcttgagaaagatgtacagagactcacttcagagagcttactaagcctagaaagcatctggttcaacttttgttggcgctcgcttagctcccctcgaccagagtagtcctgacggaacaaattgatgatagagtcgatctatgcatcatgagaaaagatcaagaagctcaatacatacattgagacgatcgcgacaaaaagacagcgcagaaagcaaattcgtactatgagcagtttatatgttccgtcgtctccgaatctggtttcaatcgaaaggcttaagtatacatgcacttgatttctcgattttatggtccgagatagagaaaacggacctcaaagccaactcgttgatcaactcaagctgctgctctgaattgtacgctcgggcgtactacagtacgagtcagtagaagtaagtctatgttctaaaaaagaaagtttatttacagtgatatctgcgcaaagaaattgagagcaaggaaacccaaatctgaataaatatatgcggtcaaagtttctctagatatgttgattttacgtactgtcgcaagctagtttcccatctactccagcgcgctcagctatagcctgcatctcgacaatttgatatcagcaagacggaagaagactttgagtctgatgatacacatacataccttaattctatctgctctgaaggtaccttcggtatctaggtaagctgcttctatagaacagatatgttggtaaagagaaaatgtcaggaccgaaacaagcacaagaacatatctcgcacttactgccacctccaccccccatctcgacaggtaattgggtcatcacactgttttattattattttgtttaattgaaatatcagttgtgcagagaggctggtttcaaggcttcagaataagatggggacctattcataccaaagtgtgtgtgccaattgcgctgatgaagagcattttggtaagctaatggaacgagcagaaattagattcttcgaagacttacttttccctgttctgaattcgcctgagacattcaatacaatgttgtatcaggtcagtcttctgtcgtcatagttcatagtcaggagtcgagcctaccatagacctcagtcacagattgagtagaaataccaccacctagcatctatgatcatggtatctcgagcttcagcaggatgtctagcgcaaagtgacaaggtgagataatcgaagatgactcactgcatcgacagctttactgcctgtactgatcatcacagcagattctcttcgagtggaaacttcagttgctgtcatgatagccgatggcttttgtttgaatgtgcgcgcggttgtacacgggacaattgagtcgatgatcagtaccagttacgggtatatgcgcatctgaaaatgtgtttagtcttaccaaaagcttcaacgccacatccttgatagagagttcataaggttcatttgatgtcgttcagcgagaaacaacaatcgaaatagaacatcagacgactcacctttagcttctcaactttagcctccgaaagaccctatacggagtcgatcggattcgaacatcagcttgactcaatgacgaagagaaccaaataaacaatgaagagaacgaaacaaacaacacatactttgatcttcagcatcgttcgtcgtggtgtcatctggacactttgaattgtagtcattccagctgctttgagtttagagatgtcttgggcattgattcccttttcgcatcaatcgaattcaggttagtcaccgataacatgcagtacttcgctacgcatactctagtcaagacactaacatgggctctgtttgagtttcagaacaaagagatgatggaagtatatgcaggttagcgtatagcagaactgtgaaggcgaatgtgaatccactgactgcatgtcatcaatatgggcaaagaaaagttgctccttcagtcgatacaagaaaggaagcccgtcagttcgtgcaatcaattttgggtatgtccagcgagacctacatcgtcttcgttgtcggacatagctagaattttattattattattatcttgagtgggagtggatcgatgatagaaggtgatggcaagaagtaaaagatttatcaaaggctttatatagtgtctgaatttctactgacagaacagaaagcctgacaggttttttttccattgttcacagtctcatcagaagcaccgtcagagaacacactccttcttcggcttgttaggatatgtattaagttttctcaagcatagcaactttcaggccacttttatcttgtataaaagacatcatcagatacagaaaaacagaaaagacttgagagatacagatagaatacaacccatctcaaagtcaaagtccaaggtctttggtcaagactattccataagcctgtcggcgcagaaaaaaggaatcgtcagtttgaattacaaaatcgaggacatgtgaatgcgtgcgacttacaatgttcaacaaacgagcatcaacggcaaatcccttcttatcataatccagaaggacgtcatacaacttggagagctcaaccactctttgaacgatgtgttctccctgaaggtatttttttaaaatgacaaacagcatgagcgcaacattctacatgcatctgcatgaaggtgtacgaacaggttcgagattggcctttgggggctcaatctttccctcaggcaagaaaacatcaatcgtgacgaggtgcatgttggcattggtcatacctatgagattctccaaccgatatgggtagtgattcaataaaagaactagaggtagaagatcggcatatgaaaaagacaaacctgggtcggagacaatcacaggtgaaattgtcctaactttggcctcgcccgcgttttcttctggcttcgcgtcctttttgaacgacttgccgtatccagtctcttcgttcaactctctcaatgcagtcattctgagtatgaatgtcagcagccagaatgtaagaaagtatgttgacttgagtgtacatgcagaatctcgacatacgatgaatcttcgttgggatcgatcaatccggcagggagctcgatgacgatcttgtcgatgggtgggcggctatagaggagaaatacattagaaagcgttaaggatgtatgcttagtgttctataggtagatatgtatgcatactattgctcgatgatcaccgtcgaaagaggccgagaagggtgatgaaggatggcgagcatagcaaccgctggatgacgaaacgaatgtgacctctatgatcagctcccatagagcatcagattcgcctgaaccgttctcactcacagtctactccagattcattcctggtcttccgacaagccatctcccactttcgattgttcccatcctgatcggtatactcgatatgttcaagcttgatgaacttggtatcctccaagtttgcaggcgaggtctttgtgacatgagctttctgagggccggtcgaggacatggtctgatgaaacagttgttgtcgtctgtatgtcaaggtgtttgcctttgaaaggtattgtctagtgcgttgaagagaaagtcgagagaacatgtagatggtctgttctctatttaaaaggagtcgctcgtcctcttccgatccaggaacctcacttacgtcacaaattcaggtacgccggtaagtcgcgtcggaggcacgcgttatgaacacgcgtcgtattacgtaagacacgcgttcactctccaagaaaagaaaccaacgagacgtccaaattgacttctctcacacaaaatccgttcatctcaaacactctgcaagatggaagcgttgtaagtgacaatcagtggtctggtctgagaagaacgacacgaagagggaaaaacagaaggttcttatatataatggattattgttgtacaacagaaagaagcaagcgcttgccaacccactcaattaccctcatcttaatccaaaacctaagcctcatcctcagccccaaccaagcagagctactcccgaagtcatcgagcttcctgactctgaagatgaaggaagaggttatgataggccagtttctgacgatgatgatgatgatgatgtgattgaggttcaacctaagaggatgagtctaaatgagaacgaccggtacgtttgttgctttgaggacccgtctccggagtccatacaaaactcactatatgatgtgtgtatgctaggccaatccctagagcttatactgctagacccactcagcctcaaacttttcgacagactcaacccttccgtccaggccaaccctttcgtccgagccaacctttccgtccggcgaatgtatcggctcctcggcctcaaagtacgaacccgttcttctctcagagaccaaccgcacctacattgtacaacaccgtccgccctgttccggttcatatgcctacatcctctgctcccgctcctgttcctatagcaattccaacaccaagacctttctccagacctccatacggatacatacccaacagaacgccagccgttgtccctacagacatgtttgctcacaagatgtcaatctctgagaccgctcgaaatggagccaccaacgcacggaatgctactaagcctccggtgagaaagggagatgaagaagatgagggtgaggactttgatctggatgacggaaaacgaagagaagatgattgggatgtggtcgatcctagccaagcagacaagcatatgcgagagcttttggagcaagccttgggagatgtccagggagagtttgatgtgagtaattagttactatcttttttgtgctgccaacccttggttgtagaagacaccgacatcgtggctgattgagaatgacaatgatctatatctcttgcaggagaaggactcgatcgtggaaggattcagagagggtatccaactcatgcctcatcaggttcgctcatcatcgaccagctgacagatgagtaagatgacctgtattaattaacatgaccatcactcaaataggttcaaggttgccaatggatgaaatcccgagaatcaggaagaaaatcatttggtattttagccgatgtgagtgcgcgactccgtgggcttcgaccgctcgcacttggttcacatgtttctcatctggcgctctctctctcttttttcgtttcatctaggatatgggactagggaagaccgtacagacattagctcggattgttgatggaaggccgacaaaggcgcatataaaagcgggctataagggagggactctgtgagtgatcattcattaactctagtttcgatggcaaccttatcctatctctgcgcttaatttcttcctctcgaatgaaaaggattatctgtcctctgtaagtcctctcctaattctgactctgcgctcgggtcttcagacactgatgctggaatttttatgcttctcagaccggtaatgaaacagtgggaggatgaggtcaagaaaaagacaagaagcgggttgcttaaggtgacaactcatcagggcgtaaagcgagagacaggtacgaaaaagactctttgctcatcttctgcccataaacaatcacaaagtcaagattagtcatgtcaactgatgcgccgttgttgtaatccgatggcatacgcagacgcggatcttctacagaattttgatgtagtggtatggttttttctcttagcggccactttttcttcactcaagtctactggcattttgatgagaaggcatttttaaccgtccattccaatttgaacagatcaccacgtatgatgtgattcgacaagaatacgacaaatacattgaatcactaattccagccaacgcgcgagattcgtccgactccgattcggatgacttcggaagcagtcttggaaagaagaaaggagcaaaggcaatttccaagaaagcgccgaaagggaaaaaggaagtcgtgccaaagatggcgttgttcaagatcaaatggcatcggattgtgctaggtatgtcgaatgggggtttgcttgtttcgcgatggtggccttcatatctgaattaattggtggcttttgacttttgactcccagatgaggctcagaacataaagaacagaaccactaagacgtctcagggatgtgtagctttacaaggaaagttcagatggtgtcttaccgggtacgttgatccctcaattttgagcgacccttagtcaattgatgaaatcaggatgctcattgttctgtgattgcttatgttatacagaactccaattcaggtgtgtagtcataactgtctaatacaaaagctagatgtggctaatcagtcgttctctatcctctgttctctcccttgaacgttaacgtcagaacaacgttgatgagttatacccgttgttcgctttcctgcgttgtcggccgctagatgattgggacaacttccgagaacaaatctcaaagcccgtcaagaatggtcgaacgaagtatgctatgaggaagttacatgtgagttcgcccaatatcattagttttttaaatgtctcccttccaaagatcacactcttaactctgatgatctttgttcttggtcacattaacttgaaaattcccaggtcatcctcaaagctgtaatgcttcggaggttgaaaacggctgagctgaatggaaaaagaatcctcaatttacctcctcgaaatgtcaatgtagtaacatgccgttttgacgctgatgagcgagcattttatcaggcgttgacagagaggacagcgctgacgttctccaaggttggtcttcttgtgcagatacgttcttgatctttagacaactgaaaagctttctatctggttttgtttatcttagtacatgaaagctggggccgtcatgtcgaattatgtgagttgtattttggtatcaatacaacttgaccgtgtcagaatatgactgattcttttctgtcctttggtcaaaagacttccattctgacgatgttactcaggtgagtttgttgaaggccgtgaacagcaagtatcggctgattcagactcggactttgaatgtcttgatatagattacgtcaaggtagataaaaaaaatgtcttcctgaatgcgtggccgatacttcttagctaacagcatttcgcgttttcagcttgcgatcatcctattctagtcagcgaatcgtttggttcagatcctgatgctgtcgctcctgctagtgatgctaaagaagataaggatgaagcggatgaattggcggatcttcttggaggcctgaccgtcgcaactgcgccttgctccatctgttcgactaagctgttgccaggacaaacagaatactgttcgcctgcttgtcggagtgtggggttaagagcgaaggaagtggcggaagccagggctgcaggtttacctcataccagcgctaagatcagagagattttgaagattttgaagcagacagatgatagaggattgggtgaaaagaccatcagtcagtctagcttgtcgttttattcacatcttgtcattctcacgcacttgaatctaattgactctctttctgaacattcctacgaacagtcttttcccaggtgcgttccgctgggaccaacgtaacaaatgaccattgaacagaacaactggccaattctttttcctttttgtaaacaacagttcaccaagatgcttgacgtgattcaacctttcttaaagtcgaccggtgtcaagtttgtcagatgttagtagaacgagtccgatatcctgcgtcagattacgcgctgatcaattcaaatcggtctacgctgacgaatcttagatgatggaagcatggacaacgtgaagcgagagctttccctgactgccatcaagactgatccttcggtgaaagtcatcctgatttctttcaaagctggtggtgtcggtgagtctggacacgtgtgttttctgttcatagctcctatcgatcctaatgaagatctcgctgtttatactgtccaggtttgaatttgacatgtggtgagtcttcctcttctcgcctacaacaaacatgatcttctattttccagatattgagtcatcactatacaatagcgaacaatgtgatccttaccgacttgtggtggtatgtgctttgctcctctgacaaactactgccaagattgagcatcgaagtaaccctcttatcttgaattttcaggaatccggcgcttgaaggtttgttcatagcttcgggtttttgacgtcgaacgcccgatgtggccttactaatatttcactttatccacgccatttctacacagaacaagcgttcgatagagcccatcggtatgttcacctaccaagttatttagttgccgtttaattaggttcactgaccacctatttgagtctgtatatgacatcaggctaggtcaaaatcgagcggtccatgtacacaagttggtgatagaggaaacagttgaagaccgaatcctgctggtacgtttttctcgcgcttgagtatctgtgctttccctgatctccattttccatcgattcattatgcatcagcttcaagagaaaaaacgagagctggcggctgctgccttatctggtggatcattcaaggccggaaacaaacttaacttggaagatatcatggctctgttcaaagtgagccattctctttcttgattctttcgactctggcatattgtttgtttgaccatcctgaacatatctgtataccttacagccccaaccattcgctgctccagatgttgatagtgatgaagaatagagggtttaattctgattccaatttgttctctatcttgctctgctacgtattcttgcccctacttacccctcataggtgtatatagtatagcttttcttcttttcattgggatcttgagagttcatctagatataatacccagaatttgccctgcagcggaaatggttttgatgtttatcccgaatggagcgcatggaacagttctatccatcatccgagagaaacatacacataccagatactgtgaagaattacactgattatgctatgctcgaaacattaaatctcaggcgttgatgggaagcgatatctgatgagtcaactgagcaagaacatcaaagagtatcaagaaaggactgggaacgtggccttttgataaagttagcccaaacgatgagattttatcatctgtattgaattggccgtttgttcatcggttaggcagatctagagctcagatcgaaattggcgtatcttttacagcggttggttggtcggaatgcgcgcgcaagtgatgagcaaccagagtcttcttaacacgtctcttggacctaatcagctccctgttggcagccctccatgttcggaaatatagctgctggcattcgaactggattctggtgatcattctgctgggattgaatttacttgttaaccctaacaccaacccaaacgaattgtgttctcatcgaggcaagataggtgtattttgtcgcgtcagttcgctttcacccacattctgacctggagagttattgtgaagagagacgaaaggaaagagagagagagagagagagagagaagaaaacgtaataagatccactataaaagaacatctacactcgcccactttgccttccatacatccaacttctacgaccagagcaaaggaaagaggaaaagacctctccccttcgagagccgtcttttttgagcaaaagaaaacaatctactccttggcagctccgtacatcttggccacaccgaccgaagcgttcccagcaagacccttagcgaactcgtcgatctgtctcaagagaagtaacgcgttcaacctcgaaccctccgccgggaccttgaccgttctctttgcctcatcctccggaacaccggaagcgaccaactggtcgaccttggttttctgtctggcgatatctctagcgttgaagagcaacgagttgttctctctctggaactcatcgagcgatcgagaagtctgttcgacagaagtagtgagggaggaagggaagtgaaggttgagggcactaagatgcaaaggagggatcgtgctcgtgggggaggaggtgaaggtgttgttgtcgttagtagcgggagcggtgagggtggacaagtaggcggtcacgagggatgagttggtgattgttatcggaagctcttcgaggaggttcgagaacgtcaatcggttgtcaaccaaactagtgaaggacaggcgggcgaagaaatttatatgatgagctacgtgtgctatataagcagagtgcaagacaaataagaggaaaggagaagaagtaggatctcacgtctgggtatcaagtcggcccttggcggagaagacttcggcgaacgcggcagagaatcggtatgccttgatggacgtcctgccgtgaatggacttggtggggtctagatgagagatggatatatcgtataagaatgacttgttcgcaaaggggaaaagaagaaagacacagagaacaaactaaccatgcaagagaacgactcccttccttccaccaacagattggtagatggccaaagtctcgacgagagaagccttgaagagctgtccgacaggcgaggtgaagtaggcaccgacgaccgagtcggcagcagagatctgcttcaagtttcggaccatctcggtcgagtaggcttgctctgatcgaaggatgaattggtgaatgggtgagtcggaaggggatggtgagtggaatcatgaaatgaaccgcgacgaaaattacaagggtgacaccgttgtcagtgggtctgtcccatcaaagtacacacaccctgcacacacagataaaaagttccagcccatgagaaggactagaataaaagaacaaactaacgggcagccctgttggaggctcgctccttctcctcatcggctcccctctcccaaggcggcgagttaggaagagcaaaagaatccgagacttcgagagttccgttgagatcaagaccaagaaggtgaccggtagtctctgtggtcgggttgtcgaggtactgcttgatgatcttgatgatgactaaaccgtcaagctcgaccgagttgatcgggttgagaccctcgacatcgaggccacctttgagagaggcaggaataccgtcggtcttgttctgcttacccgagctggtgttgttggtggccgaagcggaggcggaagcagaagctgccgaagaggcaggcaagctggccgacagaagcgaagcaagagaaggagcagaggccatggcttaagtgtctatggtcgtcgaatggttgttggttctgatggtgtccaacaaagaaggagacgacttttttttctcggtgtaaccaggaacgtgcccagagcgattgcttacataagcaaatgttacattcggcacgtggtcccgattccttctgtaaccacgtcgtccatctgagacagcgaaaaacccggtgggcgtttcttcatctcgaccaccatctccatctgttccatcatgacattgttcggcttcacgtacatggtgctcaagataggtcagtgggagtgtctctccgtgtgcgtgtttgtgggtgcatggaggttactgcgttactgacgtacgatctcttttgaccacacagtcctcggtctcaccgtcactctagccgtcgtattcgtcggtgcggtctacataggccaaaacaagttgatctatccgtgagtccagtgttctctgcttgttcttttggtgtttgattcatagtagagcatgccatgcattctatcaggaacaaacctgtctaactttatatacgtatggtatatcgacacagatccgcctacccggagggatcaagaacaaaagtcgatcttccgacagagttcgacatgcctttcgaggatgtcgagctcaccgctccagatggcacgaagctcaaggcatatctcatgcttgccaatgccaacgtaaaaactagctccgaggtgagatctttggcgtgtcatcctgaccaagtataccgatcatgctgacttttaccttgttctcatcaaccagtactacaagtcgcgaccgacgatcgtctacttctggtacgtgcatctcaaagaccaaacaaaaactggatgaccccaggctaccattaatagatgttgctcgtgtgtactcagcgacctgatttctttcttgaaactacagcgccaatgctggaaacaccggtcaccgactgcccattgccaaagtcttcgtgttcgttgcgactctcacatcttgacccttctttacaaagaaaacccgaagactgccattctcactctcatcatcttttaactacatcattcttggcgtaatcgaaacatagaaacaacctccgttacaactgcctcatgctatcttacagaggatatggtctcagtgagggcagcgcgaacgagaaaggcatcaagaccgacgctcagaccgctttggactttgttaccaatcacgacggtctcaaagagactccaatcgttcgtgtttctcgcttcactagttgatttaccagtttgcctttatctcgccgaggctgatcattgcattcctcacagatcttttacggccagagtcttggaggagcggttgccatcaatctcgctgccgataatccccatgttgttcgtattttcttgctcatccttctcttaatcgcttctctgccgtcggctgacattggtagttcacctctctacaacccaggtcaaggctcttatcttggagaacacgttcacttccatcccggctttgatcccaagcctcatccctcccttggcttctcttacgttcctcatccatcagacttgggagagctcaggaaagaggatcggagagttacctggagaaatgccaatcttgttcctgagtggaaggaaggatgagatcgttcctaaagaggagatggataaggtttgtctgtattcgttttcataaagcactcatcaagttcagatgctgatatttttatcaatcctttttgacaatctagctctacgcgtcctctttaaaacgaaaactgacaaaggctacgacagccaagacttcgatcaagaagcctgtctcggtgttcaagccgttcgatgccggaactcacagtacgtctcaatcatctcgcttgaatatatttacgatcttcaatcgcttattgtaatgcatatttcccaccgattgactcgaaaagacgacaccgtcggccagaaggactactttatgcacttccagaagtttgtagaggagcacactgggaggtctactcgataagattatcttatagcacctaaaaggattgtatctgggtttagaagtcgcttttctcatggctcttgtgttctataaaaattaaaatgatgttgctactttggtcgtccatgtggtttgtggaggaaattatgacgtgtgaatatcggccatgttctaaaatagatggagacgcaaacatcaccatctccctctctataagaacccttccgataaccatacgttacctttaatcaaacatcctttcatataagaataatgtccctccctcctcttcccttctttatcagagcccaccagacggccaaggagttcgccgaaaaagaagcgatcttcgatcctagaatacacagatcgattacgtataccgaattattgaaagatgtatcagcttttaaagatgttttgctgaagaatgttccagagaagtacgtttgaattcgatcagcatgacaatggtatgaaccagtcacttacaacatacactgggcttgtggatgcgttagggatttgaaagaagcccgagtcgctggattactccctaacggatatgcctgggttgtggctcaatgggcaacttgggtcggttctttgtccttttttatcatctccttggaactctttcaatcatctttaacagactttcgtcttgcctcatatcatgattttaatcatgtaggcggccggagggatctttgtaccactgctccatacgttgcctattccagaaatggaatatatcatcaagaaatcgagatcggagaggctgatctgctcggatgatcttaggaccaaagcggaagagttggctaaagcggtttcgtaagtgactatcaatctctcagggcaacagaactcagcacagtctttaatcagatcacgcatccagtctaccagtcgacccgttctttttacctctcgatcctcagttatcctcctctcccgatcttccccagatcgatgagactctattcgatcaaaacaggaaggcattcatgttgttcacgtctggatcaactggatttcctaagggcgtacctatttctcataaatcattgggaagccaatgcgaaagtatgagcgttgtttggggctggacgagagacgatcgagttttagatgtcgtcagtccttttatcttggactcctcaccctcaaagctcgaaaaatgatatatactgataattcttggaatttcgcttgatttttgatcaaactcagcttccgatgcatcacatccatggagttgtcaatcttctcctaacagcgctttggaatggagcgacctgtgaattcatggagagattcgaagctggcgctgtaagctctgatttcaaattatcttgttgtcctctttgatcaagccgatttctcatgcatatcttcttcaacatttgtgataggtatggaacagatggatgtctgctgcagagccacagctgacgatctttagcgctgttcccaccgtaagtctgagtatctcaaattgtcctcaatcgctcgctctctcgtcggcctgccttacactgaatttttgttctttgaagatatactcgaaccttcttcaagcattccaaagattttcctcggaggaagctcgacgcgatgcaagaaaagcatgcgagaggttcagattgatgatctctgggagcgcgcctttgcctggtaggctgaagaatgattgggagaatgtttgtggcggcggaagattacttgaaaggttcgttcgctttgttcccggtatcggagagacctgtctgtgtagttcatctctaatggactgtttgcatggttcggacactggtgcatcggcgaaaacagatatggcatgacggaaacgggcatgatcctctcatgcgggttggatccggattccagggtcgatgtacttttgtttttcttctcctgtacagaaagatttagtatgaggagatttctaaccctaccgtttgaactacacttgtctgtataccatgtggcctgatgggatcatacaggggcacgtgggatacccaatgccgggggtccaagtcaagctgttttacgaaccggaagatagcgaagaaagtgaaggcaagggggaactgacagactttggaataaaagttggaaccaaaggcgaaatctgggtcagaggggacaacatatttgatggtaagccttcatttctcatcaatatcatcaggatcaaatgggaagtgacgctgaatgtggagttgactctgtgatctagggtactgggaggatcctgcaacgacggctaaagagttttcaaccgatgaaagcggtcaacgatggttcaaagttcgtctgtcttttctattcctttcttcttctcacgtcgttctcttgcttgtcagaagaacggtgattaaatctttcaatgaatcatttttcatatagacgggcgatgtaggaattctagagtcaactaaagaaggtggtttcagagtattaggaagatcctcggtcgatataatcaaagtacatttctatgtttaatctgttctgctagagaagcgagagtaatgacttggacattggtatcgattttgaagtccggcggagagaaggtctcggctctcgaagtggaaagagcaatcctgaacttagctgataaatccgtcaaggactgtgccgtcgttggtgtgcccgatcagaagtggggggaggccgttggcgctgttgtcgttctggcttcgactgatgctggagacagatgggatgtcaaagaactaagggagaaattgagaagtcaagtatgtcttttcaagctggttagacttttgagatggagagaggagatgattgtggaacgttaatctatcaatcttggggttgtgttttctggtcgattgaataaagcttgcggcttttaagctgcctcaaaaactaaagatctatccggacacgatcccacggaatgcaatgggaaaagtcggttcttctttttggggtttccccttcgtttctattgtcgactcatcaacaatctctgattttgatacgataggttaacaagaaagagctcgttaaaactgcgttccctgaagaaactggctcggcagccagatgatcgaacatcctgcgggggagaaagaagctgagcttgtagatggaccttgatggtgggacaaagtatagatcgtttgtaacatttgatgagatggactttgcgtctttgcacaaacaatccttcaatcgcgctcttcgatttgacaagatatgtcggagtgaaatcatgtgaagagaatgaggtcttggtaccattttagatatttcaagttgacttctcttttttgtccttcttgtccttcttctctttcttctctttcttggccttcttctctccgttttcgctctctgtatcttccagctttctcttcttctccttcttctccttcttctctttcttttctttcttctcctttgtaatctcggcatctagggcagaaggctcaggcgcgacaggagccggtgtcgaaggggtctctggagcttgtgatcgttaccaaaagtgaaaagcagatcgaattgaacgaatcaaagagtgagaacagttgagtttttgttcacttacaagggagcgatattgagtacatgaactaaatcaattggattgacgtaccggtggaggcttcctcactcaatttctccttcttttccttcttctccttcttctccttcttttctttcttctctttcttctctttcttctcctttacagcctcctcagatttggcaacttctactacgggctcagccaccttctccgctttcggcgccggaacaggctcgggcgcgagagcaggagcaggagcagcggcagcctgttcagcagcggctttcttagctgcaaaagctgcaaaattggcagcgtaaggatcctttgctttctccttctttgcctgtttaattcatccataatcaaaccgatatcaaagcaaacattagcgcaacggaggggaataagaattgatcaaccgaaatcggcgcgagaggattataccatcaagctggggatcaggttgacactaaaggatggatgatgactgaccttcttagcaggacctttgtagagcgtcctttcgtacttttcagcctcagatatgcacgtagtatgagacctatagcatcagataggaaccgtgttagactttagtcaatcacatcgcctgaagacactaacgcctttgaaaaagggaaagaagtaagagacccacttccactccgagccatttcggaaggttttcgaacagtcgaggcaggtaaacggagcataacaccttgagtggtgctgatctatcaaaagtcacgtagattcacaaggaaagcagtgtcgagatttccaggtgaccatatcgaaaataaaaatacgctcaaatcagcatactctgatcaaggcggtaagtttctacatagcacgctcaccaagctttggcttcttgaccacgtcggagcagctaagtggtccataaagttgatgaaattgagtaacaaattacgtatgatatcacagattatgtgaaggaaatccaacctacctgtcacattggaaggagaccatgttgaatatgtgtatgtgtgaacagaggttaaacagcaaggtaaacgagaacggccgaactctcaaaaataatgtggagggaagattagctagtctatcacacagccttcatgaaacacgtgatttagcgtcacaaacatgtccaaacgcgcctgctcacgcgtcgacgcgtctgttctttgaatatgacgcgtttgtgttatcctcgttcgtccaggtatccaacttgatacccagcatactcatcctccttgctgccctcagccaacacacacacatacacacatacacacatacacatatacacacacggaagaaggcaaggagccgatcaaagaaacatacttttggaaaagattccaatatgccttcttcctcgctacggccgtctacgaaaatcaataaaagccagacccctgcacgaaccaaagagaagagcacgactgaacctgaccagaagagtgagtgatcttgctatagaaccatctcatttcatcagactgatcgtgccaatgatgattttcctcatcccatgcttactccgattcaggaatatcggtgcatcgtcgctcgagctctggagtgacatccaagaaatctgttgatcagatgacaacttctagtccccattctacccacaaggataatccttctctcgctaaaggtgttgttgggaagagtcttgcaccaatctcttcccgagtaagacggatgactactcgatcttctatcaagtctcttcaatctcaaccatcagatagcacgtcactgtcctcaccatccgctaatcaacaagatacccacgccgaggcttctcctactttgatatcagaggaagaatcagctacaatggccctgatagcgtccacaatcccgaaagcatccactactttacctagtagaaaaagcaatataccgatatcgaggccagcatcaactgcttcgctctttgccaatccatcttcacgtgctcccgcgtttgctcatagacgatcaatctcccttgccttcgcttctcctccctcatctgctcttgaacagtctgatgactcgtccccgccttcactaggcccgcctatgactacaacacctaggtcacttagacgatctgtatcatcctcctttgattctccctcaaatctggtgatatctactccatccgacccgacaccagatatatcatcgtctccttccagagtgaccgccattccaaagatctcaatgacaccatcaccaattaaaatatctcgtcctgtggtcaggtctttggtgcccaaaacctcctcttcttcttctggtcgaccgtccacagtgtctggctcgctcgctttcttagctgtacaaaacgattctagtcgctccacacctcgaaaccaatcgatacctatccttaaaaaaggtcatcgaccttctctctcaacctcgactgttccgtccaaatcagctaattccctgggtagaaagagacccgactcggtgtccatcactgtcacatccacctccctcaacaacaaatcagccaacacgcctcactctgtctcatctcctggaaaactctctggacgatcagaaaaggcagatctcaagcgcacgcccattaaggaggtcaattcagaggattcgatggatgaaatcagtgtttcaagcccagttgttgaaaaagtttcggtcgtggagaagacgagaagggtcatacccaaaagtccgttaaaggagatgacagaagacggggtcgattgctcaccgtaggtctcttgatcgctctgttatgtctgctgtttcggttacactgacattctgtctaatcgtagacttcatcatacagaccgcccgtttccatctctctatccgcctaatcaatcgtcttcttctcaaatgctcaaaaaccttctcactccatccgcgaccccttatggatcccgtgttcgacctcgacctctcgtcgctcgaaactctctggttcatttcgattcgatggcccaatcgtttgctcttgaagatgaaggtgattctcttctacatctccctgaagatgggccgaatttgagttttccggatctgagtggcccagacctagaatcacctccaggatctctcaagaggaaggcaagaatgaggccgtctctagtagcaccgacgaaagcaaaagaacacgccaaactcgtttctcttcaggataggctggacgagagcctactagctcaaactgcgctgagcgaactgttggaaagagagattggtaaagttcgagagctggaagagcatttggccgaacgacagatcgaagaagatttgttgaaagctagtcctgtcaagcctagcgctcccacattctcacggcctttccttggaaaacctatgacagaggtagaagcggtggtggtgcaagagaacgacttgaggctcaagaccgaggttacgcgattgaaaatcgagcttgaatcatcaacagactgtatcgaacatttacaaacgggtctctccgaattaacagaacaactgacatctgcccatggagatattgattcgcttcaacacgacttgatttcgatacaatcaaagaactcaaaacttgaagcggataacgtttcaagggaggcagagttggaagcacaacagattgccagcaccgtggagggtaggaagaaggcaagcaaagcttggtccgaggtaaaaatgagggcgatgggagagttggaagatttgaagggcgagagagatttattggcgatacttgaaacttctattagactgttggaacgtgaagtcaggagcggacggacaatctgatcgttttttcttgattttggggtttctttctcttcgttacttatatattggtactcttatattcggtccagcgagtgacggcgttcgcaagggagtgatctatcctcgtaagagtcgaccaagatgtttgatgatatatgttcctatatttttttgaaaggctcgctgattcgtcgcgtcctctcctgccgtcatgccgcctaagggatgttcatagcttaactgtcagaccaaacttgaatttcaaatcgaagatgaaacactctacaattgattgtgcgagagaatcgaaaaacaaagtatagcaaagaataagttgaagaataagaagatgtatggaacgctttgaagaacaactgggcatcgactgacatcagagaagaatatactcgatcaaatgagcagaacagctccgaactgaccaggtatggcaacggctgtgacacatacaacacattgaagcagtgaaaggaagcgaagcaaaaaaaaacacagctaaagcgaccagagcaagtgatatgttaagcaggtagacagaatatcccattaattcgagaaggcacggaggtactaaagggctcaatgatgtcgataatatataaggaaagggaaagaagcgtgataaagcccatcgacctgaacagtctgatgtttacgaagaaggcccaagtctagaaatttgagtttgctcaaaccgcgatgtcgtaaatgtatccttggccagaaacaggtgtggtactctacatcatttttcaccggccaaatacgtctgtggaactctgaatgaatagacaaagacaaaagctatcagatcaaagcttgtgaacctcagtgaagagcgattgttcataagagaaagaaagaatgacactacagcatatgtcgaaagtgaaggatgaatgattggtatgtgagagtaatgatctcaatcaacaccgtcaggttctcgtgatcaattcaataagctcaacatgcgctgatcaatattagttggtagtgaacgaccagattgatagctgcagcatcaaagcctatatcatggttaaacgatccaaggtgaagattatggtcatacttgaacggatgaatttgaacagttgtgatatcaatcaaacagtgtaaataagatgcagtggcacaggtagaggaggtgagtaactagaaacaccaggagcaacataaatctgatttctagacgtgatgctccgagactgaagaaacattgatggcgtcaaagaagaagaagtgggtactatactttatgataacttttctcttcaattgttttccctccttccaaatagccgcaagagatttatcaaggaccaagaagtaaggagacacgacgaacgagaactctgatcagggttcgtatcctctgagcacccccttcaaggcaatttctggcccggcccggagtctgagatcaggccgaattgccgaattgccgaattgccaaattgccgagtcgccggattgccggtgagagcaggatcggctgtaaccacctctggtaaccacatccgtccggccaccgacgcgtaggggacgcgacagaaacgcgtttgatttcctctcactcttgttatccttccttcgacacccttgatctccttctttcttcagcaaatacgatgtcatccattcctgctccaaagagagcatcatctaggagatcgctcacaacaagacttccttcccatgatgggccttctgaaccgctggctgttaggatgcctggtggtaagggcaaaggtcgggcggcaagtataggtccggccgagtttgcatctagaggcatagagagaaagccgttgagtccaaagaaacttgcaagaagagctctagtgagtgaagatttgactttgtatatctacttgaacatcgcttttggcttgtgggaagctatcattgctcgtcggatactcgaggcgtccttcatgacgagtgcaatcaaaacagaccagctggtacaagagataactgaaatctagttggtgtattgtccgcgtttttcttccttcctgatcatgcaatccatcactatctatgcaggtcccaagaaagagtatcttgaagccatacaatcctgaagagactcagaattatacccaaggggctgtggtcaatcaagaggcagatgaggacgaagatgatgacgacgaggacgagaacgagacccagtttcggaatatgcctggagaatcgacgacaatgagaatattgagaagggtttcttttgccgcccatgctcacgttaggcaagctctcctccacgttattttgtgacaaaaagtcataagcagatgcaaaagccggctatcactaacgacaagaatgatatgtgtctgaattcttaggatgtttgagacggcccatgccaacacactttcgcagtcccaatcatcgacgacatcctccgtaggctctcttcctccttcgtctcctgttttgtcttcctccaacgtgttcgatgaacctgcacaaacacccactccggcatcttcctcgacccgccgtcgatcatcgcttaaccatcaatcggcaacggccgctgaacaacgaccccctcttaggcgatcccgacgaagctcgattgctgactttggatcggatggcagtgcggatatgagtatggaggaagaagatggggacactacagactttttcggtcctccaaccactattcactcctctctctttgacgagctgccagaatcgtctcttctcggtcaagccgaattagacttcacccaagtccatggagcgatccttccttctcatacctctggacaaatacaatcgaatctaccagaccctttgtccccttctgcttccacattgtcccctccttcatctcctgatcgaatgccgaacgaaggagaagaacagacgcttgactttacagtcgccactggaggaatcatccctgctcatgcccctgaatttgcaatcgaaggcagaggaagcgtaggatacagaatggaggaaggtgagggcgaaaggctcgatgcctggtctcaatcccgagaaaacgacgcggcaaaggagagggaaaacgaaaacgttatgaatctggagcaagaccaagaccatagagacgatatggaactgacgagtgtcgtcggaggtatctttgaaaacacttctcaggaggacgagaccaacacaggcagatcttccgaggctgaagaagaaggcggagaaatggatgagaccgtcgcgtttggtggattgctcaatccccatccggctttcataaacgaagccgaggaagctgatgaagagttcgaaatggacgagacccttccactgggtggcgtccttgcaccgacaaatgactcttatagccaggaaaatggagatgaagacgaagggattgaaatagaagaaacggctgctctcggaggagttttggcgccccgatttctcgacgagcaagacgccgaggacgagaattcaacgcaaagatttgatcagggcacagatgatatcgatttcactgtcgcccagggaggaatcttcgaaccctcagccgacccatcttcctcatccttcgagcctgtattaccttccttccagcctgtacttgctaagtctcctatgaagtctatttcttcgataggccctacccgaccgagggaaagtgctctgacccgaccaacgttatcttcaacactcaaatctaaacccaatttgtttgactcaccagagaaaccgacaggcgcttcaccgactaaaaaacgagccttgcccatattcacgaatggcggattggacaagggaggattgaaaagacgagctagccatattgatggagcaaaggtctttgggaacttcggcgaaaaccaagagggaattcagaggggagcaaagagaagagcttcgagcggaacaaccggcaaagaattttctcctccatcggccggggcttcccagacaaatgatgtatttgggatgaacaatttggtagctgcacccaaaaatgcggccaggccagcacccgccgatacattcccaatcgagactaccccggaggaaacatcagattacgtagtagaggagatcatcgaacggagcgaagagaacccaccctcgcccagaaagacatcagtagctaaaccaacaaaaagaccggtcaatcttttcgagctttctccaacttctttatcttctgaaggactgtcagtgaatgtgtttgatggaaccgacactccgttacttccttcggttccactatcagcatcctactcgacttcgcctgccatcgaagcttcggtgttccctctttcttcacaaaccgatgaaggaccgtcttctgaattgcctttgcgacctactcagaagtacgagttggacatcttcaactctccacctaaagcgattgaatctgctcttcagccctcgatcttcgaatctctacagactcttttgccgtcatcgtcaaccgagcagacggtaacatcagaagctgccgtcacagcaaaaacatccagccaagccgatgctgtctcgccagtgaacttccagccggtgataaatacgcctcggaaacgcataggaagacctagtttggcagctgctactctcaaaggaaaaggaacggaagaaacctctggtgttccgaacattgtgagtctttttggtcattattctaatatgcccgccccttcgcgtgtgattaattctcaaacacgaacgccgctgtatatctaatatcacaggaacctactccggagattgctgctccgcaagtgtcactcactcagtttttggagttgaccaacttgaactggcgagaaaagatgagtgccggcaagcgacggtcgacgatcaggccaggagagatgcttggcatccatcgcttcaatgccgattctacctctcgcagcagtggttcgtcttctgatttccccttaaggtataaactagagattgtcggactgattcatagaagagaaatcgtaatcatctctagcaaacggcgaatacctgactatggattacgccaaccacgtgttgaatttgccttatctgatcgtatatcaatgggtgagctttatccagtttgcacgggatagaatgaccccactcacttttcttgatttgcttcaccatgtgacgtctttttaggcttgtaatcatttgaaagactcaacttcacagtcccaaaagaatgttcaagtgttggacgaggaagcatcagcccgaaatccagtacttttcagcgagtacctagaggcagatgatcaggagaaagtcttgattgaggtttgtgtggctctacgtgttcagccttggctaaacaataacacggctgacattgtatccatcaatacatttccaacgttttacagggtcaacttaaatatctcaagatgtttgctcagcacacagtaaagaacaaatggagagaatggaggatggatctcgtggatgaattgaaagcgtctcatgaggaggatctttctcagttatctcaagtaagtctcggattccattgtgttgatctatagtcttactgtttcaattatgttgatcctttttcctcttcttaggatcggactcggctccaggagatcaaaaaatcgtttcatgaaaacgtgtctttggtagatcttcaagctagacatgcagcgctcaaagctcaactggctgaagagaaagcaaaggtcgatgaagtcttagcgtgtgatcctgaagtcctttctcatcgtagagctgaggttaaagagcagaagtaagagtatattcggatacatcccaaagaatatacaagagacacatacttaatcgctttttttttactttcatgaactttcgtcattttacagagctcaaattaattccctaaaagccgacttgactgacagtagtaacgtcttgcttagcttgagagctaaagcaactgctcttgaaaatcagaaagaagcttgcctcaaggccattaattatgcagccgaatatttttcaggttcaaacgtttcttctgccgagaaagcattcaaacttaaaggtgaagctacatcctaaattctttcgcgtcattactagcgaacagagctgatgctgctctcgttcatggggtctttttctaacaatagatgaattcgataagattgaatcattgcactcgatacgtcttaccagccggtttcccgaccgacttacctttgtcatccttggtgatctggaactgtccctcgcctgtcaagatgaacgaccattaacgacgggtgcatccctctgtttgattcctgatgagcggaggccaagtcgtcgaaattcagtcctcacacatcatctgttcgagctcgtgaagacatctttcgaaggaacaaagttcacaaaagcttctcaggtattctgatcttttgactgcttttgatcgttgctatccatcactgaatttgtttccttctcttcttgcgcgcgaatggtatttctcttctgatagctctttcagcatgtataccagctttggagctcatctatccggatagcacaagaattcagcctcatctcaacccgatacccaatagtgtacacttattccgccgaatcctcgatagaaaaagccgaagtgaccatgctcgtaccgtctgccaaagccaaagccaaagtgacattcacaattgctcctcagttgttgctgaattggccttcgaacataaaaaccttgatcgttgatgttgaggtctgctacggtcagggcgttcagtaagtttgatcgtttgatttgccctctgttgtgtatttcagctgatttcgccattcctttcttttttcttgccttttctttcaatcaagacgaagttcactcaacaagacgatccagaaccgtctctcgatggcaactcaggagacaccgacggggatccttgtcgatgcctgtttagaggcggtggctagttacgaccaccaacaatgatatttcctaactaaccttcaatccttgatgaatgtagatgatcaattaaacatgacttgccttcaattattcttccgtttcgttcgtcattagtttcttctttgaatttatttcgttccattttgacttttttatacccctttacgagactcgtatatacgttccacaatttatgattttaatggagttgttcttcccctgtatatgcctatcgtgatagcaaaagaaaacagacaagaacaaagggccattcaataaatgatacatctttcctaaaagtcattgcctcaagcctttctcttcttgggagctgatgaacgagacaaccattgtatagaagaagtgtagcaaaggaaacacgattagttcctttcagtagcaactcgcactgtgcgttgtttcgaaacttaaaatcgctcaccagattttggtttgccattatcagcagctgcggtcgtagcctttctcttgccacctgttgtcgtggataacgccagaggcatcccacgatggtcatatctggccgagaaggaaggtcgtgctgtgacatgatctgggcaaaaccattctggttcttcaggaatggccgttaatggaggcgtaagacagctaggatggaaggctcgttcacacttgaatcgagagccaaagaagcaattcgtttgatgagtctctgcctaaatgtcgaatcgagacagatgaacggtgagttcgaaatgactcacaaagtcacaagctaaaggctccaaagcgcctggactgtcgtttttgcgacaaatagcacacttcgggattcattcggatagagatctatcagcattcctacatttagagacctctctactctattttcagtagacatgtatcaacaaacaaagacctcacaggttcgtcctccaacccttcgatgagcgggtgtcgtggcaactctgagaacgcatccgaaggctcagcaaggaatacactgaaaagtttttggtcagatgctatagtaaagttatcaagggtaactatcgatgaaaaagacctacgtagtataagccgagcatgccgcgcttcattcgagaaggacaaattgaagatcgccgttctgtcagtcaagacgttcttagatgttcaaagatgaatagccaaagaaagatagaggacaagttactaaactcgagaatcttaatgccgtccaaggtgaaattctttgccggtctggtcatcgactttggctgaccttctccgacggcaagctctccgtgctggatggcctgcccccacccgatagtgatcatctcgtccgttcccgctggtttctcaggattagcagacagagcaaagaacgcagagcttccagcgcatactttagtaactttgcattgcatcatgtcggacatgaatcggaacgtcgtgtctgtattagcgtatatttgcgagaaagacagtcagttgtgaaacaaagaattcttatctagagagaaggagagatcagaaaaggaatgacatacaaggagcacctgaagacccttctcctgtagttttccaccgaccagccacgaggagcatcgactgattgtcaatgaccatctaagtttatagataaagattaatatagagactgtttcaatagctggaagattcgatgtcttttgctgatcaacgaaaacgaaccgaactggcaggcccacaggcgatggactttgctctaaggatgaccttttcctgagcaaactgaatggatcatcaacgtatacagaagtcagagaaaattcagattcggtcatctaaaaggcatccttcagtatgaaacctgatattgccttacctgtggaacaacaacaggcaaaagttgatctttttgatgaccgagtcccagtcgacagtagccattatatccccacacatagacgaatctgcaattccagaagaacatgtgtggtcaagttgtcgaggagcagtatagtgatatcgtcagctcatcgggtctacgaaagcatatttacgcatatgagaataatccgacgaacccttctgagtccaatgcaagagcttttgttgtctcgcgaatatgccaaaaatcagacgaattaggatcatgattcgatcctatgttaaaccaagcaggcaagacatacaatgcgaatttccactggcgatttgaacaatcttcttgtcatctagcgccttgataagctctgatgcaacccaagaaagtacctcagctgcgtcagatctcgtttattgcattcacatccagacaagcgtatagaagaagatgtgtttacgaactaggctcccaagaaacctcgaatccgtttttgccagaagagataatgtgctctccggtcttcccatgtcccaattggccctattgatatatgcgtttttgagtgatatcagagaaaatacgaccatgaagattcaacccgactctagtgaatcgacaagaccacgcaagtttcggtagtacttacaaactctgcagaaccgaactatgatctcaaagtcatcagtaagagaaaaatgttgtttaagcgcaccgctggatgtcagtatccccatttaattgttccaagctttcagaagctgagtcgtcggtatcatcaagtcagttgactgaccgaatagactgtcaaccgaaacattcatataacccatgccatccgatcagccatcaagattgcacacttgatcgtaccacttgaccataacaagaccttgtcaatatacttgactcacctttcccttcttcatccaataagagtgagaaattaactccggctgacccgtcgacgatcttttttgaaccccagggacctttgattctggtgaagtttttaatcatggaagacgaagacgacaagccgcactgttgttctcaagtttccatcagtcatgacatgagatatcacatcagcctttatatctacagacacaaagagaacaagccgaagggacagtcgaaaagagagacgaacttggcctaatttgtcttcaccagacacccaggcatctccttccgaatcaatcaagatcgataaacctctcccaacaacacccttcacgaactttgccttcttcttcgcgccgaccatatctggggagatcattttcggtctcgtttccgacacgaactctgctacatgaggcatgcaactctcgaaagatggaagatcctctacgtcgaatgccagaccgaccccacgcggtcgaaagactgaaggtgaggtcggatcagcttgaggagatccaagggcagaaggtgagtttctgccgaagaggtgggcatgaccgatggtatcaatacaaataaagtggctgccggatggagaagaatgaacggattggacttgaacgttgcagagagatcgaaggatgtggggacccatcaaattgggtctgaatttaccataaaaaaaggagagaaacaccaagaatgagaaacaccaagaatcagtttaacctagcccccataagggacgtgtgtttgtcgacagaaaagagagaaatatggcggaaacagaaggacgaggggaacgcaccgaagatcgatctttccttccttccttccgagcgacggcctgatgataccatgccattccagtaaggaaacaaacgacaagaacgggaatgagagtgtttcaacagaaatcagtcgcgtgcgtttggacgagaggacgcgatggagagcgggaccggaccggtctgacgacgaaagcaaacactcttgccatccgtggtccaccagtaatcatatcatggttgatacttatcagatcttagaggagacaattacataccagtctgtaccacctgcgatcaagactgatatacgcgatttaaagagaaaaaacgaattataagaacaacggcgactatgatttaaaatgagtgtgtttattcttgaggtcaacacacaagaccgatgaactcggaaacgaacctctgccaaatttggcctgttcggaagacgagacagatgtcatttgtctgtaggttgcacgagtgatggaactgctggttgaatgaaggatggacgatgtagagattttattgaacgaagatctcaagatgtggagtcgggcggaggagaaaaagaggcggcgaggaaaatgacattctctactttcttttctcgttttcttttgtcctttcttttgctacgatatgtccttgttctctcatcgtttcccaggttttcttttgatcatacgttggccatgcccgacaaaggaaacactctccatctttcagtctacaaggccaaatacagtgttggagaagaaaaagaagcttgagggaggataataaggcgcaaggcacatagtgaacaaagacgggtgatcaagaagagaaagggtactatgaacaagaaacgaggacacaagatcagcgacgagctagttgaatgactggaaagaaaagaagagaaggaaaatcgggatataaaagcacttacttcaaacgaagcgggtggatctctctccggcccatcctcgtcattcactcccgaagaagcggcaacagcaggagcagaagtcgctgcagcgcccatcgcgacatgaccaccagagactgtggctcccggtccaggagcgatttggtccaaagaagcttccagctcaatgaaatccttctcagccttcttctcctcatctgagcagttcgcattctcatacaccatcaaaatacccgcacctccccggccgatcttgatcgcacccttcttaccaccagcctgagcggaagacgtagaggaaggatcggatcgaacaggtagatatcgattcgtgagcgggaagtagatggatgaggcctgggcgggcgtcactcgagtcatgttctccagtgtctcagatgtcggctcagacttcttcttcgatgcaggagcagttgtagccgtgttcgtggctgcagactcgtcaataggaacagcgtcgtccatcttagcgtcagcatcaggagccgcctcttctgtcttctcatcctaaaaaaatcgttgagacagaaacagagttggttcagatgggaatccttttcattggttctatgcattacagagttgacttacagtctccatagctgtatccttgtcatcagcggcctctgtcttctttttctcaatggctcgtgcattagccttggcagttgaggagagtacagcggtggcgatcggcttggcaacctccttcgtctcgatgaccgtgggggcagggtacgcgtacaacgacggctttgctctggaggtgaaaccaagcttgggaatcttgagatccttatccaaaccaataacggccgtgggcgtgaaacctaaactcaagcagtgagctaatgggaaccagtaccagaattggcagaacagagccatcccgacgacggctcccatgttcaagcttccactcttggagagtaaactgatcgtgacgttccttccaccggcgtcgatgataccctggccaagagcagctccaaacttggccatcgaatcttcatgcttatcggtgatcaccgaagcaaacgtctttcgaaccgaggcgaccttggggttctgcgcctcagtctgttgaatgagaaccatagcgagcgaaacgagagcaccttgtcgaacaaagtcgacgggatctttggaaagaggttccaagagctcgactgcctcctacacagggtgacaaaaaatgagtccagacaaacaagaagtcagccaatgattgactgaagaaaggacacttcttcaagaatgaacaaacctccaatccagttccagcacaagccactccgagagccaatgccgcgccctgtctgacatgagggttgtagctctcactcagcagctggacaatccttggtacctgagtcgggtttcgacacaaaatgaatccaagggcggtaacggcggctcgacgaacgtcgtctgacacatctgaaacggcgacatccaacaccttacggattgccttattattcgacgttccagcgtaagccatggcgattgtgtagatacctccatatcgaagaatggcatcctacgtcgcgaattcgaaaagaaatcccgattaggtcttcgttgcttttggagtcaaacgtggaaagaacgacaacgcttaccttttctgcgaccaatcgctcaatcacttcgtctgcttcctcctccttgttgtagtacaagaaagcggttccaatcgccaaacccctgatgatcttttcgtgttgggtctcgtgagcgtactggatcatttcatcataagccttgcttgaggccgttccgagcatgaccagacccatggcataaccggaagcttctccggcgacagccgagtcttggaacaaagtctctcgaagctgatcgtaaatctctattttcatcccaacacgaaatttgacaagatgccaggttagatagtctgacgggttgttatctcactattgcaacaaacgagtgcgaaccttcgttgccactggccattccggcgactcccaaccccagagccgctccatgctgaacaacctcctctcctcctgcctctcccaactttttcctcaagtaagagccgactgtctctccgttctctccagttttgttggtcgttcccctgcccgagttgatcaaacccaacgcaaacaaacttcctccttcagaatattcctttccggctcctccagctccggcaccagccgatccaggtaggtaaggtcccaaaatcgtcatacccttggaaaggttacccttgtggataacacccaaggcggccgtagcagtaaatttggaccaattagaggctcggcctaaccagtcaaggtttcttcgaaggaatgtgtcggaagtcgttcccgccgacatgaacgaatgagagagcgtcaaggcagagtgatacattgatgaacgcgaggaatcaaaggcctctttcgtcttctggatgatgagtaagtcagcgtggttgtttttatacaggaaatcaaggtagtaccggatggttttctccccagaaaggatagatcgcaagttggtgatgactatgtgttcgttctacggacactcaacatgcaatgtaggtggtcagcgttggtccctcctctagaggttggtactaaaggacgacaactaacctccgatttaacttctccacagactccagtgccaacctcgcccaaaaactcttgagttgccccatcggccagatcgaatgcaacctggtaggcacccaactgatttttttcgtcgtcttctcccttggccacgatggacttgataagctcggttgacaaactaggctggttgagcaagatgtgaatttgagtgatagatgcgtaatcgaccgcatcggcttctccagaagacgacgaggatggggacagagggaaaagctcgagaagcaacctcaagacctcttgcttgaactccttgccccatcctttgacctccttctttcccttcttgcccttggtagatccggaggacgaattagacgaagagccgacaatttctagcacccatcggagaattgatccatccttcccactcttctcccagatcgttcggacaacatctagtcgacgggactcaagtgcaattccgagcgattgtcgccactcttgttgatcgagagagacagatagaacagacagcacaagggtctctaaacgagggtcgatcgtgctctggctagtactagatgaaggatcggaaaaggcactaggagggagaagagatcgttgttgaatgtatgtatctatactcttggctttaaaagtcaagacaccacatcaagcaacagtcagtttgcggaagattagttgaacaaagatgatccagactcaacatcgacttactcagaacaacctccacatagccttccccgcctgtcaagccacttccttgaatcagctttctttcagcctcgaaccgatctccggcagctaaagcaaacgaaagagcttcgtcgtaagctccaagatggtagtatactttggaggctaggagagcggctagcgatctagaggaggccgaaagctcggaagattcggatagagtttcactgaatattaccgatcaattgtgtatacgttcgtatcagtgccattgattaaagagttggtcagaggccccaaatttgcacaaatcttgagaagaactaaacacacattgaaacaacttcttcactgatttctggccagaactggtcgatcacctcgttcaagttctccagagcgtacgtttggagttcaggggaatcttgttcggagagcagagccaggagaccagctggaagcaggaccaaaggcgagaacgtatcaagatcaaacacacgatcagcaaataaattctcttctcaggcttggctcgaaacatggatgaactgatcaggggggaaagcttaaatgtaaaaacatgaaaagaggtttgatcgattatcgaggaaagagtgtgatgggaaaaatcctgtgatcaagattgccactcgtctctgcaaggatcaatattcgagttctatcgagacattcctcgcttcttagtttacactaagatcgctcagcctccctgcttaagcatctcgcccctcatctttgacagtccttacgaataagatgaaggagcctcgttgggctcttcttcggaaagagaggtagagaaaaactcaccagcagagctaggcttgacagacacaggcatttgtcagggacttgaagatcaaaataagcttagtcgacgtcctcgtatatgtttattctagaaagatagttcttgagttgaaaagactgaagtaaagggttgtatagtctggccgtgatggatgaatgcagaagttcaagatgatagcaaggagtgaaggaggtgatgtcgtggaggctaagcgtgttgcgtgcgtggagactgatgtgagactcgtccaagcctgactgaagcctgacgtcgaatcacatatcacctctttattcatgtatcggttggatcatactggccttcttcgacatccatttcagacatcgaagacgggagatataatacgtgtaaaagacgcatggagataggtaggaagatacaaaatgttttgaatagaagcacaggaagagaagaggatgataacgagaatacgaaagatataagaaaaagatccacagatacaacatcatctctaatctatgcagtctcctgatctaaagcctcgtatctaacagcagacttttgagcgcctcgtctagtgaatgaaagccaacccttcgaatttgccggtccaggcgagcttgttcgagagccgggtctagagtttggtctagagttcgagtatccagacggtgtctgaaagcccgatccagagtcacctgattctgaatctgagtccgaatcaggatcgtccatttctgaggaaagatattttgaagatgacgttgtgagtttatcgatctcttgaaagaggaggaacgagaagctgtaaatcgatggaacgtaccatcgccaaatagctcgttcatgttttccactgttcataacgaagaattgcgcgaaacatcagcactcttgaacaaaaagttagaagagcaaataccaactcacaaggtactccacatgtttctggatacactgtgaggtggaaggttgagaacaagtcagtacacaatcgaccgagatgagggaacgaggaataattgagcttacagaagtacacgactacaaaggaacagatacagaagaacgcatgcacaggataaagtctccaagcctgatgttgtgtcaatagtcaaaagcaagaggtcgagcgatcagcacactgtcgttacgtacatatagcaatatgagacttacaataagatcctgtagaaccggcgtcgcttctccaataatgaagttaaagaacctgatgcaaatatgggaattagttctccagtctttttttctttttgaaaacgatgcaataagacttaggtacataccaattctaaaacatacgttgttgttcacgtcagttgagacaagacagaggcaatggactaagaagaaaataaacagactgctggctgaaagaacgcgtgcaactaaccgtagcagtagagatcgacacgcccttggctcggaacgccaaaggcatgacttcaattcaaacacgcacagaaacgccagctgtatcaatattcagcctacgcaaatgaaaaaaggaggctaaacatactctcgggtggatagagccaaggcaatggaccccaactcgctccaaaggctgcattgaagatgatgacacagacgaccacagcgttggctgttttgattgccccaaaaaacaacgcgttggctgtttagtctcctcgcaacgggagctaatgaggagtcggagaggcaagaacgaaatatgacgcacgagtgaatgccagatcaaggtacataaagtagccgactcctgttaatgccaaagacatctatatattgattggttaaaaggagggataagctttaaggtcgtcgaatgaaacttccgtatcgcgagaccactggagaaaggtgagacgtacaacgacagctcccgagagcaatataggccttcttcccattcgatccaccaaataccatctgttgaccatccagttgaagacaagtcagtatcggcttgttgaggtccaatgataaagaagcaggacaaacgttggaatcgtagaaagaacgtagatgattccattgatacccgtcatgagaatagcatctctgccgatccaaccggcctctacatcggttgaacgagagtaagacatagagccatatcagtgatactttgtcatgtagccgagagaattgagtgttataaaagtctcacgctcaaaaaccagaggagcgtaatacgagacctgatttactcagttcgttcaccaatcaaagccccacaagaatgctgataagcctaactgatatcaataggtttgaacgagatcacaaatacgaacgacgttgatgccgttcagctgagcaaacatctgagacgaagcagcgatgagcacccgacctcggtaacgtctccacaaagccttgtacgatttgtcgttgattgctttctaaaaagcacgaagcacagaacatgaaactagtcagtcagttgcagtctttctctacaaacatgtgtcgcgcttgactcacatcagcagtaacaacgtctctaacaccttcgtactcctctctgacttctatgtcgtcttccattttgcctctgagcgcagcgatcactttgatcccttcatcgtctcgaccaacagcgatcaaatgccgaggagactctgggatgacaagggaaccaagggcaaggatgactccgatgatactgtgaatttgtggggaaaggaagggttgagctgtggctcattaagatcaagcatgaatagttgtgatcatgttaccattctgattttgcaagaaaaagcaagtttaaagggatgagtcttgattcaaacgtgaacgttatgagcgttggtacgtgacgaaagtggacaacgtacgaatggaaagaggaattcgccaggacagatccgacttgactaatgtttgaattagaaacattacatccggcggtatgagtgtagaagcaagaaatctgcttggtcaatagtggggaactcacggaatgatgcgaagtaatcaatccactgtatatgaccagtaaaatccaagattacatttcatgagtttctcagtcaaatgacttgaacgacacaaacgattaaagagagcgactgacgacactagacgcgtatccaacaatctaataaacatcacattggtattagcttctctgttctattggcgactttaatacagaagacgacgtacattgcctgtaaattccacgcagcctaagagccctcggttatgggctggtgagacctcagcctgataacaaggtacaatcatactgttttgacggaagaaaagacctcagaattcgagtcggttcgccattaggatctgataaatagcgaacagccactgacgatagcattcccacgccaaatcctgaaactagtctgccgacgatcatagagttgaaaccagttgtgaacgtctgtaacgctcctccgatgacgactaccatcatcggaggtgtgtgagcgatatcagtacacgtcaacattttggcgtttcattgtttgagaacgaacgaacagatgaatgaccctaaaccaatggtaaaagttcgacctttgatatcggccagtttaccagcaatcaacgatgtcactgtaacccatttgaccgtatatgagtagccatccttccattgtggtacaggctcaatcgttacaaaaggacagaattactcaccaaacgcgccctgttcatatgcagcatacaaggtcgccccgtacagcagaggatgtcagagacatgtcactggtcgagtagtttagaacaacttcagcaaatgatggaacgaacgatctctaaaacagacaccattgttccaatcttgaccggatcagggttctgaaagtaggcttggctgaattaacaagatttctcaatagtggcatgagaaaccagaggcatgcagcgtaggaaaagaggatgatgcaaggaatgaggaaatcatgaaggatagctcacaagtatggacccgttctattttgagcaaagaagagcaagagagtttagcaagtgctgtatcgctatgagggaagaaaagagagcatacatgatcccggacatgactctgttaatgagtaagttcaggcaaagtgtttcgttcgtctggtcagtccaatatgtctgagaacgtttagaaaacaagaacagaaatattgcctagaaactctacagacccttgatcgtatctataagttgtccaagattatcatgtacgtacagccgcacattgtgagcatcgagaccgacgagagaaacaaagcacacggcaaacaagatggtgaacagattagccaccttatctaactacgctaaatcaccaaccaggctgacaccaaactagaaaactaaagactgacccaaacaaaaacacacccagactagcaaatgtgctgactccgtagagcaatcccttcccgccaaatactccagtggattttccctcatttgccatcagttggtccatatcgtcattaggttgttcctgattgacatcgttgtccgaaggattatgtttgtttagaggtctttgaacctccatcgtttgccgcgtatttttccgatatgaaccgtgtcgaccctgtcgtctgtttcttcgtctgttttgcagctccaagatccaattggctcgatccagacgtattcttacggtcttgcttcggatgatctaacgggattgagatggatgggatggatgagagaatgagggaatgagtggagtcggctgagggcggatggttacgcagatggtttcggttgcaagctcgctgactaagcaatcgaacacggacgtcccagcgaaatccgcatacttttcattggccctacgacttctaacatcacccacgacaaactctcactttttcccatccagttcctcttgtgagtgtatgttttgttggcgtcaagaccagcatcggaccaaagacagcatctgattatctctctctacgtatcattgttttgtttcgtgcggaatatcgttgttttaaccggtcgggattggtttcgttgaacgtcaaaaaaaaacgataatcttctttttcactgccgcctctcgttcgcccgatccaccgtctttttccttgcctttcttttccactcagcaccctcacactcaattaatcaatatgcctttgatctggggacctttgggagtttcgtacgttgagcttctttgttgtctttctcctgtggtctggatggtcattgggcaaaggtggatgccgatacgtaccgcagggttctaatctgatgctcctttattatcctttttccctccttgtctgatctcttcctcttctgaaatttcttcaactatccgatctgatggatgacccgtacaatggacaaatccactttgattcaataacctattgcaaacggatcccttcatctttcgatcgactttcatatactccttatacttcttatatcccccttccaccgcccttcgatcatgtctttgcctcaaaacaaatctagggcttacgatttcatcgccgctcgacctcgacttctcgccgctcttaagcccattgccaacatctgggtctaccaggccggatacaggcagcttggactccgatacgacgacatcatcgagcacgagaacatggatgtccagaaggtatgccaccatcgatcaatcgatgtcctttctgctttgtatcttcttgtacttgatctcaccctgtgcttttcatctcttccacatctcattcacaggctcttggtcgactgactgcccgagagggttacgatcgagtttaccgacttcgacgagcgatccagcaggagatcatccaccgagaccttcccgagagcgagtggaccaagcctgaggatgtaagttttctctctatatctctgtttccactcagttcaactcaaaagagatacagaatgtggtttcgatatttgtattgatgttgtcattctttgaaaatttcgtttcaccacaggacatccgatacttgactcctcacattaagaacattgttgccgagaagaaggagcgagctgcttgggacaacttgactgtcaagaagtcggcttaagcatctttcatgagtttccttttctttatttctcgtctttttcttcagtctaaacccgtagtgtcgtatcttttctttttcctctctttcgcgttcaagaaattggatgaaacattaaagaagagacacgaacgagaacatgaggttcgcgttatcgatatggggaaacgagagggtagaatcgaatgccgttttctctttgtagaaatcctcctttaaagcagttgtcttttcaggcgaaaggtaacgtaacgtttggcgatggtgaattagaactagaatcaggatttcagcgagtagattgaaacaagaaagcgatttgatctccgagtgctcgtggagaatgcacatttttctccacgacacgcctgataaaggaacatttcgagacaggtagagataaataacaagtcgaaagagaaaccttttgatcaaagctcttgtaagatgttttgtgattgcatcttgccagtatcggcgctctcacaagcactttttagtgaaccaacaagaatctatccaaacaatcatatctctttctctccctcaatttgattccacagaactccatccaacccgaccaatctgatacctagtctatcgcatcccaactctcgcgccaatgtcctaaccgcttctccatctttcttgatctcttcctccgtagctgactctgatacgatcgggtctgtagagatttcctccaacttcggaaacgcttgccgtaatctatcttgaatttttgtgtcagccaggaaatcctgaggtctgggaaaagagtcttgaggttcaagtccaggttcagttgttatccacaaagaagtcactgttggatgacactcttgagcgagaacaagagaggccagggtgcttggtatggacatccggtaagcgttagaaagagtgcgggtgaatagtcggaagagatcgatggaaggtgtcgtcaacgagagctctcgaacggtgagcgatagttcagtcaaaaggactcgaagatgatcgaacatggggacggccgataggtctatcgtcggggacacaggtgattctgggtcactgatctcgataaatgttagaccttcgagtgaagaaagatcgaatatcgttcggagggagaacaagagtcgagtgacggattgccaaccgtcagattctgccgaaaggacctcaaggttccgaatggaaatccttcgttcccagtcggtgaagcatagaacttcctcctccagccctctgagatccgctccaatttgagcttcatcctccttctctcccttctctgcatctgcctcataatcgtcgtcgccgaatcctggcgtatactccaatccaattgatatctgtaaattgggaaagtagtcctcccggtcgcctacaagatcatagcaattcgaaggaagagaaatgtgttttaccaaagaaccaaacgagggtttgctatctatcgctccgaagaagttgtcgatgtcgacagccatgaggtcgatatcagagtaaagaagtggggtaatcatgttctgtgcaaaaggcagcgatagtcagttcttattacaagcagagaggcctcaggtaaacgaagaagaacacaaataagagagagagcagacgaacccaccattccctagagacgagactgaattttgctaaatcttggtacactgcccgctgcctctcctccttggtcgacggatcgtctcgataagtagaatacaagtctaagtgtcgataggtgacgatcttttgatagatcttgcttgaaaacattgaagacatcctctattgtatgcgaagcttatgggtttcagcctcgtatccttgtgatgagtgaaaatttaatgaagaggctgactggtccagtgttcatcttctacaggataacataggtttaagtgagagaagttgttggctgaaaatatgaagatctgtgcccgcttgtatcttatctgatttcacctaataatcaactactgatactttgtcctctgtctcttcgcaaatcccggtctatagatacatatgttcgtacaagatacatttcatcgtatagaatagaagaaaacagttgcatcgtatgatgtattacagccggttcgatgtgctaccaactggagaatgatccgagaaccccgctagcaacgacgaccccctcaccctcgcgtctctcaaatctttccaactccagcgttcgcgagaacattagccttcacactagaagctgacgtggcaggtgccacactgaacccactgaacgccgcgaaagctgaagtggaagttccagcaattgatcctgagcccgtcaaggtgttcgcctgacacactcggccgagataagacgagcaggaagctccgttcgaactcgtggcaacgaaggaggaaccggcattcaaagcgggggtctgaacgttctcaaacacattaccttcaatgacagtgcggcctagataaataaaaacaacgtattcatggttgacaaacgcataagctgagacatctttttagtcgatcaaagagagaattcttacctccggtctcgacatcgaaagcatgcccaacgacgttctgcgtgtttgaaagtaaaattaattaaaacggacccagtcggagcgaagatgtgcgatagaaactcacgctccaatagttgttcacgacatgaagtacagtatccccttgacctccgactttctgtaaggttgatgaagagtacaaacgtatgaagaccaggcgattagcccattcaagaaaagagagagagagagagaaggatagtgtacttacgggtcctcgtctgacgatcagatgaaacacataaacatcctaccattagcgatgatgcgatagagaaagatagtgcgtaaaagtctcacccagaggtttcatgaatgtaattgccgctcattgtgattctgtcgttcgatcccgtggtgtaaatcgcccagtaatgctttccgttgcagctgaatgtcgacatgaccaattggtgatcgaaaggaacggaagaggtagatttgttgttagtctttgaacaacagacgtagcattgaggtttaccaagcgagagcacatacgttgcagaccaggatgtccgaccgtcaagctcgctgttagtgagggcaactcgtttattggcgccaacacctgcaacgaacatctgtctgccgaccaatgagacctatattgataggattatccagatacgcatgacatgttgcatcaatacgtgattgtaatatttgttgagagttctcaagagatggctgtgtccattccaatcatcaaacagagaattgataggacaaaggggtttacgtaccttgacgtggtcaacccagacgttgtcgcttccatcaagcgtgatcccatcacctccccaaatatattgagggttgagtgtgtggatatgaacattcctatagtagagaaagagcagtcgatggtgagcatctatcagcaaacacaatctaccatgattgacagatcatccaaaaacgtactgaataatgacgttttgagcacctattgtgttgaagtaatatatcagaagacatggatatcaagaatgagtcattgagctcggaaatatgttccaacaattgcacatgattttttccgaacttaccagccaactatatcaagagaaagcaggagtcatatcgatgagatttccatgatagttcacgcttttatttgggaaagaaagactgatccacgtaccctgagcccttttcccttgaaggaggcgttggcgccgactccgaccaaagacttgttggatccctgagaaaaagcgttgtaatggtcttgctgagtgatctttctcacatcatagactttcgttcctgttaatgaagaagaaacgagaagaacgaaccactttgatcgggttcaacgcggcattgtcgtaagtaacatcaacagtggtcactcctggtccggcgtttccgttcgtgcaccttacaaaagtgtacagataccaaatcgaggtacagaagtaagatacattcagccgggtcatccgaattgatcaactcgagtagctcggacttcaaagatgtactgaccagttagccaggttgatggcatcttgtccgcccgcgccagggcaagtatctatacgtttccttccgtgtcagaaagttctatcatgatgaagttgacgcgagctagagatctccttactcgagtctggccggcatcccttagcggtagtagttccttcggttctgattagtaggaaacacagagaaattagtagataacttgacaccgtgagaaaaagtatctggtgcacgactcacccgataaagttctgctcagagttgatcaagatgacccgaggactaaaacacctcgaccgtttgataaagtgcaacatgagattccgaagatgaaggtttgttgagctttcaaggttagtgatcttttcttacgtgctgtcctgtagccattgaactagctgatctcggcttgagggataggccggggcagcactccctcctccagtcgtaccggtctgaaccaaggagaagtctgttaggagtatcgaaccccacgagaagctcgcgcagaacatccactcacagcaaatccgggagcggacccggttactccagtactatgacacatgttgttgatatcaagcgcaagatgatttagctgtctgtcagcgatagacgataatcagaggcacatatacaaggagaaacctacacagcgcgagcttggatgttgtccatccgagctggaccggcaagaacggtcgtggctgagatgagtgaggtcaagacagagacggtagaaaaaatcattgagcaagtatcgacgatgagtgggaggttgaaggaaagatttgatttactcgtatcaactcttgagcccgttttctttctcttttatatctcgtgcattcagttctgtttgaagagtgtgcttggcttttctcacagtcaaacatgctctgcatattgtacggattaacatagtcccataaggttgcgtccactcgaaggaatttgaaatctcctccgaacgaaccagtagagctgatgactggtcaggcgctttggggagtttgacaataaatatggactatagacggacatagagggatgtctgtcggataaaaaatcgattgtcgcgtgtcattggggaagaggaagaaacccaccctccggaccggcattcacatgaggagaagcttgtgaggaaagatgatagacatcggatggtcaacctaaagacaccgatgcgagtggtagttgacatccaatcccgcgtgagttgatctaaaagagaagttgcacgtggtacatcggtgaacgaccatgagtctgggacagggatgtcaatgaagcggaagcggagacggcaatgaaagtagaaataaacacaaaaacaggaatactgaaagtaattaatcaggaggatgaggtcgtttcatttgtatagccgttaaagttatgcatacgttgattaagtgaagatcagcaaacatttctaaattgataaggttcttagatcagttgacattctcttggaggatcttctgtttaatcgtcagtgtcattagcatttctccgaatgtcttgcgctaaatgtgaactgtttcgcctcctgatgagcgtgtgagagacaacatgatggtgatacttgcaaacaacatggagggtatcacggatataatgttagggttatttctggtcacatgacacgccaagtaaggattacctgcgacctgcttctctcccaacagtgttagtagcaaacgacaacccgaccatgccttcacctgaagaggcttcgagcttaacttctcctcctcctccttcagtgttgactgaaacttcctcaacagatccgtcttcagttcccgcttcattcgcagacttgggactggtcgactcgctctgtgaatcatgttctgcccttggcttcaaagcgccaaccgaaattcagaagcagtccattccgctagctctacaggggaaggatcttattggactggctcagacaggctctggaaagacagctgcattttcactaccaatccttcaagcctggctgaaggatcctaaaccgatgtttgctttggtgttggcacctactcggttagttcggtcggacttttgaagctcagacagagcactactcatgtctggtcattattctttggtaccatctgaatacagagagttggcccatcaaatagcaaacgacatcgaaaatttgggtaaagctcagaacgtcaaggcagctgtgatcctaggaggagaacctatgatgactcaggcgattgctcttgccaagggtccccactttatagtagctacaccgggaagattggtcgaccatattgagtctactaccgggtttgtcaagagctcggctgggagaccctcgctacaggatgtcaagtatctggtgtgttcttgcgcgctcatgtccgtgtctgtatgtttgctcatcatggcatctcgcttactattgtttccctatatatttataggtccttgacgaagccgacagagtgagtgccattgagagtcggtcatgcttcccaccttgaatatcgctaagcctgttcatgttggtacagctcctcgacatggactttggaccgtcgatcaccgagatcctgaaacacattcctagaaaacgtcagacgttcctcttctcggctacaaagaccgtcaaagtggatgctttgaagcgagcgagtttaagcaacccggtctcggtcaatgttgtcgccaagtatgtcaaaaggctgtctcgaattcaattgtccttcgactggtagaaagataagatcttaagtctggatctgatcgttttctctcctatctcaaaactcgaaaaggtactcgaccccggctacgctgcgtcagcaatatgtatcttccccagcgacggaaaaagacgttcacttggtatatctggcatcccaattcccagacgaatcaaccatcatcttcactacaaaagtgacagaggctcaacgattgacgttcatgttaaaggaacttggattccctgttgtgtctctgcacggtcagatggctcaaccagatagagaggttgctctaaagtcattcaaaaaggggaggaaacgcatattgatagctactgatctcgccggacggtccgttgtgtcctttttctttcggtctttcttcttgaaccttctctgtaacactgacagcctgccttgacgttcgatcgttccacgtataaacagaggactagatatgacgaccgccgtggacctcgtcatcaacttttccctaccgcaaacacccaacgattacattcacagagtaggccgaactgcccgagcgggtcgtacaggccgatcgattaccgtgttgacagagtttgatatccaagacttgaaatcgatcgagtcggctacgggtgttcgaatggacgagttcaaggtcgacgaaccaacggtcggcttgcttaaggagcgagtaggcgaggcctctaggatctcggccagagagatgagagagttagaaaagaagaattcgagaggaaagagaaagagaatggacgggaaagggaaggatggggctgatagggatgatgatgtcaagcaggcagggatcccaacgagggtaagcggtgttgggaaaaagacaaagagatgatctcaaagatgattgtgtgtaacttttcttgaacacaatgatgaagatcgcatagaatatcacagagggcggtctcatccaaaagatataatataggcaaacacaacgatgataatgattagtaattaaagagtatggtctcagagaacgtagtgaacaaatgatatagcgatgattgtaagcgaagatattttagagcatgggcggaagagataggtaacgattgtaacacagaaaaggagacaaaacaaacatcttcaagggaagcgatatcccatggagaaaggtgacaactactcttttgtatcttctaacaactcgacgtgatctctctctgcaggcgctaactccagactctccctcggagcttccagctctagggcgttctgcaactgcattaccctcccaacgcccaggcctccagaaagagtaccctctcctggggaaaccatgccagtagactggaatgaaccaatagccctggatgaagatgcacccgaatgactccgttctctagtcgataaccttcccggcgccagcaatggctgaggcgggatgtttgagcccgaggtcgaagttgaccctgatctggtagctctagtttgcccatactcaaactcgcccgacggggtcaacaacggcggtccaagtctgacctgtcctccttcgatggtaacattttcctgtcctgatgatccaagataactgtcggtaacgctcgctctagaatttgctcgaggtcggttggctcgttgggcacgacctcccattccacctagagagtataatgatactgtctcgctagcattcgtcatcgccctcggtctagtaggtcccaaggtcattggtgaagacgtcggaggttgctgaccgaaaggtgaaccgtggatagatgacggggaacgagctttgcgaggcggtgtcaccggtgggacggtgagaagagaggtgttcgctgtgaaacttggtcttcgacgacggtctcccatcgagggagaacctggggtgagtatcgttgaggtctcgtttggagcatcaatcggtgggctcggaagtgggatgaggtggtgttctgcctgggaaccgagggcaagaatagcgatcaccggattagtgataactccaagaatcaacgcgtacaccaacttgatgacctaaagtacaaaaaaaaaggaactcggaagcataagtatttacttgtctgccaacatccagacaggtacgacgacaacaacgacgacaataacaacaagtgaaagaataaggaccgacctgaggagcccacttattcccgaggttcccgtttccatatattggtcccagaataagcaccgccagacaccaaagcgggaagccaaagaatataccaatccccaagccttggacagctgtccaaatcaaccgtttaagccatgttcgaacaggtgcccgttcgagaagaatattattttccgatccttcgaatatgaatctgatcagcatcaaccagtagtactttaatcccttcttccttccgtccaaggcttgcccagaggaggccatcgctgaagataaggctttctcttgatttgaaggatcatccggatttagcctccggttgaacaacgtagccgggtctggaaggtgagacacatgagggtacacgaatggcagaggcgcgattgcactcgaatgaagatccgtatgaacgagtgtcgatgtgatgatcatcttgaggatagtaagcgtgcgcatgtgcatgtgtggaagtagaaaaaggtgattaaaaaagacctagccagatggcttggtagatgaaagagggagaatgaaagaaagaggagacatacagaaacagctgtttgaatcaaacaagtgacacccagatcacctgctatcgtgttctctttgaacaccctatatcgagatgcgcgttagtagaagagcagaagggaggcttcaggggagaagaggagaaagtacgaaccacatccggacagtactctgacttgaatacactgacaaccccaaacccaatccatcaatccaaacatgtccacataaacaatgaacggatctctgtcaggaaccagaaagaccaaagcaggaagcaatgaacagcagagaacaagatatacgactcacttgcgtacgctgagcacatccaatatccaaggtgagagaaaaagacgggcatagttgttagtcatactgtccgcttgcgtccatcctcgtctgttctctttgaccgggcaaccccagagccgaaactattgaacgcaacccacaacaacggaaaggaacgaagaggaaaaaaaaaccagaaaaaactacgaaccaattccaaagttagcacctccatcgatgatccccgccaacaaacactgtgggacgatcaaataagcccattgcttcctgtttaatggaagcgggaatggaaagaatatcgaagccattcctctgttccttgctttcttctttcttggtcggcttgttggtcgtttcctggtctagttccttgctcctggatatccgtcgagtctctaatactttcctcagctctatgttgatcgtcgtcgtcgtcagctttggggtggatgaacggacggactgactgagtcaaggaatttgttgattaacttgacgatccccacttggcttacgtcatacgtctctttgcctcgcctttacgtgtccgtctcagtctctttatgccgtagatcatgtgcgtgtatactagacgaccaacatccgacaacatatcagataaacagtcagatcgaagtagaccacgatggatttcttttccgttgcgctttgccgaggacgagaggatctcacagataagacaagacaagacaacaagaggaactcgacagtcgaaaagaaccgagacagcctccaactgtcctttaagatttatctttttaaaatatcgagctgagagaacgaaaatgagaaaaagagagaaagagagagagaaagagagagagaaagacggcagtgatagcgtaggagtggaaccggacaacaggaaattttcgttttggttttgttggtgaatatatttgaaggcgatcgatttggttcattccggtccggtcgagttggtcggggtttaaactcgaagtttagcaagaggaggtaataaatataaagacggaaagaggaaagagaaaaagagtagtgatacagctttaaggaggaggtggagaaggaaggaggaaggcgatggaggaagcagggcagacacacaaacacacactggcgaagagaaatagaaggcgaggccaagggccactagaagaagagtcaaagggaagggaacaacacgaatgaaagggtggaaggtgacagaacacatagaaactcgactactcatcctcctcctcatcttcatcctcactatccgactctccatactcattcctgagccattcctcggcgatgacatactctcctctgactttctcgtacgccttttcgagcaacttgactcgtttctcctcagcagccaaagcttcttccttcgcagcttccaagatctcgagttgctctggtgtgagctctgcggaatcttcgtcgaattttggagatgacgtcgtggacttgtccaatcgtgatgccctaggaggaagaaggaacgaacggataaataaccaacaacggtaccaatctgagatcaaagaacggaaacatccaaaagatcattttggacacctacttgacagctttgtagacatcttttgcctgcagttggatcgtctcaaaaagggaagaaactctagcgacaccaagtgctgctgaagatcctttcaggaagtgagcaacttgggaaacagtaagataatcctttgtttttctaaggtagcaaaggcatagggaaagaagatagaaataggatgacaggaaacgcgagtcagagacagaagtcttgggtaagaggaggggaagaaggtaggagggcactcacaagctgtcacccatctcgtcaagcttttccgggacctgttcgaagtacgtccagacgatacccctggagaactctcgttcgtcttcgtcgtcgtccatctcttgaagttgattaaaagtctccatgtctgggaagaaggaaaggggaatgagatcgagagcttatgtagaaaagaaaggaacggaagcgagatcgtaccgatgaccggagttttatcctgtattggtggattttcgtagttgagaagaaaatatgatgatgagtcagtcaaaatgaacaagtagagcacagataagaagtgaaggcaggagagggagagagaaagagagagagaaaacggctgggagagaaagcagtcgagaggagtatgtgaactacattgaggcgaggagaataaagatcttcgatctgaagatcaaagaaatgcgacaaaatgtgccaaacgaagatcgaagctggtgcgtgatgatctggtgaagtatgagatcagagagagagcagatggcataaaagaccaggaagcaagagaggtagtccaggggaagagaccaaaagacatcatgttgattgtctaacccgatctgctcattcgttctctccgtctctgttcgtaccgttttccctcttttttccctgtgtaaataaatgaactcttccaattttctatttctcctttacaataccagggtccggactcgaatcaagggaacaaaaggataggagagagaccgggagaataggacaaattgagaagagaaaaacaagaagaaaagacaagactaacaactttagtaacctcgtcatcgacctggtcttcagagatgggagccgacgaaggggacggcttcggttccgtggtgttagaggagctcatcaaagattgtgggtttgggtagtagtggtgttgtagttgatggttgcttggatcgaacttgaacagggacgaaagctatgactccagagtcggatcgggtgaagggaagaaaaagaggagtggaggcgtgtatgcaagagaaaaaaagacgagggagggatgaaaaaaaggagggaccgaagggaggcaaggaaaaaagaagaacaggcgatggaatggaaagagagtttccttttttctgttggtcaaacgagttggttccagacgaagactgagagacagactgggatggaatagagaggaaaggaatggaaaggcagacaaagaggagaagtcgttgcttggagttcgttcgttcctcgatccgggattggcagggagaaggttcagagggcgagagggcagagagagggaccaggaacaaggcaccaggcacatggctttgtaaccataccgtaacctgccgggtacgtcataatcgaatatcccgccagccacgtgcgcagctgagaagtctccaagtaattatgtgcgtacgtcagctgtaaacaaagttccacgagggttatcatattggacacaacaaagtgctactgaggtatcactcatggcgtgtgatagtcatcttgtattatgtttcctaaagcgtgttcgctatatgatgtcgttgtctgagaacgctgtttatgagtcacacttatgtgtgctatgtaagctcgctacttgtatcgcctctgacgcttttcattaacgccgtccatgatacctctgtgagatcgtccttatcccatgcgtcctgtgccatagtctagagatcagaagcttgaggccgcttggcagcaaagaaataacacagtcttatttcgtcgagatcaatccccagaagtttaatttacctccgatagtcgacggtcaaatcaatcggcaacacaagatttcaaaactgactgagtaagactcgtgaagtctctgagttatttggtcattgaatgaattcgtttgagctatgatcgtgtctgtatgctcaaaacatcagatcagaatcttgatctactaccagtcacaaaggatgtgaatgaagaaatgatatcagtaattccagaggaatcaaacagaggagctattaagtatcagatgagaagtgacggcgctcatattcaagtatttgccaacatcttcggatgtgtgcattcgcatatatgcctactgcctatctgcctatcgcctatggggtggacggttctccatcatgttgaccatgaaattatcatttgcttgtatcttagcccaacgaagctattcatagatgcccaggacctattgcctatcccttatggtaagttttgtagagcttcttatgcggacatgtgtctatatggccagtcatgacgacaccgttacatatcactgcctgcatgtctatagtgtatgaagctgaactttatagctcgtactgttcgccttcgatacatcctactgcttatcgaccatagatcgttactcactacccctgtacctattgtaaatacatctgtgtgtcatcacgtacaggcttgagatgctatcacctcttacctctcttgaaatgcctgtcctggttcatgttcctgagctacacgtgttgggttcggcgaacagattggttagtcaacgatgcaagggtagtcacgataaactcggtagtcaccgccgagatcgtttgggacgttcgttgcaactcggtcacctccttcgcccttgcatcttacttgcttctttcttgctcctaccgctctttcttgcgcaggctctctctcctccttttgatcgacagggaagcagacacccatctgttcctccccctaattccctcttactccttcctctcctctcactcttcatgaatcctttacttggactcctcttagctttctggatcctagcaatacaagccctcgcccaggtgtcttcgttatcctcgtctgcctctgtatcacctactctttcctcatctgcattttcatctgtttcttccttgacctctcctacaactcctacctcttcatcgtcctatctgtctgcatcttcttctgcctcaccagtcatcccatcgttcaccgctagcgctctcccctcagccacgaattccactcttcttccccagtccatcaggctagatgtaccatacggatttgcaggcgccgctcttattattaccggagctgggctctgtgtgctaggagaaggaaatagatggcaagtttctctttgttcgacgatctgctcagataagtcgcctctaaagccaacccaatttgccttccttctcaggacctccctctttcttgctccgttctatgccggtgcacttgtgacagtgacgatcctccttcactatgctctcccgcccaccacacagagtccaccgagagaattgatccgaggagtgtttgtcctcatcgccgcgctcgtcggtatcatcgctggcgcggccggtgtggtttcgttcaataagtcaaagtttgccattccccctatcggaggtttctctttcggctggtttctcatggccaccaaacaaggaggtctcaccggtcagagtctcctatggcgatgggtattgatcgcaagtgtgtccatctttgccaattcttatcgctcttgatttgcatagttatcgcatgcttatggatatatctcgttacttcataggcatctcggtgggtttcctggtgataggcatgctcgaaagattttaccgcccagcggtcattgttactaccgcctggtaagcccgtttgattttatattgtagtctgatattatcttcttgactgtttgagacaactagagctgaaagaattgatggtggtccgtcattccattctcttcctggccctttataaggcttggagcaagcgctttcgtgagacaatttcattctgttgcaccgagattctatctagacagatgaagctctgactcaatttcgagtgatctctcctcctattcatcttctctctttctcgtgccttgtatctcggacaggtgctgggacttgactgtttcacgagagctggattgaaggagttctatatctacaatctaggatatcgcaagtccccctcttcattcaatcaacatattgaacttcttgcaaggagtacgcaagcacatgctgaaatttccttgtcttctcgcaggatccatattcacgtcagagatatcggattccatcaatgccgggtttcagtttactcagttgatgcagatcgaactggccttgattggcattctcgctttcctagggtaaagtctttttgtcggcctttcacttcgtctactcctacacctattgatgcttatagattgaaagcctgttttcgaccctcacagagcggttcttcaatccaagttgtgcgcacgcctgggaaaggttgacgccaacgccaaggatagacgacgacgggcgaccgaggacgagaatgaggacgaaatcagaaagtctgtacatgctcaacaactggctcgatgggaggccgctcatggatctactgtcgatgctggtgtcagcgctacgagggcaggccttgaacggaaccaatctgtcttatccagcgagaaataccagggttcttcagttttcgacaagactgccttcgattatgtgcctacgttaagcctgacgtcctccaaaacaaaccctgcccctatgacaatggcgacggcgactgcaaacacaggagagatgatcgagacaaaaacggatcaaccttggaggaagtcaactcaagactcggagtctcaggggttaaaaggacaggccgagttggacgagaaacgaagggagcagctatcactcgaaattaggaccgtcagaagatctatagaagctcttaagacaaacacagtttcctccttgttcccgtattctccctcccacttcgaccggccgaactcactctcactcttgtccgactgtcactcatcttacagtcgagcttttggtcattcgccttccgtaccgggaggcagtccgagaactgaatgggaagcttatctagccaacagacagatccaccggccgttatactctccatcgaactcaagcctaaattctaataaagaccagacaccttcgtgcgctccccagccgaaagaacggcgaaagatgaattggacagctgaggattcgaaagaactcctgaaagatcgcgcgggtgaagttaggaaatctccaagagaggcgcaagaccggttgtctctgacgaggacctcaactttacttagctcgggtcccagatcgacccctctcaatgatgctgctcgcaacatcggcagcttacgggagatgaatagggcggagcttcaggctagacatcaagcaaagatacgagcgttgcagtcccctgtgggtgagttgtttgcaagcttggaggccagaaaccagtgggaatcaaaacgtcaagaggaaagagagctgatgaagaaacgagagaccgagtcgagagataaggaaaacgcaaagagggaaaagatgattgagctggaggtctggagagagggcgtgcgagtggagctgtgagtgaggcttcctaaaagtgaacgaggactgacttagcgatctttctctgagttctactatcaattctatattgatcttatcattatcatcttgcttgtaagctatctcgtctcataacataacatcgtatcgtatcgtatcatatcgttttggctcttttctaccaggcctctgtctgaagcatagtctttgacttcagcatactctctttcttttcaattcgatcaacatactttcttcttcggtcatctcagatacttagacattaattatactatcaattattactggacaaaccattcactattcttatgtaccgggtttatcccgctcttctctgcttgtatcctttccgatcacatgtctttgatgcagtcatgttcgtcaactttgctccgtggaaatagtccggggtagaggaaagacgaaacggaagaaattgcctatcttatcggtcgatcaatttcaccgataaacaacagaaccgcagtaacttctcatagataaatcattcaaccattgccgcttgtgtttgtggcgttcccggcgacgtctcattacctctcgagggtttcgttcaccttaacgaatctgagaatgtctgaggttcgtagaaactgatgattaaagaagaaaatacaacaggagcagcaaaagcggcactaggctgaaggacagcctgaggtttctttgtattcgtgaacatagtccagttctctttcgtctttctgtcctacctcgttacccacatcatataccgaacctgacacactgtgcaacccataacaacacgaaacttcagcagacccatccgtgtcctgttcgagaaagaccacacccaaacacatcagtcagagagaagagaaggaacatcagatgaagcaaccgttctcattaacacatcctctactcttcctaagcctgggagtctctcaacttgcttcccaggtgaaggggcttacagcttccgaatggaggaccaggagtatatatcaggtaatccattgcgttctatgttgtcttcttacttgaaaatagaataaaattagatgctgagaacctatgaatcatgaaaagatggaaacgtgtccaagagttggtcatcaactgatatatatatatattgactgactgcttctcatttggaatgatggacaatagcttatgacggatagatttgccctggggaatggctccacaccggcatgcaacacagctgcccaagttttctgtggaggcgatctccagggaatcagttgagtctatcttgtttttctcgatgagtccttgccttccttgtcgatcaaaagaagtatactaatggatggtgactgggttggtgctcatagtcgacgaattagattatatccaagggatggggttcgatgcagtttggatttctccggtttccgctcaaatcttagacgatactattgtaggacaagcttatcatgggttcgttcaactcgcctctttcagattcctcttttgtcattctttgaaggtctttttcagagactgatgatgtaaattccttgttcgcccttctttttctcttctggggaaacaaacctgctgggtgtacaggtattgggcatctgatttaacaagtgcgtgtgatggtcgcatcgaagaaaaatagcgctgcataccacctctccacacagaccatgctgaactttcttctttctcctatttatccattctcaagagctgggcccatctccaacggccttacaagcactctcttctgcccttcatgaccgatcaatggcactcatgctggacgtcgttgttaatcatgtcgcctttgcgctagccgtttcgacctctcagttcgacccggctgtaggacagtcctccactggagagatggatggagtctatggacctttcgatctaccgacggattaccatatgttagcttgtaccattgaagatggaaaccagacgagtgtagaacagtgctggttagaacctaccgtaagacctttcttctttcttctttctttcacattttctttggagcagaatagtaagctgatgaatattcctaattctctgaaccactcgcaggggtcggtcatcacacccgatctcaatacatcatctagcaaaattcaaaatgcgttatacaccaatgtgagaaacatcgttcagacatacgccatcgacggaattaggatcgacgcagctatgcacgtagaaaaaccattcttgaaagggtttgagaccaacgcaggagtgttttgtatgggagaggtcttgaacggaggtgtgtcttcttctcatctcctacatgtcatccatagattcatgccttcaacatgtttatcacaattgcaacacatctctttctgggaaaaattccaaaagatcctctctatgtcaacgactaccaggcgtccgctctctcttctaccctcaactatccaatgtattttactctcacgtacgtttcccttcgcccttttttcctattctgagtcctcctggacgcactcggaaactcacccactcctcaatggccccgcgccttttcgttatacctagccaagcgttctctgatacgtcaggttcaatgctcaatctcgccaacatgatatccacaatctcgtactggttcgatgattcgacggtcttgggaggctttgcttctaatcatgacagtcagtctgacatgattgctcctctcattctcctctttgtacgaagctttcagtgtgaacgagctcgaaatcttttatactgaatctctggctatgcgtttgtctatccagtgccgagaccaaggagcatgacaacggatgatgcagtttgttctattttctttgatcacaaaaggaaaagtaaggtccttggtcaatgactgatccatgcttgtgtcaatcttatgcatgactaaatttatacagcttttgaagaatatgttcacgtattcattcgtggccgatggaattccgatctggtatgggtcttcctcttctggtcttttccctactttgtcagtcgacaacaacatgtccttacaacaaatctccgttcattggttgacccatgcaggtactacggcgatgagcaaaatgcgagcggaggctctgatccatccaaccgagaggccttgtggaccttgggtgacgaaccttacgatgtttgtcctctctatctactctttctcccaattgattaattcttgttgtttgaaacatggcactcaacaaaagttgtcttgcaaccaacagacgtcttctacactgtacgattacgtgacaaggatgaatgcagttcgaaaagccgcgttcgtcctttcaacttctcttctcacttggttgtggtctttaagtctagctaacatccttatataaaccgcaacgctggtcttcatttggtacatatagtgctggggcttcgctaacgttctacacgaccaaagcctccgttctcattcagacaacccactctattgccatctccaaatatcctctactctctgtccttaccaatcaaggatccgctcagtcaggaacagagagtctaacgatccagacggcttatcagccagaatcaatggtggtcgatgtcttaagttgttcgtgttggatatccattcttctttcttcttttcttgtgaagatactctgtagtgatggtagtgctgatgtatcatcttgtcttcgggtgcgattgataggtgtgctttcgcaagttgattcttcaggctctctgactgttcatatcaattatgggcaacctcaagtgcgttcttcttctcccctctgagcagatgaaggaagaaaaagatattaatcgtcgtttcttttcattgtcattatcgccatctaccgatgggcattcacaaacaaacaaacaaacaggtcttcatgcctctgacatcaatcgctctggacccgccattttgcgcagacgtagctagctatctgacgtgtcaggacagaattgcttctcgagcatggagagggggagtataagtttgacaatcaagagccctataatttgcttcgtctaaatgtatccattcgttctaaaatatctcttatctttctcctcgcctttcctctcatttgcttcttccttgtcagttcttgcgctctactcttctccctacgttctttcttcgctctgctacctcccctcgtatttttccatcctttgtgtttttatctctctcagtatacctgcttctaacctcacctcgaccaaaccagttttgatcggagcgactatattcctactctcgttcgaactctttattctgatcttgcttttcacctttcgtttcggtccttgtttcgcagagttctcatcgagtatctctatatgctaccttcgctctcatgattaaagcattcattgtatgtgttttcggttgactcctcttgaaccagtgtttgtcaactcccgtcgtctaccagtaatcgatttcgatttcgacaagaagaaagaggagaggaagaaatcatgaataaatctcgaaacgacgagcaagagggtagatcctgtttgaatttttttactaaaaaaaaatcacggaaggagaatcaccatacagaacggaatggcggaacaagaacgaaatatagattaagattcggaggtattcaaatggaatgaacagttggtacatataaacaagatcgaaagcaaagcaaacgccaaggcgcatataaatataagcccaaaagacagagggaaacgaagaaaccacggggaaaaaaaattaattatagtaggcaataggtcgcatcctcccctcgaaacccgcttcctccttttgaaacaggatcaaagcctttgagcggaagaggtgacctagtggactatttgatgggcatcggtctcgtagtctcccaagtagggcgtcctacccggactatacgaataatccttgatcagatcatcgaatgatagacccatgcccatccctgtttcagaggagacggatgtcattgtggatgcttgacctgaagacatggcgtgtgaacatctagatgatatggatgatggggtagatgcatctgtatgaactgtagatgcttgagggtgtaagtttgaattaggctgtcaagttcagtttttgtttttgtttttgtttttgtttttgtttcgaaaaggaaagaacaagagaaatgttatcaatcagtcgtgtgtaacaagatgacctgcagaagaaggacggatagacatcagacttcaaatatgttcaactcacgacatctggcttgcaatttacatctacactgagtcttgctcccgcttgagcttcttcgaaaattgcgtccaacatattcgcctgcctgtttgctacaggaaccttctttcccatttggtgtagagccgagctgcaaaagagaagtagtaaagttgatgagcatcaaacaagaaaagcaatagaaagaatactatggctccatcaaattgacattgaaagacgtaccggaagacattgatctcctgactgagtatactcgcagccttttcatcgtctgcagatttccggacctggtagaatctcgcaaaaattcgacctccaataaaccaacaatgagcgattgttggatcaagagtagtcaaactgagaatgagaaaaaagaaactcggtcggtcagttatgtcgaatagaataaaacgaacgagaagggatgggacaaagacaaaggcgtactcgaaagtcgttgccgctaatttgaacaaaatagagagcattcctcgagctgcggccaacaccagagcagatgtaggttccgacatgttttctatgctgtttattgggaaaacagacggcaggttttatgatggagaggttcaggtttggccgttaccaagctgcgttgaaagatcaagtcctacttactcaagatgatattctgataaagagatgagcgccagatagccaagattgtgcactatatcggacaatcaatacacggtcagtacacttggactcaggagtacttaacaggaagaggagaggacaacagacatacctagaatggtatccttacagaccgagccattcgccttgacgggttccctgaactcctttggcaaggtggtcatgaaacccatgacgttcgcattgagcgtctgaaactttgggttattcctaggattttgtacgatcggtccgttttcgttcgaatcagaaccctctacgtaacgtaattctcgacgattaaaatgtttgactcgagcaaggagaacgagggctttgatagacaagatgaacgcgctagaagggaaagtgagaataaagtatcaggaaaggtctattagacccggactgactttgataagactctcgaagatgatcgaagaaaaagtacttactctgtgaattgaggcgggtggttgatgaacaagtcttctgacgcgagagtttgagggttctccacatcgacctgattgaccgcaagaagaaagaagaacgatggagaggtaggagttaacatcaacactgaaagttactgaaaaggacaccaaagtacataccccagccaggtattcatcggttcgaatggggagtgaaccagtgatatcttcctctgcgatcgtacaagcccaaccagacgaggtcattctagaaaagagattcacagaaagagattatgagtctgtaaaaggcaatcacagaccaagataacgaagaaggcaaacaagtagtccgacagatgttactcacgcagctcgatcagccgcgaaggcaaaccagaatattcggtttctcatctccctctcggtatgatccaccggctgaggcagcaaaccaggtttcatctccaagcgagggtttagtttgctagtcgagatacccaatcccagcggagggatgaacctggctgctaaggcggaggtgatccagtaaggcatccacctggccgtcgcatagttgaacgagctgagaatcaccgccgtctgcatcgcttccagcaatctcacaccttgaagcatatcaatgtcgagctgttccttggcccaagtagcatgcctgccttcgaatgtatttggatcgagcggatctttgtacttcgccataggacaaaaattatgccattcttcgctaggacgttcaatctcggcgatgccggagaacatggcagcagagcaacagattgcatgaagagtcgcggtcgaaggaaaggaagagtgggtgggtggataggtatcgaatgcgaacataaagcgagcctggaggacgattatgcgaatagaatcaaaacgatcaatgtcaggcgttgagagatgagatctgactcacagatgttgaacagttcaaacaagacttgaaggaaaaagacgaactttgtgtagagcgcctgagataggaacttttgcaaagaacgtttctatcaaggttcgcatcaccgacggatcaggcaagcggcgtggatatcccgggtagacgatattccttaagaacgcctcgttactatccatagggatttcttccataggactgtttgtcatcggatccgaaaagaactttcgatgttccttccttggttcctgtagacattcgttgttcgcagattctgaggtcatgagtggcatgtcgaatgaaaagtctgcttccggggatgacgaaggtaagataccgtccaccatgggtgagagacctttgttcgagtcgagcgatgacgtatgaggaacatctcgaatgtttgacgtcgtcggggaggaacactgatatgtcggcgggaagacgttggggacggacgaggggaatgccgagaaggaaggattgaaagttccggatgatgaatagtccatcgaatgcatcgttgagtcccactccaagccggatgaatttatttgagccggatgagggattccggggacaccattggaagaagacgacaccgacgacgtagaggggggtgctccctgagaaaagtaggctaaggagggttgatagaacgggtgctcgatagccgagggtgagggcacttctgcccgggacggtgattcatccaaactttccatccgatgctgttgaaggtggtaagccgaggagggagagatttccagggatggaacggtgcttgtcgacgacgagattgataaagcaggagagtctgattgggacgctgacggaacgacagccggagcaggcatcacaccttcgctcccgtaccatgaggatgaaccgaaagtcatggcgacgagtcctttcgcagcaggaggtgaaggtttgatcggttgggcttttggtgaaacagatctttggagttgtgctttgagtaactcattctccagaactctcatccgagcctccatcgctcgtagcttctcctgctcgttctccaccccatttgctcccgaagagatggagggttctgcagaggttgggactgccgaatgaccttcgattgtatcggatacctcggatgagaacgaatcctttttattttgaaaattcgagaccagttctgaagctgcacggttagaagaagacgaccctgaagtcttatcatcgtcccaggtacaggaggggtactctggtcgacctggagtgtccattgggatgagacgatgtgttttcatacaagccgcgcagtgaggtttaacggcatctaaaagtcattcgtaagatgtatagagttatcggcgtgagcgtttctgagattgatacgagcatgtggacagatttcaaatacttaccacactgatagacattttatgtgaacaggagaaaaagaacgagtcaagtgggtcaatggttagtttcagttgatagatgatgattattaatcattcgacccgttagcttcaacaacctagaaaccttcgaaagaagcccatccgtccgtgtcgtctaggtgtacatatctctgtgtgcgtgtctgaacccgtttccaacgatgtggcatgtctttcttaatccttctttgctcctcacagcaaatgacaccaaagacagggagaaaggtagggaagaatggactggtttttcgttgggacgcgcttcgtcagcgcgctctcatgcacgttttctcggctccgttttggctgataagaatgggagttgactcgattgacgcgtgcatccaaccgacttgcttcacggccacccggattgttgaaagcccaaactggaagtggatatgtgcgacaagggaagaacgacacaggacaacccttttatggaacgtgaagtggtatgagaaaaaaaagacaaaccttaagtttcttctttcgacattgatggcaagctgcccctcgcttgactggtggtcgaagtggttgacctctagctgtcgttcctattggcctgtttgacgccaaggccgaatgcattgaggagatgttctttggcatgtacggcaacgatctcctagggcgatgggatggtacacagaggtggatacgagtgtctgggggtgtgtgacgatggaggtcaagatgttagctgccgctctcccgtcgtcttgctggaagcgaaccggatcaaggattcgtccgggcatctctctcgatgcccggacgagacatttgaatcagattgcacagcattgaaagggctggtgtcagggatgtgacctgagtgttacacctcggtaaccttcttttggttctgttgtttctcctgcctcggtattccttatgctctctcattacatcaacatgcaggtatatagtctggtagcgcaggtacttctagcaccttctatgatctgttctcttatgcataatcgttggagtctaaggatgatatataagacgggtccccctttgccacccatagcatagtctaccaagtctgaatcctttgtcattccttggttccctagtactcttgttccattgttgtatcaaccttattcatacgatttccctgccttgcgctctcgtcacagtcaccaagctagagagcctgaacttccttcttgccagccctattccctgcctggtcacattcttgtaaccttcccgttaccctctgaatgtcaggaatacgggttaagtatcacgtgttctcttacgtgggttacccctacaggctattcgttccctccatcccttatgcctcttcgcccattttccatcatgctctagtttgcatggttcatgcttcatctttttagttctcgtgatctcgagcctctctaggctcgtcatatgtatatctttagtggcagaccaaatgcgcgaggggtcctgatataaaacggggacgccctcgcgccttcttggataagagttttcctcaagctgagattcttgttgaaacctcttatccaaagtatattgttaatagtttggtctgcttcagatatattaatcgccagagcctaagtgtcaccccgcgaaccaagtgattacacttggttaccttcttaacaaccgagccttacactgaacccggaccctgacagctggagtgtggtagatgacacgtgatcagtagtcacgtgtacgcttttataagtcacgtgcttcaacctgttcctctcgtttcgttctagttgcttgcgatataatttttttctttatttttttctcttttctagactctcagatcctgggttatgttcgtgaacagacatggtataatgatcatacaaagcaggcttccttcttgacacactcaaagcacaacacacccgtagcctggctgagttccacaaacgtagcgaacagataaacagcgtcagtcccagtgcgttcaaacagacacaaacgaacgacaatgttgcagattgagtaggtaggtaggtttcagtggacatgagtcaaaactccgcatgtacagactccccgctagggagcccgataggaagaacgaaggtaacagttgatcgagttctcatcactagacgtattcagggttgcttgtcggattatgtgaacggtgggacggaaagcaaaggaaaaaaagcacaatggctaaccacaaagtaaaaacaaactcagactaacctgtcgatgtgccgtctctccagtgacctgagcacgtccaaggacaaccgagcacatccaaggacgacagcccaggacaagagacggtgaggggtttgaagcagatgcgatgcgagaagagagaaattgaggaatttataggaatattcatcatgaccttaggtagattcttgatatgtatatttgataaaaaatttgattctttttcatttcgtcgcctctcctactttccctggctctttcttctctttccacaacaagcccccgccttctttcgtctttctctcgtcgcagtcctctcactcactctactctactctactccaaagccgatcgatcaaaaatgggaggtggtaacgtacgtggtcttcgttttaatttcgacttctaatcgttgggtctggcgtgtgggatatcagcttgtttccgaccaatcccttctcttcctatatgtttgctcttgggcagcaacgtgtccttcatatagaaatctccttcggtttctctcacacacgatggccatagaacgcacagagagcaaacaacaaatctgacggctgtgtttcttcacgctcactctcgcttaactttcacaacttacaggctcagaagacggctatggcccgggagaagaacgcgaagaagaacgctggacctgccggttccaccctgaaggtatgtgtgtttccatccgacttctctccagtcagccatgtcggctatttgtatgtggctcctcagctactttgaagtagcgtttaaaacctgaagctgcttctctcattcaacgagacacgtcaggcaaagaagcatatcttatcaagaaggaaattcatgttactaattgatcgttggtcgttgtctctttttattcttgcaacagtccaaggctgccgcccagaccatcgtctgccaggtctgccgaagtactttccagtcggttcgttccctctgccctgttctttctactcttcttctttcatacggaacaaagtcgagcaacagtatattatctaacaagcttgctaaaatctccgtccaaacagacctccaagctacctcagcttcttgagcacgcttcgaacaagcacaacaagaccgttgctgattgcttccctggatcagcatgattctcgaaagatcatgtcctttctttttctttgttttgctctcttctccttcttaatcatccatatatgaccttcaaccccttcttttttacttccttcttcactttaatcttgggcgtttagcgggcaattgagggggtaatagagggtataggtgtaccaaaggtgttgtctgctgctttcattgttgttgtcgtgatttttgctttgcttgtttgctgttttggttcaaaatttggaaataaggaattttcccgcaaattttaagaaaagttcttacgcacagagtgataccacgagaaagagaaaagagaagaacgatttaaagagtttctctcaaagtattgcatccgtgcgcactttcttcccacacagatcgactcaaatgcttcccaacccgaccaactctttggcctgagccaacaccacactcgcccttctctccgccctttccgcacccttcctcgccacgtcccggagatactcttcgccaccttccagcccgttctgcatcaaccggtcgagctcggacctgatcggcccgatcctggactcgaccgcgtcggcgacctcgagcttgaaatccttcatcgacatgttcccgtacccgccggcgatctccgccggtgagacctcgttcgtgggcgtgctctgacaggccgctaggatcgtcagcaggttcgacacccccggtcggcacaccgggtcgaatgtgatcccagggagggagtctgtgatggctgaacggagcttggattggatcatgctcgacgaatccgttaggtggatccgggacgaagcgtgcggagcggatttcgacattttctccgaagcgttccggagggagaggatccgtttcgatggggctgttttattgttgtttttgagattgaaaaaaaaggaaatatatatatacacaaacacccatcagcaagaaacacataggagggaacaaatcaagcacagcggcggaaagtcgtactgatgagcgcctggggagcagggaagaaaggcttgttcttgggactgaaccgatggttgaatgtatccgcgatctccctcgccagctctaaatgttgctgttggtcttctcccaccgggatcatcgtcgctctgaatcgagagaaagggaaagggtggaaagaatgcaagttcagcttcaattacgcaggttcgggaagagcgaaactgcagagtttagacgtacttgtagagcaagatatcagccgcctgtaagacaggataggcaaacaacccgagatgaaggtccgtttccgagattgattcctcgtccgccgagttcttaaacgtcgcgatctttgactgtatcaatgcaatcgtacagacgatcagaagggtcaactcgatgagcgacggtatcttatgttttcagagcgaggcgaggaggagagagagatctatgcgggtgggattaccttccaggtcgtcatgtttttgagcttgttcaccggggtgatacagttcaagatccaagctaattccgcatgttgaggtacctaaagagctcaaccagaggccaacgtttagagaaagaaggaagacatcaactcttgcgtcactctcaaggtataaaaaggcaagacaagcgaaacgaaccatatcctggaagtagagacaacttcgctcgacatcaatcccacaagccaaaagagtcgccagcatctctctcctaccttcgaccagtttgactggatccttcggcagggtgatcgcatgaagtcctaccaatgagtagtagatttctgtggaaagaggagcggtcgactggatgttgacccaggtcgagagtgcgcctaggtagtttcccagctacaaaacagttccacgaatcagagaaaataagacaagacaaaaacaaaataaggcatgcacaagaaaccatggaaaaacatcatgctcggagggaaaaagagaaaggaaggaagggtaggcgcacatggatctgaccggaaggttggatacctgaaaagatgacttctggatgtttgtgatctcgtttcctcagctttttgagcaatggctgatcgcttccttgattagctgtcgacggcgaagacgaaaacgatggcgatggcgatggtgatgatgatgacgttgacgaggaggaggaggaggatggacgagtcgaacccgacggacaagaacgtcggttcagagcgggaagtgatcgaagagtcgagaggcggccagccgtctgatagaccactggtcgaacgggaaacatctttggatataatctgcctggaggaacaggacaggctgaggagctttggacaagacgcagaggtgaacgagtctctcggagagaagacgaaggaaagcgagataaatcaaccggacggacggacggacggacgagagaagaaaaaacgaaatgtgttggaaattcgctcgctcgaaactctcaatctgtgtgcgcaaaaagaaagagagaaacaaataaaagaaaatgaaaaagacgatgagacaaaattctcttctccgttttaaatcatctatctcttttcaatgtactttcttgtttgtagaagaaccaaagatagagacaaggaaagaggattgaaaattgaaaattgataacgcttctcgaatttttcatggtcaaaggaaaagaacaatccatattgatacaactgtagatacatcaagcaaaatccttttatcgtcgaggggacttaaggcagaaacacccaaacagtccctgtgatcatgaaggcgagggaacccaagaacaacgtccggtcgagcaagagactcgatctgctctgcttcaacaacgtcgagtgagccaagagagggatgatgacactgattaaggattgacagaacgctggacgagggatagaaagatgcatggcacatggaaaacagttaggatgtgcgttcaaaaggtcgagagagacaggaggatggatgaggaacaagaagaagaaaaaagaggaggacaaacatcctaggaaggcgacgacccggacgtaatctctcgccgctatggacgcgcccacgcagagtgctgtgagtccgacccgtgccaacacaacgccaccgatcgtcttccacgttctggactgtctcttcctgatgctagctgccgaggcactgggctcgatggatgaagaagggggcgaagactcggaagcaggcttcgggtggttggataccacaggcatggtagaagtcggagataagattttagggacaggaatgggaggatataaacgcaaggcgttttccaaagtgatattcaactttgagagataaagaaagaacgaaaacccaacgcacacagatgagtacacacatacatacatacatagaaaagaaggatggaaaccaataaggatgagaagcgtaccggtctagtaagaagaggaaatttgaagagtggggtcaccgcgatcaaccaaagagtggcctgtatgatccatggaggaagccgattgatggtggataaatttctagtgatctaagggtggacgtgtgtgtcgattgctctcagtgagcaaaaccggatgagaggaaaagagagaaagagagagagagaaaaaggaaaaagaagagagtggattctgttggaaaaaaaaaaccagaagagcgtacctctccagagacatctcttcctaaagtccagtagccgatcgctccgaccacggcatagccgagacatgcggcgccgagggagagatctaacacccgtccgaattgggcgggccctttcatgtccctcaccagatgagggataatcgcatggataccaaaggcagagaggacgatgcccgaggactggaagatctttgcggtaggaagcagagagagctgggggagaggagacggttgaggcaaagagagaaagagggtgagagcaagggtgacgaagagaaggattgcggagatgagcgacatgacggagctaagggagagtacagagatgggggtgaacagagttggaaagaggacgatgcctccgatgatcttgagctggttggaagaaagtctgctatgcaggactatctcgagcgtgtcgcccatgagaatcaacaacgacatgctcaacacaaagagctcgagacaaaacctgtttgaaatggtcggtcaggcacgcggatgacagtgatggaaatcgacgacagaagcttacaggatcctggtggttgctatggctttcgggccgaacgcttttctggcgatgtcggcgtatgatcggagtgttggatcactgagtgtgatggcagccagatgccgagcgctatttgtgatttgtaggtatggatgtgagcgagaaagaggggaatggtaagcatggtgagcatggtgggagagcatcagaggagacgggcccacagatacgcacgttcttcgtaagaccagtccccagccgatgagcaaggtgaatgctccgatccagccggcttgagaaaaggcgtagggcatggccagcaggctgacgcctaccatgacagagacggtaccgacgacggcctgggcgaaggtggctttgcctctgggtccgatgcctctggaggatcttctgcgcggaggtcgacggcccaacgctcgggacgaatctgacgggttagaatccaagaatgctggcgaagtagaagacgccgggtgggcaggagcgggtgagttgttatggggagagaccgaagaggtcgttcgtgggatggactttcgaggaagagaggattggatctgttgagagatcaggagaggagttcgctcggagggatcgtttgaggacagggtggtcggtgtgggcttgttgctgtttgaggagggagaagagggagggaaggggtcggagaaaaagccgtagctacctcgtctgttgtcgtttctgggcatgggtgttcgatctcggccgctcgagtaatcgtcgatagagacgacttcttctggggacatttcgtcgaggccctccatctcccctaccgagggtgagctttggacggggcgctggtggtccgaacgggaacttttccggcgggactttctgttcggtggaatggaggatgtggattgggttatgggggattgatctatctgttggttatcgtcatgatggtcgttttcgtcgtcgtcagtggagttgtaagaaccttcttcgtcgttggatgcgtaggaccaattgtcgtcctggctggacaggccgtctgtgtagacgggctctgctctttctgtatctctgtagttgagaaacgagggtgatgaggggctgtgtgtgtgtgtgtgtgtgtgtgtgtatttgatcgtggttttcagaagatggaggacaagagaaaggcagaagggaaaggcaagataaggataggtgagattcggaatggatccatcagtcggccagtgatgatgaagacaagagacaagagacaagagactaacagattgctgccgtagaagagttgacctcttgcgtctgtagatgagcatggagagcgagagatgccagatgaaagctgagtgagtggacgagattctttcagagcacacacaccacatcacacaacacaaacccgacctacaactaaagagaatgtctagactggtagggaccgcgcctgtcgacgtctgctgggagggtcgatgggactgatggggttgctggtgaccatgctggttctgtgtgggcaaggggtgtatcctgaccggaggtgtggcctttgggtaagggttcgacatcggtgtgggtgtgggtgcgtgcctgtgcctggggaggatgccagctgggagtaacgatacagatagcccaggagatgttgatgaggtcgatctctctctcttcctcttgaggactgtgttgttctgatctttccttgctggtggtggtgatggtgatggggacagagatggtgatgctgatgctgatgctgctgatgctgatgctccttcttcttcttcttgtttcctttgggctctcgtcgtttcttctacgttggcaaagaagagaaaaaacgagttgccccgtcgaccggcttatcagtgtggagcccctggtgccttggttacagctcgctgataagccctggccctcccacggcgggagggagccgggtgggccggctgggctgggctaggataggagctgtggttacagaactcggttatcgttcgaccctggttcctcgttcgtggttccctcgccagtgccctggtgccttggtgcatccccccggtatcataaccattcacttgctcacccactcacgcccgtcccttgttccttcctcttctctccggccatcagctttgtgtgcatccagcttggatcctgaccgtccatccaagctgggtatcgaacgtgtcgcacttggtctctctatctctctttgattacactcagcaaattcaaatggacatctaatttccattctgtcgcatccatattgcatttatatgccatctctattgcatctctattgtgttgctgtcgtgtctctcaagattgcaaatctatcccatttcaatctatcccacttttcttcattgtccttctcgctgttatcctgctttcggattctctttattactttctgtcaaactctgttttcattactttctttcaaacgctccttgttcgcgctctctctctcgacgcctgcgcatggcgatgcttcatgaagaagagaacgcctccgggaaacattcgaggctccctgcaatacacctagacaaaaacaaacacataaacaagggctccattggttgtaaccaactgaagcactgtacgtaaccaagcatacgtctcaagccatcccctcttttctattcactcacaacgttgctcgttttctttgtcgattacatttactcgctctctcataatcgtctgcatgcaattcgtatcggtcattcatcgttctggaacaaaacaaaaaaagagcgaggcaaaaaggaaagataaagtgaagaggaaaaagaacaaaggcaaaaaaaaaaaaaaaaa

SEQ ID NO: 539 - DNA, 18556 bp, Xanthophyllomyces dendrorhous
aaaaaaaaaaaaaaaaagtaatgcacgagagctactatcaagttaaatccactggttttcaggataaagctagcgattctctcctttataggtactctccgactcctattcaatgacttccaatttgatgagagctagaggaagcgataagctgaatatgaaagcgatgcacaacaaggtcagtctaaatctgtatacgtatgtgtgtgtacaacaaaagcaaattccaaggatctactcacgaaggtgtcgtagagaaaagaagaaaatgacataaagcccaaacccaagattttcttaagtgggcaagaaccggtgggccaaccctaactaacgccacattttacccagtatatcacgtgcacaccagtcaccgcctgcaaccctttgcttctcccctccgctcatacttcttacagtcgctcgctaattcactcgctcacatcaatccatacaagctcacatcacagatgagagtgctgtttggcagaggttccgtcttcttagccccaatcacacggcgcgctttccgttcgtccctgcctgcttccatctcggatcaacaaccccagcaacatctgtccaacccggcacattcgcccatcccacggccatcaagattggaaagaaagcaggcaaagccaaaaccgttccatccgtacagcgcaaggatcggaagttatgaggaagacgtcctcaaaatcgagccgggtcagcccgaagaggtcagagagatcatgaagaaactctggctggacccgttcggttcgtccgacctgttttgtttggtctctcgagttcagcccacgggactcgactgtcggcaagaaagaaagctgactacatcaccaacccgtccatcgatctgttctccttgatccagcaaggttggtagcgggcccgacatcattatgttgcgcgaccggtactcactttccaaccagttcgtgatcgtcttcctgtctctttctcttctttcttataagagtaccatcagcccgcgcatacacactcacactcacccggcctgtttgcttgcttgtaaatgacatcaggcatgatcattgaccttcgggtggccttggataatccatcagataaatatctaactccctcggtcgaatctcatcctcctatcgaacggcggactaaacaagacatcagcccggaaggatcaaccaaacccagagaacggctatggttggtaccggacaagattcttcatccggactacactgcttccaacccgatcgtagaggatgtagatctcaaggaacctgtcccgccagggatggtttgtagtgagctgacagcttcgcgttatttgagtaagttttctggttttcctcttctttgctttgcttcacttgggggttttgtctctctctctttctcgtacacgcccgctcacacccacagttgactcaatctttctcctcgctttgccctctatcatcacccataggcggaatcagacacagtaaacggacgctactcgttgacctgcctcattcattaccacccttacccatcatccctcgttcccctgattcaacagaaaccttgtctctttcccaagaagtaaacgaacccacagaggaagccactcccgacgagacatcacccgacgatgctctcataaatgacccctcatccaatacagcaaacacgacctccttctcggccagtccaatccaagtgtcagccgacctgctcgaccagataacccaccaactcgcactccggatccaacaagaattagagatcctatgcgcccatgtgcaggcttgtccttcgttggccggcagacgcgtcctcagaccggtcgacgaccacgaaagagactcgatgagagatggcgactggctggacccggcgtttatcccgaatgcaaacgaacaaggggtgttcggggaacgagtgatcgcagtattggatctcggaatccgaaaaggcgaagaagaacccggtggattcctccggtcggtaattcctccaagaccgacggtcgaccgaacaccccacaaatgggacaaacggccgagacagaagaaatcaccggtcgtctcgacgctgaccggtcgaacggggaaaaacgttgttccgcctcgatcaccccgggtgctttcccctctgatcaaaagtttacaaccaccgttacccacccaatccctctcgtcctccggcggcgaaactgacgactaccgaacgaacccaggacgaccgctcgaaaagtcgacgctctctccaaaggacgtgccggtgtatccgctggatcttctcttcccagaccctcaagaccaagcccacctgtcgtcccgtctggaacacctcgtccacctgtcgactgtcggtaaactcccttgctcggcatccgctgggatgaaacctccccggccgttagtcccctcggtcgaaccaaagacctacgcgctcctacttcacccctctctcctcggcccatacggcgtcgacaccttccccctcttcagagcgctctggcgactcaggctctggagagacgactgcgcaggctgggacgacgatagcagggagaaactctgggaaagtctcgccggctccttggagtccgcagaagagaggaaggcgaggaaggaaaaggaggaggccgaggctttcaagatcaagatgaacaagcagttcgggttgaacctttgagcgaggcgggcgataaaaagacatattcaatccagcctgacgtgttctctttattttatctctgcttcgcccatcagcgtgtcgttttgctcgagacttcgtcgagtttactatataagtccatcatccatcttttcctcttttttttcttggttcaaacaaaaaaaaatcatcgagctgggcaaatagagtagacaagaggatggggacgaaaatcagaataaatgtaaaagaagagatcgaaaagaaaatcatatgtatacaaaaaaattgatataatgcaaagaagaaggaggagaacgagaaaagacaagataaagccaaaggagggggcagcgtctaggtaggaaagacaccaggcaaatgataaaagagaaataatgcagatcgatcccgcttacgaaactccggcgacgagcctcctggtttcctgtggtgtgaaatgaagaatcacagaaaggaccctgaccagattcgcgcgcatctctttatgttcgagaaattgtagaattacatttcggaggtactgaattgtttgatttgaatttaaaaacaaagaaaagaaaagttcgttgtcagtaagaaatgaaggaaaaatcatgttgttctgaatagcacacgagacagacctccaagttgacctcctcttcctcctgctggttgggctctcctttcttcttctttttagcctgctcttccccacctcctgtttctccttctatcgatcccccctcgtccgcgacaactttcgaaggcgtcgggggacgagattcgttgccgtccagagagtatcgactgacgcttccgtttgattgatgagaccagtaacccacccccgggtttcgctgtttctccaagagaaaggcggatgattgaacttttcgaagctcatccttcaatgtctgtagtgtcacaggaaatgacagtagaagtagaagcaaacgagattagattttgtgatagaagtaactttagggacaagagcacatcgaagagaacagacataccctgttcgtttgacgcaacgcttgaatttgagccttggaatcgttcaaagacgagtacaatgactcgaccttggtagtaaagtctttaatctcttcacgagcgctcgcctgatcgttagaacacaaggagcaaaaggtcaatttctcttctttagtttcaatacaaacgaaatcttcaaacagagaagaaaaataactacaaacctcttcttccataatcttgcccactttatccccgatctcctttcctcttcgcttctctctacccagctcggcgccaagttcatcgacaacccgctccaactctccgaccttttcgtctcgtccccttctacctctgacagcctcctcgtactcccgctcctttgcttccaacactcctctcagcctgtcgacctctgcgctccgttcttgaacgtttcggctccattcttcctccgtctctgctctagaggcttccagccgatgaagctgggacctgagatccgacaacttggactcgtaggaactcgtcagcgatgtgatctgtctctgaagatcaagtagcgatgccccggatcctcgacgacttcccgctggcgtgggaagcacagaaaccttctctccgtttccgatggaaagcccaggaatagaaaatgacgaggaggacacgtggagctcatcctcgagcaacgctatcttatcagaaccctcccgaagtcggaactcgagatcgttaagcttcgagagagactcgagggcctgagaagacgttttctccaactcggcctgtcgctcttgaagttggctgaacaaggacgacttttcttcggtcagcgttccgttcatctcttccagagatgaaatccgacttttgagggtttgaactttcttggcatgattggcctgtaaagttcagtgaaggaaagacatgatggtacgcatgatcagaacatcaatcgtaccaacaactcagaagtagacaagacactcacatcagcggtgatagccttgagctcgccttcttccttccgacttttactgtctctctcaaatccttctctcaggctcttgacttcgctttcgaacttttccctcaacgtcctgacgtccttctccctctcctgctttcctctctcgaccgccaacttccatctatctaactctttctttgcctcggtctcagcttttgtgatcgccagtttcagttcctccttccccgagttgagctcctccttgtccttgtcagccttgacaagcttttgacggacggttttaagaagtgagatcgccttcagtcgcttttcttcctcctccttgcatgtcgtctgagacgtggaaagttcggtctgagtcgttcgatgagtggcctgaagagtagtgtgggagactttcaacgtagaaagctccgagcgaagagattcgatcagattggattgcgatgtggactccatgctatgtgtgtctcgaagttcctccgtccgagattcttggactgggagacatgagcaaagattgtgagaatgagaaaacattgtaaaaaaaaacagtaggcaaatcgaaagctcacgttttacaagatcattcacccttcggatttctgacatgctcatctgtcatgttgtagagcagagtctaaggtcaacactgaacgcgagtacgaggcagacaagcaatctgatttggacagacctcaacttttgtcgagagatttcgtaaatgatcctctagagcttcagaatcatccatgttctctaagggtgtcatctcttgtaagaccttgttgacctttgaggcgttcgactttagttctagatgacaaaatcaattgtttaagacttgagagtttgcggcgggttgaaaatgatatgacgctcgagagactcactattgagctctgcctcgagattctcgactttattctttaaggacaccttctctagatcgtcttgtactggaagcttctcaaccgcatccttctctccagttggtgcctcaaccacctccggttgagattgaccttggtctcggccgatattgtcttcggattcaatagcgagtgtcgtcggttccgggacctcttgtgtcacctcagttccgtctccgttgtcatcacctggtttgatttctgactgtccgatcttctcttctgttaaatcctcttgcacagcaccctcttggccattcagccaagcttgctcttcgatatctggcaacggaagcacgacgtccttgggagaagcaggcagaggaattttctttggatccgtcacctggggtacagcttctggggtgttttctgaggaagaagagagaatgacttgtttgagtgaactcgtagccgtcgacccaagcgaggtcgaggggaagaatgtcgatgcttgggggttcaacgatcgtcctcggccttctgcgctttcgtccaacgcagaggatgacgttgatgaagagatggcggctagctcttggggagcagcagatgaagaaggcggcttggatgttgaccgacggaaagacgagaacgagggaagtgaatggggtatacttatagtcggaagatggaaactgctgctctgagaatgggacgctgggttcgcggtggatgtagcgaaggcagtaggagccgcagctggttcagtcgacgaagaagacgtagcttcatccttcgaagccggatcggaggaagacgcctctggttctgacgatccagatgaggactgcgttggctgagcagacgtccgcttcgacggaggggtagaactcgaaggcgaggatggagctgaaggcgacggaggagtcgagttgggcgaggcagccgtcgctgcagctttcgccaacctctcggataatgataacccacccataccgatagaagctgaggaactctgtttgccgagctgtttgatatagatgaaagaaaggaaaagaagaagagagagaacgaaaagatctgcctggtcgagaatgatgatggtgatggttggagaaagaaaagaacacctctcccgtcgtcacctccatctccatctctaaacattcatcctccatcagtcgtctctgttcaagcccttgccgttctcgatcgcgcacgagatggctctcaggctttctcagaggatcctgcctaaacctacggcctgtccttgcgccatcacatacaacgcgttttcttacctccttgtccctacgttctcgtctctcctcgtgctttctccagagactctggacgtcctctacactttaccgtttgctcttggatttcctgggttgaataccatcaggcagggcattggatcgttagcagtcgaagcacctggatcccaagagtccaagggaatcatcgccgtttcaaagggaaggcgtgttgtcgtgttcaagccggcctcagagaagctaggatggaaggttcattcgaccatgtattcctcaggaggaggcatcatcgaaggcatggcctaccaacatggtaagccacggcactgtcgatctgaccgtccgttctaatgatgatacactcaaccgtcttgttctttcttgtctgtctttacgcgagtcaggaaagctattcatcgcctcgaagggtagcttggctctctggacgactgatatggacgaccctttggggatatggacgaggatttgggaagagaagtgggtacaccttcctccagtatatcgagcagtccagacagaacgttctgttcgtgagcattatcaactgatctctttggacgttgcttgacagatcatggtatgacctcggccctctaaacaaagtctctttctcgcccgatgggaagtttgccatcgttcattatgtggtatgtgaccctgagccgtatgcaacgaccgactgttcttactgatcagccatccaatctaatccaacggcttagcacgatcaacaaattcgaatcatcactctctctcctgcttcctcttcctcattggaaagcggtcctgttcatcgaaaccaatatgtgaatttcgttcgagggatacaagacttctggtggagggatcgatcagagtatgtgattcacatatatttctttcgcccaccgatctagttgctgaactactcatattatcgtgctcttcatccctctcgtggccagtgatcagactcccgtcttatacgttcagtctagtccctcaaccatccacgttctaacacccatgttggacacatcatatcatttccagcacctcagcactgtctcccctccttcaacaacaagttccacagcgttatacccaatttcttctcgaagtctgcagaagtgcgctcagatcgcgctcgacaacaatgaaaatcgcgatgaggccggcgtgataatgttgaaggaagtcgccaacggttctatagcagatatcttcgttggcattccaggcgacgagtttgattcaggatcaagctctcaggaaattcaggtctgggcagttggcggtctggagaaaaagcaaccttcgttgttgaaggtgttccagctcgcttgtaatccttctgtgaactcacctccaagtactttgcctgtccttgcaagatacgccatggaagatgggactaccaacattaggagaatcatcactcttccgcactcctcgacatcctcttcttccgctttgctccttgtgacgtacgactgggatcagccacttgtcatgtccgttcttgaaccgaatttgatatgttctccttcttcctccaaccagtcatctccatcgtccacagccaatcgaatcattcaccctcttcccaatcgacaagatcctggtggaggcctagaccaaactatcgagagactcatacgaactcccaacggtcgagggctattgagcgttggagagaggggagaggtggccgcatggggcctgagcatatcaactgatcagaatgataaaagaaaaggaaaaggaaaaggaaaggaagtttggaagatgcgatcgaagtgggtcgacgaagacgacgatcctacagaagagacttcgttcgaggacggcaagtctgaggacgaacgtgaaggatctcaagacgatgttctctatgcattgtttgctagaggtcggtctctcatcacctatgttcctcatacacagcgactctcaatccggactctccgatctgctacgtgctctatccctagcaaacctcactatctaactgttgaaggcgcccagaagggagaacgaatgactacgttattagcattctcggacattgatgatggtgtttcaggaaaaggggaaatgagcattgggttcatcatattggggaacaaggccggacgattttgggtatggaggatagatcaggatggcagcaataccttgatctcttcggctacgatacctttcgactcctctttcttaactgctccgccgagcgacggaaaccatccgacgcagccgcatccaaagtttattcttcctgtcgacccgatgggttggcactcatcaattgttgactggaagatgaaagcactgttgcaagatgttatcgttgtcgtatcacaagacggagacctgagcttttggaggccccatctggactttggtgcaccgatcgagagagatggatgggaggtcgaggaaactgacgaagatggaggggcaaagggcgagtggttccggacagggttagtcaagacaggtagaaagggattgagtaaggcaaggtgcagctcgaggaaaaagactgctatgggtaagttcattcattctcccttcgtgtctgatataggtatatacgctgatttttctcttgcctcgccccacctcgatcgtcgtgtcaaaaactgccatccggatcagtttccgaggcagaaggtggtcggtatgagctctcgatatgggattctaagtcatctgatttcgcatccggcttagaatactcgacattcttctcgtaagtgcctctccatctatttctaccaattgttcttgacaaaatgtgctcacacgctgttcttgacacttgatgatatccagagaggacgacccagtttttgatttggattggacgactacacctgacttgcagtcagtcctcgccatcggatttgccacgaaagttattcttctttgcgaacaaagagtatcatacgtggatggtgatggatcctactgggccgcgttcagtaccatcaatcttgctccgtttgttctcttccccaacttggccttcattgattttggaaagaagtaactgaaactcaattttcatcattgctgaattcaactccgtatgatagattgacgcctgaacccataggtgattcaatatggctttcggatggatcgtttgctgttggagcaggcaaccaattattcgtctacagtcgattctttgagcctccatcaaagagaggaaacaacgaggttgaattaatcacagggttatccagagacgtgttcgagtttgttgctttgcagaacggaccgttagtggactatcaccctcagttgttgcttcaatgcctcctttggagtaagttattatgtccacgtcatggacactcctcattttctgcgtgacataaactttcaactcatgtttactctcaaacaacttgtgtatcaccaaaacagacaaagtcgagcttgtcaagagaattctcgtccaactgcatgaaacgattgaggatgctctcttcaaaggagaagattcaatctcctgggcaacattggcgccttccgagttctcagagaaggccacgtttgggagcaaatctcaatcaactgtcaaggttggtcatcttccctcacaaagcaaatcgtatggcatctatgaatccaactgatcatacatggtgctcttcaatttctatggtcgaaaagactaacgaaggctcaaagtatacatctttgtttgacgataccgtttccattcatgagtcagctctacttgccattattccaatcatcgacacaagcgcagaagagctgattatttgtcttttacgttttgtagggacgaaggaaagacattcacgcgctccttgatgggtcgacttatcgagcacttggaaggatcattccagatcggtcttaccagacacgaaagagatcatatgatcacattggtgcagacggttatcgaggtatgctcattgttgttcatctgaaaacattcttagcttctgtatccacccgtagagtttttatctgatgttgttctacgattggctaatatataggtggacgaacagcagcgtgcgctggatgtaaatggtcttcgatatctgatatctatccgtttccacgtcaactggaagtatcgactatcgacgatcgactctcgaccaacaacgccacctatccggactgttgctatccagaaacccgctgcttctgattccacgccacatcatcaccatcatcgaagcctttctttcagaaacatcgtttgggcatctcagagtcagagtcaagagatcttattggcagctgcgacggaagctttaggcggcaagatgtattggaatgatgcgaaagcgcttggagtgtttctctggatccgttctaaggaaactttggtcagtggaatagcgggattctttctcatgacctcagtggccgatgtgtttaacgatttcttgctttcccttttttccttctttttcttttctctcctttaacgtctttccttgatcagcgttcccaatttgaagttatcgcgcgaaatgaattcatgcgaggcgaagatcgagatccgacgacatgctcactattctactttgcgctccggaaaagcaaactcgtacaaggactctggaaacaagcagcctggcatccggagcaaaagatgatgctcaagtttctggggaacaacttcgatgaacccagatggaagacggcggctttgaagaatgcatttgcgttgatggcgaagcaacggcatggtaagtgcctcggaagactaatttctcctgccacatgatctgcgcgtgcaacactaatgggaaatattctcttgatattggggattgatcgaacagcatacgcggccgcttttttcctactaggagacagtcttaaggatgcggtgaacgtttgtataaaacaactagatgatttccaactggccgttaccttagcccgaattatggaagacggaaacgacggacctgtgcttcgaaccatcttatccaagacgatcgttcccaaggcattcaaaggaggtcatcgatggttgggcacttgggcattctggatgcttaacaaacgagatcttgccgttcggatcttgatcgttcgttgtcctctttttttccttttctgtcattctcttttgatctttgatacgtttactcaaatggattctcatacttggatttcctgcatgaagactcctttacaagacctccaagcgagcatccgaacagagtacgatataccagaggtcggcggctcagagaacgatgacccgagcttggctttgttgttctcccagatcagactttcaactttgcagaccgtgaaaggactgagcgagattccagaacggacggagtttaattttgtgttacacaacgcttgggttttcacccggatgggtacgtcgtttaccgcatcctctctaagttcttatcgactgcttgctcaattcacttactctttgggtgcgttcgacctttcgcccgttcaggctgccatgtcctgtcactctctcttctgcagtcatgggagttcccacctcctagtctcacactttcatccagatccactccatccatgacgccgacgcttcccagaagtcctgccgaaaatgcatttttcactcaacttcgtccgtcctcaagctcgaattcagtcacgggtccaggggcgatcggctctacttcgttcgatccaaccaccggaccggacttttccttttcttcgttctctttcgaccctccgtcttcgaccgcaacttctcttccgccagcgccggcggaaaaagcgctgatccctcgtcgaccacaagtatcgagggacatgacatcgagaagacggtcttcgttccttctctcgggtgcaggtccgggaacaggctcgaggggaggatccgttttgggtatgatgacgatcgatatggatcttccacctacccctcgggccagttcgcctgttggagtcagtgagagggacgtaagagaaaacggggttcacgaaggaagaagctcgaacgcgaacgggcacgagcacgaactgaatgagaacagagatgaagaaaaggacggaaagcaggaggagacaggaggagaagaagaaggtcagactaaagggaacgaagtgagaaagactgggctgggtaatctgatgaaagctgcaaagctagattcctcacagggcgggatggatttcgacatgggcgcttttgggttctgatgttgtctcgtcttggcgtgttcgcatgtattcctgattcgatgttcatttgtattcagaaatgtgttccttttttccaattctgggcaattcaaagaatacagggaaagaccacatgtatatatgtatggaaaagtgtgtagaaatggaaggagtccttctgttcttcttgatttttttgatatccttcgatcggatctgtatctttattctccgacgattccgtactgcctggcaagttttcctctgatggactgatcgaatggcgagtactgatcgaacggcttggagaccggcctttgaagtgttcgttcctttggctgctcgtccgggtccatctgttcggatagcaccttgatatctcctactctcagtctggtgaacctttgtttcgacctgacttcctttttgtatccttttcgtctcttggtctttaggacggtttccatcggtccggttgtgtgttccagcacggtcaacgagcattcgactccagtcaaccggtttccttccgtagctttcaacgcgaaatccctcgagccgacttcaaacacccttgtgagtttgatgacggatcctagttcgggcgtggtctccaatcgagggaccgtcaagatttctgtgggatgaaggaggtacttttgggcgtagactttggcgacaatgtatttttctggttgagagttgagcagcgtgactgccgagtgaggcgtggtcggttggatgtggtgggacggggccggaggaactagcgagcggggttgagagctctcgagaccgtaatcagatggcccgtggttgacgttttggaacgaacgagctggagttccgacaaccaaaggagctgaaagtattgtgtacggcacagattgaaagccagagccaaagcagggatgcaggatgcagtatacaggaggttgtagagggttgagagaaagagaagagaaaaaagcaacgaacaaaaccagaaaggttaggccacgacgatcaccaggagggttcaacccattgagtgcaaggagtaaaacagagacagaaacataccggcagactgcctaagaagcgatctccttgctagagagaacattagatttgtttaaagatgtgttggtgaacgtctttgattgatgggacggaaagaaagaaggaaaacgaggtagaaggtgagcgggcgaacgggcgagcgagcgagactagagaattttggaaaaagagattagggaatttccacaatctactacgaacgccgcgactagaaaacacggcaagacaatacaaaatctcggcacaatttctaatcagccgctgtagtctttcctagtgatctcgtcatggccgcttcttccacgtctttcttcatcacctccatccatcgatcatcagcatcttgaacagcatacagtccagggcaggcgtgtagcatatagcatacttcgatcttatagcatatatccatcatgagacaggcaggcagaagagttctcatccgtccttcgttccgtccgatcgcccttcgaccatcactcgttcgttagctttcctttctttttttttcccttcttgctctctcccagcatcgtccttctactcggacccaagtctgatatgaagcgaactccggttgcgtgcgcccaaacagatcctttcatcaaatcaatcgctcccgccgttcgatccaatctcgtactcatcccgttcattctccctccgatctctcttcgtctcacgagacgcttctgagcccggcacgacgacgaacacctcgtccaccacttctgatcccaccaccagctccgatgtgtccgagcagtcccagagctcgctcagtctacccgaaagaatccaggagctagtatcagccaacagaggttcctcagaagatgctgagagcgtgatcagagtgttcaagcaggcgatcgaacgtgaaggcatggatgatagtactaggaaggaaggtgccaagctgatcgtcgataactgggaaaagctcggaggttgggtatgttttgctctcttcgtccttctcttcttcctatcccgtctgttctctcccttctcatcgcttaccacccgttccgttgttgctcatgccacataaacgataggatcccacccggaagctgtttcaccatccctcggccttcccactctacatgtcctcccttctggcactttctcaatctgactcgatcccaaaggcgctccgaataagagaagatcttctcctgcggaacacatctccctcgacgacttcttctttcgcgggttattcgccttacgcgtccaatccgtcttctagttctggctccgccaattcgtgggacgatgctgccggatctccggcagccgcagccggagttgcaagcacagcaagcggaactagcgcaagcccgctaggaggttcaggaaaagaaccggtccatgttgtcgttgactctcaggctagagatcaatcgtggagaggcactcggcctctctggtttgccgtcggtacagcaatcaagtggtttggttcgtctcgtctctcttcatatgcttttttgatctgaagtttctttcctcaagtttacccctctgactgaaattttggcacaattttccatcccgcatacaaacaggctttgctaccattgccgtgcttatcatggagcaagcaggcatggtcaaactaggtccatccgtcaacgagtttgaggcttccaagcaggaaggcggcaaaattattaagtttgtagatgtcaagggtgtcgacgaggcaaaagatgaattgagagagatcgtcgagttcctcaaggatcctgaaaagttctcgactctcggaggacggcttcctaaaggtgtccttcttaccggaccgccaggaacaggaaagaccatgttggcaaaggcggtagcaggcgaggcgggcgtaccgttcttctttgcgtctggtagtgagtttgaggaaaagtcagtgatcggtttcgtttgtctttttcctttgtaccggttcaaaggaccgacttgaaggcgagggctgataattcatttgtccatatgtgtgtatgtgcgcacattcgtaacgcgtccttccctctcgatcttattttacagattcgtcggagtaggtgccaagcgaattagagaactctttgccaccgccaaaaagaagagtccagctatcatctttatcgatgagttggattctgttggtggaaaacgaagttccaaagaccaggtccgttatgttcctcatcttcgctctctcgcggtcctgacttcctggcgcgtctaaacgtcttgtgtttcttcgtttgcaacattatttgatgtgcaccaaatggcaatcaggccgcattgaagcaaacagtcaaccagcttctcaccgagctcgacggcttccaggcatctacaggtatcattgtcatcgctgctacaaactttccccagtctctcgatccggcacttgtcagacctggtcgattcgatcgacatgtcgctgttcctctacctggtcagtcagttctcactggtctttggcttgctctagttttgaccctaaacaaaacggatttatttcctcgatgctcaacgcgctttcgattttttgtgatagatgtgagaggaagagtagagatcctccagcactacgtaaaggacattattgctgatcccgaagtggacccttcgacgatcgctcgaggaacgcccggaatgtctggtacgttcttcgattttttaccacgagtatctatcggagaaactacacattaaggaaggaaaaataacagattgagttggtattggaaattttttgaccaataggtgctgatcttcagaacttggtgaaccaagcggccgttcatgcctccagagagggtgttcagggtgtccggctggaagatttcgaatgggccaaagaccgaatcatgatgggtgcagagtatgtatttctaatcgttgtctgttctcctctactattctcagcttacacactggatgtcattttcttttcttacaggcgaaagtctcactttgtcactccagagagtaaacgaatgacagcttatcatgaaggtggccacgcactcgtcgctcttctcaccccaggctcgatgcctctgcataaagtcacggttctgcctcgaggtcaagctcttggtatcgtatgtgtcttctctttatttgactttgctcttcctcgtatgcatccttactctcggttgtttgtcggggccttgcgtagactttccaattacccgagatggatagagattcttattccaaggccgaatatcaggctagaatagacgtagctatgggcggtcgagtggctgaagagttaatctatgggaaggaaaacgttacttccggtgctcattcagacttggtagccgctacaaatgtggcttcctccatggtcaaggtaagcgttttctctgttgttctcaaatttctattcgaactctgtttttctttctcttttgcggtagtgagactgattggctataaattggggcttcttttcttccctcttcatctaggaacttggattctctgacaaagttggcctggtagcgcacggggaagaatctgtctacctttctgagcgaaagaaagacgagatcgaatcagagatcagagggtccgttctcgttttgttttatctctttttttattgttttcttcatctttgtatcattttcacccttttgacttgtcgctgactgttttggaatttattcatttttatttctatcttggcctgtcttgaaacagaatgattgaaagcgctgccatcagagcgctgacacttttacaaacaaaccgatcgaagttggacacggtacgtagcttttttttttctctttctcgtgttttttttttaagaaaagaaatgtatgagaacaaggtttctaagacacggccttctttcctaccgcacacttgactccacacgtattcaaacacaatagctcgccaacgcattaatcagatacgagactttatcagcagacgaagtccgcgaagtcctctcaagttctgatggttcattatctggaaagaacgttgtggacgtcctggacgggcccagtatctgattcagaagatgtattctatatagaattttctttgactctaaagttttgactccttccgaggagaaggtgtgcaatcaagttaaccaaccgcatgttatggatcatgacgtaagttgaaaattgaacacaagaaactcaaacagaagataaagggagaaaatcgaatgagcaaagaggtagaaaaccctcagaaaaatattagtatgatatagcgacaagggccaggtaggtatcggacaattggtatatacgtattaaaaacacaatttttgacgtcggtgaaacaaaaaaaaacaaagactgtcaaacttgagaacaaaacatagaaagtcaagaggggcatctagagaacccgtctcggacttcctatgcgacgaggactgtttcctcctatggaattatacgatcctgaccctgacattcggcctgacgatg

SEQ ID NO: 540 - DNA, 1532 bp, Xanthophyllomyces dendrorhous
ttcggcctgacgatgctgttgatgtcgtcggtatatgagcggaaggtaagacgtcctggatccgctcgtttcgtcttttggcattgtcgatctgcttctccagatttctatgagagacagtgggaaagagcgattgtcataagaggcaaggagaaggcggatgagtgagaaatttagtttatataaaacatcagtttggaggattaaaaaaacgtacctgacttgagactccaactgagctgctctctctttccctccttgcttctcgctcttcaccttctcttctgccgccttcaatcgattctcgtattctctcactctcgcatcccatttggattccgccaaagtcatcttgttcctagcagacgacagtttttcttcatacacactgatttgattcttcgcatgcgccaatcgacgttcgagcgtgctgatccgggtctcgagcgttttagcgtcgtttgtagaagacgtccgggtatgttctttggaagctgtcagctgagacgaaagttcagcatatcgtgcctaatttatttagaagaaaaaaaccatgatgagtctcggttgatgcgacgcgaggatgaatatcatcagaacaaatagcaggactaacttgcaaagattcgagttcgccctgtttttgagcatatcggttcctccattgagttttcaccagttccacttttcgaacggagctttcaaagtgatcgagttgcttccacttgtgatcaagctgtttcttcatcgatctgatgggtgacgaacgcgtacattaaaatgaaataaaaacacacacatcagttgggctcgacgatgagggtctcaaataagatagttgacggtagcacttacataagcttctcattgaacacgctctcgcaacctctcactttcttctcaaaatggctttgaatgtgactgagcgtccgaagtcgggtcaagatggcatctttgaacacagcaaaattggccgatggccctcctcggtcctggatgacgaaataaaaaccaaattgtctatcagtaccaggcggacaaagcacagcgcatagatagtcaacaaacctcagtcccaaggatcttattcagatgttgatacacaaccaacaagagctggctatgctcttgcttctgagattccgtctgatttttcgaaacggtgagggatcggtgttcgcttgtcagtctatgctctaggtcgttgaccctttcacgcagaacggccgcttcgttctcggccacccgagatgactgtttgtacaagtttttttaattgagcagggaaggccaccatgtgtagacaaaccagagaagaagccggtttggacagaccttttgaaccgtgtccaatttatctgccatgttcagccgagattgaagttcgcttgaaagcttattttccagctcccggctcttagcattctgttagtcaacatgaagcaaacccaacctcatagatcagcaagaagggtctggtggaacgaccagaatactcagaaagacactcaccagatcggctaacgcatcct

SEQ ID NO: 541 - DNA, 11146 bp, Xanthophyllomyces dendrorhous
gatcggctaacgcatcctccctcattccaagagtgagctcctccttcttcaattctttctttactctctcccagtcactctcaactctaaccaaatccttcttgagccgttcgatttcgagttccatggcaaaccgatcggtgtcgtgtgtatgtccaacgagacgagcattatcctggatggtatgcaagtcagtctctcggtgggaaagccgatcacggacttgatcaagctcgttcgacaaccgacgaacactctgtctcgaatcaaaattggagagtaatcaagatagcgtgatcagcgatagctttcaggaagacattttatgagcaacaaatagcaaaaaaaagagaacgtacgtcttccttctcttggaataatcgatcccaatgcgcctcgcggtcttttagctccctcttcgacagacttaacgtcagtccattctccttctcgacttctttcacccgtttcgtcagctccgtccgttcatctaacaatttcttccgggcttgctcatcggccacttgtctgtcttccaaatcagccgccagggtggatagatctgtcacttgtgtttgtttcagagcgaggtcagcctgagacgcgtcatacagttcagctatctcgtccaagtcggccttcgtctcagcgagtttctaccacgatttcaagatgaaatttatagatgatgtagacagagatgtgtgaaatcttggttagttgaggatcatacgagcaaaaccccaaagagaacagaacgaacctctttgagcgtgccgacaacttcgtccttgacgacctgcgcctcctccagagccgcatccaacgcattcagttcagcttcaagttcggcttccttcgcagcctttgcctctagttcatcttcgagctcgtgtatgcgttctcccaactaattgagacagtccgagaaggtaatcgataatgagcaggtgcttaaagacattcaaggaaagaaagaattgataatgacaaaccgcttgaatttcttcattgttggcgactgattctgcctctctctctactttttctagctcgactcgacgaagctgttcttccaacttttcaccaatctcttcattcaaattttcgagttcggtcaatcgttcttgaagttcggagagctcgttctcggtatcgtggagagcatccctaagctgctcggcttccttctcccgttcttgcagaacctgttgtttatagatttgaaagaagttagtcaagtaacacaagatcaaatggcatgattacataaggaggcgggggaaagaattcagggctcacttctctcagttcgtcgttcagagctttcccttccttgacttcgtctgcccactgtcggtcgttggtgtcaagctcttcgaatgcgtcctgcaacgctttctctttctgatcgagttcgagctgctttcgttcgagttcgagtgtggaagctgccaacttgtctcggagctcgtttctctcctattatttatgagtcagcaagacaagaagtggaagaggaatagatcagagtacgttacagaaggagaagaagacgagaagacaagacgagcaagtgagcatgattgcgtaccgagtcgagatgatcgagtgcattagccctgtcggccgatagatctcgttggccactctcgaggacttcgatctgtcgagtgagttcgtcccgctggtccaataggtcttcccgttcgtcctcgagagtggcgatggttgcctggtgagtatctagctgggtctccaatttttggaccatctaagaggaaagtcagagattcaagaaagaacgaatgaacgtcaagtagagcgcaacttcatcaacaagtgggagagaaaggtataggcgcacgtcttctagctcttcagttcgacctttgatcctgtctagttgctcttcatccattccgtcaaggcctgccagcctggcttgttcgtcctctaactgctgttctttcaactcgaggtcttcttgcgcttttcccagtttgtcctccgtgtcttctaacactgtctgggtttgttcgagctgggaggccagggcatcagtttctgattcgagagtggaaaccgtgtctttgagctcgtctatctcggcctgtgaaggaatggcgaaatcaaaagattccagatgagttgaatgaaattcaaccggaaggtaaagagagataaggggaaagacagactttagatcgggtatccagatcgcggaattgtctatcgaggtcttcattccgctccctctcgctctgaagatcatcttcgagctgaatcctcttttctcgttcatctcgaacaagatcgtttaactccgactctttctctctatctctcccgccccgattggcgccatcttgagtgacacccgcccgaagatcatcgttctccctcttgagctcttcgagtgcatcaaccaggtcgagcacatacttcttgttcttcttgcactcgatctttagtcgagcataggccaccttgagttggaggttctcctgatggatgttgtcgagtgtttctggggattgttgcttcaggcgttcggtcaagaagtgaactttgagctttaaatcaaagttttcccgttctttcagatcaagggcctgagtaaattttcaagggaaaccggttgaaattaaatccgatcagttagagagggactcggctatgagaacaaattgtagacagggtcaagaggaaactaaccttttcctgctccttcaacgtcagcgagttctttgatcctagccttgtttgttgctgccctcttggaatgccccctgttactggtctcgtaggaaattcttctccaagcttctctggagagcctatgggactttgagtgaacaggtcatcggagtatccggatctggactcatcatcagccggtggaatagcaaatgaggacgaggtggatgatgagtctgaggtgcttcggacgagagcgagatactggcctggggcagccagtcgagcggtagatggttgtggtgttggaaggtccgtcaaagatgatggagcatggcctccgggagtgtacacgtggctgatatgattcagtgtcggcgaggatggtgaggaaacttcttagccgataacgatggcgatgtccgaacgaacacagcaagccgaatcagtaaagagtcatatcaacgtcaacgaaacggtgacaggtcaacaaccacactcacgatcctgcctggccgtcctttccttcttgaccgtcccaggtggctctctgaaatcccaatcggaagcttgaccgttgtttgaggtttccccgtagtcttgtgctctgtcggtttcgaatctgtccttctcgcgctcgtgatctgaatgaaagctgtctgctagagagggtaaggatgtgtctgctccgtcggctgaggaatcatatctggacggagtgttgagaacgcctgtgaaggccgatgcgaaagccatctaaggtcgtgtaagcgggctggctgccctttccagccgatatggatgagacttgcttgttcaagaagaaagcaagtgtaggttgatgtgaaggacagactgaacgaacgaaggagagaaagacaaagatgaggaccaaggaagaaacaagtcgcgtcggtgtttgtccgacttgtctattacgttttcttgtatttttctctaatggcttccgtaataaacgattaggaaagttctctaatgtgtttgggtgactctcctaataagctgtctattgagttgtctagtaagttgtctagtaactcttgtattacagtttgcttgtgtgttctctaatggacttccttgatacttgttgcaatgatgctttctatgatgagctctaagatggctcttcatgctgattcgcagctcatccagtccaagttgcactctgtccagcccctttaacgattcatgaagcgctgaatctatagtgaccgaatacggcgacacggccgtctttgtgaacgaaagcaccaggcagcgttgaaaggcaagctagaagtgcgatcgctcgagctctttcacctggacctaagcctgagtcttaactggttgcaattcgtttagctgtaggaaatggtgtgcatcgaacatggcggtcttcttaattcctttctcgcagtatttcgtcgttcttcctctcaaatggcatgctcatatgtttcatctggttctgtctccgctcctctatctgtttctcggcagtcttctcgtttgtagctcttcttcggtggcctgtgctgtcatcttcttcatctgtcgtctctattaattcgcaccttggtcgtctccaacatcataccaactgctcatcacttgaagcctcttaggcgacgaatgatgagaacgactgcgctcagaagcgtcaagagagggctggcactctcaaggtgacgtcactgaatagccaacaagaaaatctcttgctcatcatttaagaaccacacaggctagaaaacccattctcttcatccaacccacccaaccttccgcatcactgttcaccctcatccgacaagtgaaatgaccgactacgttaaacaaaccgccaaacggtccctcgcgctctctcaagatgccgtccagtcttttggatggctctacccgatatatggaatcccatacttcctccaacactctgagctccgaaagccactggagaaactcatccttccctcgctcgccatctcggccgtcgtgtttggcttgatgttcaccttcacttacgttccgcaagcattggctctcagtgcgcttcagctcggaccctggggtttcatcaccgctttcggtgtcgtccttgaagaatcccaatttgtatgtcgacctgtttagccatctcatctcatcatgcattattcaacactaactattgaccggtctatcagatcatctcgattgtcttgaaagcgttcttgttcaacacgaccctggccgagacgtttgataacgtgctcctcatcaaaggccaagacgaacttgtgtccaaaggtcgagagatctcccaggctaaagctggtcagtctggaaagacactgggcaagatgtaagctctggaccgtttctttcatctatgctcgccgcttagagtgctaatctgatgcccattcatggcccatgttcaattcagggtgatgaaacccttggacaagttcaagccggcagcaatcatcaagtatctgatttctattcctcttaatggtacgtttccctccccaactgaatctgcgatcaaccatgatcactctcatccactgatccatgtctgtatctatcctatatactcacagccatccctgtcgtcggaacgtttgtctttttcgcactcaacggagttcaacaaggaccggctcagatgtccagataccatcagctcaagcagttcacgcctgagcagaagaagaagtttgttcatgagcaccgaggagccgtaagtctaatttatcctccgtctctttccccgcagtggccaattgggcagccaattgttgggttcatttctgatgtcgttttatatctgatggtcttgatcgtgcctatcttacaaaccagtacaccgcgctcggcgtaacgtctctcctcctcacactcgtccccgtgattggtcccgtcgtatttgcatactccaaccaggtcggagccgccttgcttgctgtcgatttggagacgaagaaagggaaggttgccgagggagaacgggagatcagaggtggaaggaaaaaggaactttaaaatagcactgatttgtttctttcctttagttcacgtcctctcaaccattgtttctcctatatcctatcatctttctgcatctttcctttgctaatatgtaaccattaggctatctatttgttctcgtactttcatccatgaaactcaacttggatcatatgtagctttacatgcaccccccttatttcttcatccgatggtctgactcgaggctgttcgcgctcttcagacgcaaaagagttctcaaaaacaaagaaagaaaagacgccggtaaatgaagagaggtcaagtataacttaaggattaggataaccgctttgtcaaaggacaagcgccggactgccagcttctaccagatctaccaagtccaccgtcggctctttcaggtcggtatcactgactagagtaagtatctgtcgaaagaccttcgtccgggctctataaagctctgcttcagattctttgtgaatcggttcaggtggtggttccactaaacgagagtatttacgcgcacacacgcaaataggcatgtgtgagcatgtcatcagagagaagagagggataggggaagaaacgcagaaagagagaagatgacgagacgcacaactctcggtccatgaatttcgagattcatctgatgcatgaccacacggacggctcagaagatagctcatcaatgattggaacatcctactcctacgatcaaccagagaggtaccacagcacgcaatgttagcttctcgtggttggatggtaaagtttcgatggactgaatgccgatcagaacgagtgaggttccttactccttacgatcgtcgtgggacacgactgcgtgtaactggttctgaagaaacagtagggcttccattgccggtccagagtcacatatctcgatgaatctaccgtcagccaaacggagagaaacgacatattaatatctccaggcacatataaaaagggttcggagtaaaccgaattcaatattaacctctgtttcctgattgcaagaagcgctttctgttctacttgcgctcgtccacatctacgtatgagattgcaaccgtcggaagtaagcatactgagaatgacctatcgaacagaagtgtctttttatggaagaaaactaatggaacaaatcataaaagacggacctgatgatctcgagctgccaaaagtcatctagtcgggtatcaggactggtgcctgaattaccgccgtacaaaaaaaatgtctcgctcctggcatcgtacacaaactgatgtgcgtatcttggcgatgggaattggtttcttttgttttatcaagaacgattcgatacagatgccttcagtctacattttctgatacgcggagcgcgttccgtacacatctccaagagtttgaaaacttactttgtctgacctgacccagcatcgtcatagccacctatcgttgcctcatcgtcactgtccccccatccaactcgatcattccctccaatcttcttccatcggccggtctttagctcacacgtccacaactcactcttaaccacactgtccttcgatggtccactctgccttgtcaacccggagagcacaacaatctcgtccctgccgacgtcaagattggctctaggggtgaatgctggttgaggaccgctaacggctgagtagtcggccgtaagacattcgaaggttgaagtgtctgggtagtatttccaagaatctgtaagactgatgcggaccgataaaatattattaactatagacgactagaaggacgagtagacaggtggagatgatccagggttgggagagggcttactaggtgtcaatccgaagacccccaaagatgaggagcgatcgatctgtcgggttccatatcatgctatgacctttagatcgatatgaggtgattgaaatgatgaaaggataggtcagcttcatgcccttatctgcattctgaaactggcttgtagtctctgacctgttcttgattccagtccttgttccgagtcgccactaacaagttcacaggataagcgtgcatcacagaaccagttgccaaatttggaagaaggaaaggaaagccttgagagggagatcgggcactcacaaaagctttgtccacgaacgagactttatatcatacttgaacattccactgtgtatatcggttgtatctgacgcatggcacgccccgccatagatgtacagtgcgcccttttcggaatcgactgtatccgattatcgagaaaacaattagatcagagatgttcgcttgaagtaatacaggacagacgggcaggattcagttctacctatcatctgatgatcatatctgttccatcagggaggagggagatgcgtgagaagtgcaaattcatgatgcagaagaagtttacgccaatccaacacccgaatgaaaacttacatcaagctgggtcctccctcactctgaacattgcgggaggaacgtttagtaactcggattgtgaataatgagtctcttcagaacaaggatcgatcgatcaagacttactgcagtgtctagactcaagcactcccatccagcctcttcgttccatacgttgaacctccagaaatcgtttccaaatctctcttcttgatcggctgcttccttcggtgcctctccatctatatccatgaaactttctttatcatcctccacatcaccatctacgtgcatcttactggctcggctcttatcattcgacatcgacgactgaccttcatgcccttcataccgaccaagaagatacatccatccggtctcttcgtcaagcgctaacttatgacaactccgagccttgggccatgttcgatcgagccgggcctttccagatcctgatttgtggattggtgtagaatcgggagcagaattaatggatttattcaaaggagtaggagaaagggctgtgcttgagatcgcaggatctagattgacggtagatagcccaaccgacgaagaggtggctgaagacgacgatttgtcagaaaggcttgatgggttcaaagaggacgggagataattctgaaagagtgaagagctctggacattggaaggcggcctgatttctcgccatgatcctgtaagcggcgaatatacccacaggtcggcatagttttgggttccgtcccatcctccaaataggtagaccctcgtttgactagatgatgaagatgatgaagacgaagatgaagaaggagatcgaggatgtgtggcttgtccccttgggtcactatcaaccaccatgccgtgtcctccacgtttcccaggggtcggctggtttttcggtacctgtagctgggtccacgaagccttgccagtctccctctgacaatagagatcaaacaggccctcagcgctcagttcgcctatgagtttctccgcaccggacaagtccccatcgatgacaagggtcgagtgaagttttgtgagtagcttgtgttcaaatgagacggatgacgggagagcagatagcagggtggaaaaggaagcgaaaagtttggtatcgcgcagatgttttagtgtcagaaggatggttcgggtctgttgagcctgcaggtatgtttccttgatgtctcgcattatttggtgatcagaaacaccgccaaaggccaggaacctgaacaacagattttcaagagagattcagcaccggatgtggaagagagaagaatcacgctcatgaaatgatgaaaatgtaccagatggagcaattgtagtttggaacttgagcggttaaaggaatgactctgaagaatgcggatgaattgaagattagcaccgatcggaacggtccgcgtcgtactggtcagaaaagtgacttactttatgaacttgactggaacaggctatagtttacgaagtcccaatcagccttcgtgatatgatcgaaacagagcggatgaaacaggaaaggaaccatactaaacgatctccccctgcctcccgccaaccgacttcgaacgtctctgattcagtgtccgacttgagtgagccgttgtggacgagcttcatcgtctgcagagtcagtccggcgtagaccgcgaaagctttcacagtacatggatgtactacaccgttcaaccagatgccgttagatattcagaatacggaaccaccttatcaatcaagaggcgtaaagtgtggaagatgaaagaggttgaactgaccttttatgaatttgccaaacgtgatggtgcctatcgggttatacgattgattccacgcgctcacgcgacgtcagcgacaataagcttcggatggacggcgtcatagttggatgacagactcacgaaacaagcacaccttgtcgagctccagacagatccagttcctgccttcgtgttcacttgaccgggagacagaagctaaaccgactctatcttccgtcggcccaggagctggttgagaggctgacgctggatggtatatgcctgcccatcgagatgcctgatcatgaggcgcgttgataaggacgttcgaagggtaatcttaatgagaagttgccaaaatgaacggctaagttaaatgacaatgaatgaactacgtccaaggggaaacccatagacagacattttgttgtgacagatgagcagctatcgcgatgttccgttcgattcaacaggatcaaccaactgatttattatggttatatagagaagaacatgggagacgagctcacgaatgaacgctatatggaaggttaactttagcgagctcggcgattcggtcttgaggactgcccatcttccaaaaagagggaataaacccgatttggttccagttggactggatgattggacaaggagatggaggagatatagttgagttcgtactgttgatggatgactacatcgattcaacgaacagagatcggagaatgatcatatgttagggttagatacagccatggttacattcagtcgtaacacctacgtcagtccatttctggtctaagtatatacgttctacaatgcgatcatttacctttgatttaatacgatattatgagtcgtgttacatgtgcacaccgaaacaaaacggatagccatcacattcaagagaaagattacggcgaattgagttctatctaagtgatgtatagtgaaggtagatgagaagaaacatgaatactgaatatgaaagtgtagccaacttgtagattaatctattggaaagatctgtattttcctccagctcggatcagatgagccgttcattttgccctcctttctgactcttccagcctctagcttctcattcttacgttctctccacgaaagaagaagacatcagtcctgtttagaaaccgttccaatgaggcgattcctattggactcgtttctgtatctttgttctttttctttcgcgcgctcccttcctttttttttttttttttttt

SEQ ID NO: 542 - DNA, 18350 bp, Xanthophyllomyces dendrorhous
gtcctgatttgccctggctttcctcacaaagaggctctggtttccttttcatttcgatttttccttcttctctcgtctcttcctacccatcttccatcctcccatccctccctctccctccttcttacccatcttgtctaggttctggaaaggtaagagtcttatggtctccatccaatctcttcgcatcgctctcgatactaattcttgaggatagaagaggaattaggattgagagcgatcaggagaggaaagggacaagtttttttcaatgaggcctctgcgattggcctttttttcttttcctcactgacctttcttctttcctttccatgtttcttgttctgtagatgattaacaagatcccccagtctattcttcgacacatctccccgaggggaatggccaccctttccaacaggattggggacacccaggtcaagatgagtgtgcttgacaaaggaacccgtgcgttatctttttcatttctcacctaaggataaaaaactctggtcgagcacattctcatctctcatcctattctcttctcttgatctagactacatcaactaccagcgaattgaggacaacttgtctatcgttcgatcccggtaagtactcttttcgatattttctttcgtcctgaaatctagccgctcggattggcttatcttctccggtctaaatctattcccatctcagactcaaccgacctcttacttacgccgagaagatcgtttacggtcacttggatgctcctgaaactcaggacattgagcgaggaaagtcttacctcaagctccgacctgacgtgcgtattttctccccttgcagtactggttctctatccatacgtcatttgcttatctttttctttttgtccaatagcgagtcgcctgccaggacgccaccgcccagatggccattcttcagttcatgtctgccggtctcccccagaccgccgttcctaccaccgtccactgtgatcacttgatcgaggcccagactggaggtgtcaaggatttggctcgagccaacgaccttaaccgagaggtctacgacttcttggccactgctaccgccaaggtaagattatcctgtcttgacctggtcttatttttcatcttcctagtgttgacttcttggaactgtctacagtacggaatcggtttctggaagcccggatccggtatcatccaccagatcatcctcgagaactacgctttccctggaggattgatgattggaaccgactcccacacccctaacgctggaggtctcggtatgattgcctgtggtgttggaggagccgatgccgtcgatgtcatggccgatattccttgggagcttaagtgccccaaggtcattggtgttcgattggagggcaagatcggaggatggaccactcccaagggtaagctggctttcgctgaacgaacccgtctcattaacacgcaactaacctcttgaatacgtatttccttacatatagatgtcatctgcaaggtcgctggaattcttaccgtcaagggaggaactggtgccatcattgagtaccacggacccggagtcgagtccctctcttgcactggaatggctaccatctgcaacatgggagccgagatcggtgccaccacctctgtcttcccttacaacaaccgaatggagtcttaccttgaggccactaagcgaggaaacatcgctaagtacgccaaggccttcggacagaaccttcagcctgacgagggttgcgagtacgacgagctcatcactattgtatgtccagcttcttctgagtcttcatcgttttcatcaaatagctaacaatccatgtttcgctctgtctcagaacctttccgagcttgagccccacgtcaacggaccttacactcctgatcttgccactcctatctccaagttcgccgaggccgtccgaaccaactcttggccttccgagctcaaggttggattgattggatcgtgcaccaactcctcgtatgaggatatgtcccgatcggcttttatcgctgatgaggctgctgcccacggactcaagaccaagtccaaattcaccatcacccctggatctgagcaggtccgagctaccatcgcccgagacggattcattgagtccttcgagagtgctggtggtgtcgttctcgccaacgcctgtggaccctgcattggacagtgggaccgacaggacgtccagaagggaaccaaaaactccatcatcacctcctacaaccgaaacttcactggacgaaacgacgccaacccttccacccacgctttcgttgcatctcccgatatcgttaccgccatgactttcgccggagacctcaccttcaacccccttactgacaccctcatcggtaaggacggcaagcccttcaagttctctgagcccgttggtaaggagcttcctcctaagggattcgacccgggagaggataccttccaggctcctcctgctgatggaaccactgtctctgtcgccgtttcgcccacctccgaccgactccagatgctcactcctttcaagaaatgggacggaaaggactacatcgatgcccccgtgctcatcaaggccgtcggcaagtgcaccactgatcacatctccgctggaggaccttggttgaaataccgaggacatctggagaacatctcccagaactgcctcattggtgccatcaacgagcagaacggaaaggccaactccatccttaaccaggttaccggcgagtttggacctgtccccactgttgctgcctactaccgagacaactctatcccctgggttgtcgttggagacgagaactacggagagggttcgtcccgagagcacgccgctttggagcctcgattccttggaggtgtcgccgttatcgtccgatcgttcgcccgaattcacgagaccaacttgaagaagcagggtatgcttcctctctggttctccaaggcttccgattacgatctcgtcaagcccaccgacaagatctctattcttggtcttgatactttcgctgagggcaagaacttgaacgttgagctcaagcacgaggacggctctgtggacaagattgaggtctcgcacaccttcaaccagggccagattgagtggttcaaggctggatctgctttgaacaaaatggctgccgacaagttggccaaggcataaataggttttctttatctacgggtccttttccatctttttcgagcttgctttcattccatacccctcatgtcacgtccgcaccatacgttgctctaatcttccaattgcttcgaatctacccctttcaactttcacacgatgttgttcttttgtatttatgttttgacaactgaaccataacgagcgagtgccaatttgagaaagagaaaatatctagagacccttggtgtcgaccgctaagatagaatgcacgacaatcgactattcgaataattactcggtggcgccgattgcgggccattgtaattcgaccatattccgaaccaaccgctcacgtacacatcgatttaaaccatctgatccattgataccccaacgttctggtccacatatatcgaatcaacattctctcatctttacaaagaaaaagaaaagagcaaccatgtcgaaagctgctaagagaacactgtggggatcgattggagtgacttgcttgacgatcctcggagtacattacggtcaagtccaagagtccaatgtatgttctcgtacttctttcccccggctttttcgttgacctttcacgtacaaagtgctcacagtgtcgacgctctgatcattttatcgtttggtgaacgcgatgaacaaacagaacatgtatcgtggagtgctcagggacgaagaacggatgaaacttcgggagctggctaaggcctcaggagagagcttagcaaacacgctcatcccagccaccgtcagagattcattaccctcgtcatcaactgtcgcttcaatcttcggttctggaaccactccttcccagccatcgccatcgtcatcaccatcgcctccaacgatgggcagcaggccggtcaactcagattccgtcttaggattcgaacctccgacgcaatcaacctcgaagacggacgcccagcgcgagaaggaaaagaaagagcgcgctcaagactttgaaaggagtcagcaaaggctaagacagcttgtaggagaacaaggtatgactggggacgagcagagatcaaaagctgggatttaatgaaacattttcttttcttttcttcctctttacttttttactttacggaaggaggagatacggatgattacgtaatcatacataccctcatgtaggaaagagtcagaaggcttgaacgcaaacattatctactacacctcacacctgttgcatcgctccgaacatcttcattaatcgaacctgagagctctgatccggtagatcgttgtctctgtgggcttctttgtctggatgcaatcgacgaccgccgaggataccgtgtccatatccaatctatcgccccagtcgacaccggctgtctatcactcctttcccacttcgttagaggccgtgaccaaagctatagaagcgttcgagaggcaatatcccaataggcgtcctatgaataacatgcaaagctcggcaaacctatacggtcatcaagaagagatggaagaagctcaagtcgcggatgagctttctacaatcgtcaatggaaatatagataacagtgtacctgtatgtatctgtatatcttctagcactagctcggtttttgtttcacagtcgtggggacggggaatctgacctgtagattttcatgttgattttcttggattgtctgcaccgatagtttccctcacctccctcgacaatgccgatctccattccatctgaacctatcaccgctatatctccttaccctgggttcgaacaaacaccatcgtggcctttaccgacagctgtttcatcttcatcatcccatgcccaaacattctcaagaccgtcctcagagaaggagcacaccaacctaacctctatatccttctatccggtaaggccgtatattccttctacagccgctgttgctgctgcttctaccctcccccctgtcatttcaaatcgtacaaaccctgggcctatgggcatacagctcgggttggtcgagggtcaaccaagtagatatggactgaggagtagtctctctcgaatatcgacgccttcatcaagttcgagtataagagatctcgctccaaaaagagtgacggcttatccttcaccctctcgaggatcgtcgcagggctccctagctttcggttcggatctctcgtcattgacgagcgaggtgagtacaagtagcgaagaggagggtatggaggatgagatgatcaaggttggtccgtgtttccactctgggtcaaggagatgtgcattggaatagcaccatcaggttctcatccgaatttcttcctgcctatggttgttggggagattcaggttgtcgcaagtccgcgaccgagagaaaattcagcctcgtcgagcggaccgtggatgacggtgcccgtcgctgctaattggggcgagaccccaggaccgatggtcgtccgagagccattcgttgtgttggatgaggctgatctgattgaagaagtctcggaagtcaaggcaaaggataaagaagatccaatcgaggaagatcttgctgcttcctgtaaaaggaagagtggtccaagcagaagaagttcagggaagatgaatcatatcaaggatgaaccggacgaggggcaagcgaaggataaagggaagagaacggaaaagaggaagtacacaagacgggctacgactgcatctgctacctcggaaactccaaccacttctggccggatatctgaactacccgattcacaaacggcttcacatacggaacgtagaaagtatcagcctcgtagaaaatcactgccttcctcctcctcctcctcctcctcttctctggcaatacttccgtcttcgtctctctctgatcgaccgggatcaacacgttcatcacgtgtgcctccttctcccttggcaaccgattcgaaccaacttctaccgataagaaggcgtgcaatcctagcgtttcctcctcgaaaatcacaagctgaacttggaagggccccatccttaacgacgccctcgccaactgttagctctggctcttctacccaaaccagaacaaccactgagaaacggacagaaagatgcgctgaagatggacgtatgatgtaagtgtttcttcctcaaatttctctcgataggccgttcagcgataacaaactggtgatgaggtagcagtggtggagactgatccagtggcttggtgaaataggacaataacgactacaacgatcgaaacagtaacagtttcatacggagacgatctagattcggaacccaacagggaagtaactgatagttcaagggtgctgcaatacagcaagcggaaacgaggttgatatatgtcgattacttgcgctcccactctgcttgtgttcatctttccaatgttcaaagtgaaagcggcttagaaactacattgatatcgatacattatgttttccgaacaagaaaccctgatagctattcactccaaatcaggaacagcctcgtcaatctccttctcctgcttgtaggcgtcctgctgaacacctcgagtggtcactccactctcatcatccaagatgttgctctggtcaagtccgtcaagctcctctggataagatgaatagttgagagccaagaaatataatcatgtgttagcatcaaaaccagacggaatctgaagagcaaagacaattgtcgaaaggatacttacgagagcccacaactccagtctcggtggacggagcaacatcttcaccactgttagcagggggaacgtagtcatctccaccctaataagagagtgtcgaggatgtaaaattctcaatcatcggagtttatattatctaggagaaagagcgcgagaaaggttaacatacctgatcgacaacaggggcgctatcaggggcaggttgattcgactctcgctgctcggctctataaatcatgcatgtccgaatcatgagtatcagtgataagaagcaacgaagaagcagaaagaaaggagaaaacgaacccagagcttttggcaccaccgtaagaagtagaagaagacattgtttggaatttaaacgatcggtggagttaaatgaatgtaagtgaacaagagaaacatccacgacacacaggaggtgaagctctttatataccgtttttcttctccttttcatacgattcgatcgggttggcgttgccatcgttgtttgtagattcatcattgatgatttcatcatctgaacgcgatcgagatcgggataaatacagatgggcgcacagagtttatctaatctgatcgactgaccccacacgctcagacgacaagtgagcgagcgcacatcaaccggtgaataggctcggacacgtttcatcctaggttcggggccagcaacgagagttgaaagaaccgttgaagactcgaatctcttagacaagtctttcactaagaagaatcatcactgcctatgtttttcctcaagatactagaggacattagatgagaacgatgattgaacaaggagtttccttgtctctttctcttttatccataaattggctcacctcaactaacttgtcttgatacaccttggctcaacccaaggtgattaaggtcgttgggcgatagagtgttggggttcgaactcatgttcttcactctcatactgatgagcgttgagaagggacgttcttggctatcccgctgccctctctctatcactatgactcggccgtgaggcccggattgccaaatgcaaataacagttgtagatcgccaatcgagtccttcccaagactcttccatcgcctctctttctctctttcgtcatgatcaattttgtcgccgtcgccaaacagaatcttttcttcttctttcgcttggatgactgatgaatagaggggctgagggattatctgattccgacttacccgctaacaaccatctctttgaccgaacactcatttcccatcatgtctgattctgattcccaaaccgtccttattctcgccgagctctctcatttgagtctatgcaaagttagggaagaattctccacagttcattatcatcctttctccggcgatctatcttctgtcgccttttccaaggagattctttcgacaatcgatgtcgtgttcttggatcacaatgtaagcttattgagggccattcgctcgtttgaagagactcctaagcttcagtatctgcagctatgtacatctggttcgtctttctatgtttagttattattcgttctgatgctctcaagcttcaatgcgtccacggattcctttgagtcatcaaggttttgaacatgactgacattgaatactctcgttctcggtcctgacgctgactgatccgtcctcattttcatatttcgaattattatttgatcttttccctataaacaataataataccgatattactgataaaacttacaatactgctgttactatcgccgctactaccaatactacttgaataggtgctgataaggcgatcgcctcttctgcctttagtcggacgaacaataatgtcacactctgcaatgtcagtgggatccatacattgtccatcccaacctatgttctctcaactgtattggcagtctatcacagacttccaacccaaatattgatcgctagagtaagaccaaaaagctttcaacgcaccctgtttcctattgtctcccgaatctgactcttatgacacgacgatgttcaataccgtcatagcaagaggccagatgggctaccgaaggcgaagtcatgcgcgaccaaaagtcgtcttactatgttagaaatatccgaggaaagactgtcgggcttttggtatgtcagcatttctattcatatatagcacttgaaacactgaactgaacttttgcttcgcattgtacagggatatggtagagtaagctcccgtccacttttccatgagtcatctatacgtcaatctgatgatgccataccgtgctcttctttatctctaaccacaagatcgccagggagacagctaggttgttcaaatctctaggaacgaaaattatcgctgccaactcgaacggaaagcgaagggatgagtgcggagtgagttacttttttccacgctgggagcgatgtatttcaaacctgacatatcatgctgacaactctcgatgggcgtcatctcagtacaccatcccagggacaggagatgatgacggtgtgtcctccttgatcaaagccgtcaggtctgattgatgttcaatgtcagtttactgaccaaatctcaattcgaccattgtcagggtccattccatccgaatacttttccacagaggaccctctatccttgaagagctttgtctcgcgctcggatgtcttgatcgcctcgctgccttccacagacaaaacaacgcatctgttaacggaagagcttatgggtgcgttcatcgtcttgattccaaatcaaatccagcctgatcagaacgaaacggaaaataacccagtctctcgaattttttggaactttaaatcagccatgctaccaaagggtgctgtttttgtcaatgttggccgtggcactttggtcgactctggtgagctgagatttaacaacgatagataaggatagggaacaatttgctcaaaaatttccgagaacaatcaatgaacccagatgttcttctcaaggtccttgacggtcacaaccctactctcaacctcatcctggatgtgactgatcctgagcctcttcctcaaggccatcctctatacactcatgatcgtgtcattgtgactccacatctatcagggtacgttcgtcttcctttcttcctcaggacgcgatgtctctgatgtcctgctctcgaagattattccttcgttaccatgacctgatctaaatcttcatgtttcgtttttcagaaatgctgaaggtgaaatggacctcgccactgacattctgattgaaaacgctaggcggcgtaaggaaggtctaggattgacaaacatagttgatattgaaaaaggttactgattttttctcgaggacggactgtattcgatgggatcagaagacaagagctctttagcggctggatatttgatgatataatatatgaatagcccttatacgttacatagacgcgtccacatacagacgcgtgtgtttttcatttgagcctagtgagacagatatcatcaacagcacaatcacctctcgataacacaagacacgacccacctctccccagaggttccgccgcacccaaacattgcccatgagctcagctagacggtcaacaaggcagaccggagataactcttcctctgtctcttcacattccaagcctagatcttcgagggtaaagaagcaaacgattgaaaaggaagaagagtcagaagagaagaaacctaaacgacggtcgcccaggcctgtgatcgtcaagcaggaaccactagcggaagaaaacaaagaagaggagtcttcattgaccaaagaagccgagcctgatgatcctgtcgaagaggaggaggtggaagaggatgttgacgtcgatgagcttctcgaggagatatcagacgccgatagagagtcaacccctcagcctcaatcccaacctcgttctgtaaggaatgtgactgaaatgagctcttctacacccgtaaaacaagagccaatagaatttcaagtctcccagtccgatataccatccatccctcggtcccgacaaccgaccaacacttcccaatcttcctcaaggcagtcatacgcaaccggtgctaaagcagagattccaaaggctgagcttccgaccccacctcagaagagactgatcatccaaaaattggttcttgaaaacttcaagtcgtacgctggaagacaggttatcggcccgttccacaaggtgagcttctagaacgctatctatagactgttcattcggcgaaatcatgattctagcagcggacttatgccacgaaaccactctcgtcctgtctgttctcattgaatagtcgttttcggccatcgtaggaccaaacggatccggaaaatccaatacaattgatgctctcttgttcgtatttggttatagagccagcaagatgcgccaaggaaaactaggagagctgatccataactctgaggattggcctgacctcacatattgtaaagtcgaggtctggttcaaagagattatcgacttggtacgtatggttcttcttacatctcagtcctatcatctgaaactgttgacccacaatactaatagcccttacgaaatgcagcctggtcctgacaagtacaagacaattcctgggtctaatctcattgtggcccgaaccgcgtacaaggacaacaaatccacatactcgatcaaccaagggccatcgagctacaccgaggttaccactttgctcaaggacaaggggatcgatctgactcacaagcgatttttaatcttgcaggttcgtttctttataatggaaccaaatcctccttgtcaacctgagcggaacgatacatatcttccatcacggctgcactaaccattttgtacaaaccgttttgaatagggagaagttgagtcgattgcacaaatgaagcccaaggcgcagacagagcatgaagagggcctcctcgagtatctggaagacatcattgggacatcccgctacaagacggctatcgaggaaagtttagtcgaaatggacgggctgaatgagataattggaggaaaaaagaatcgactaggtattgtagtgaaagagctcaacagcctcaaggtacgttcttcttacaacattcgagactctcagccacctccttcgtataatgaaaatgtagacaacatatccaatcctaaccgttcgatgttatttacactgtattctgtgcttatgataggcaaagaagaaagaagctgaggactacttgagggatcaaaatgagcttgctcgaagacagtcgttactttatcagtaccatctattccaccttcgatccaacatcgagataacccaagcctctatggtaaaaagtttctttcaacccatctacttcgacggttttcattctcaacataagcgaacggcaatactgacaagacgagagactttcccttcataggctcgactaacggagcagttgactgccgagagggaagcaaacaaggataacatcgctgagatcgagggtatggaaaacatgtacaatgagcagaacgagatctaccttgtaagcttttcatcttttttaaaggtctatgtatcttgtgctggccatgtttctcgtcaatctcaagtcctgcacttcatgtttgattatgtcccaggatgtcaaacgcaacgcggataaaatcatgaaggaacttgcagctcaggagaagaaggaggttcagcttcaagaaaagaagaagcattcagtcaaccagcaaaagaagctcagaaaagcgatccaggaggttagtaaatccctcactctctagctcgtgtagcacatctagttgttgaaatttgaaatcgctcgcacttctgctcatcattcgcttcgtggtgttgtcggatttgcaacatggacttgaatatgtaggacactcacgccaagtcttcatcagccacatggatcgagaatagccaggaagttattgatgataccaggaagcagattgaagggttagagatcaagcttgctgccgaagaacgagaatttgaagagattagggacggccttaaaggtcaattctcagtatctatctagttcctctgtgatgatgactgatttcttatctttgttgaccaaaatcttgacagacaagaccgccggattttctaatcaaatagagctcaaacagcgcgagctcgagccttggacggccaagatttcagaaaagcaggcgttgatcgatgtagctgagagcgagaggaagctgttgcgagagaaggcgaacggtcttacagaaggtgttgtagaagccgaggaaggactgaagattatcgaagctgggagagaagaaaaggtaagtttacattcataagcccagtcaatcgagtttttgagaaatgattcagcaaactattttcttcggcgattgacgattgttttttttaatagcttgagatgctacaagctttgagcaaaaaagaaaagattctcaataaacaacttgttcaggcgaggataactttggaggtaagactcatcagttattctgttctacatacttcgatcaggagtccgaggtatctcaatatgtccttttctgattcggatcaacatctaggaaatcaatggcaaagaagaaagcatgcgccaccaagcatcgtctactcggcagaaagcggatgaagctaaagcttcgcttgctgcaagcaagggagagaacgagatgctcaccggattaagaaaaatgagcgagatgggtcgattgactgggttttctgtgagtgacttatccatcaatttttttgtgctcggtagagaatttatatgcaataatctcgtctatcacttacttactcagggccgtctcggagacttgggggttatcgacgacaaatacgattgcgctgtaactactgcctgtggagggtctttaaatgcgctcattgtagatacagtgcctcaaggccaagcagtcatcgagcagcttcgtcgatctggtcatcgagcatcaatctttgtactggagaagctaggagatcgtgactattcgtctatcgacacacctgagggcgttcctcggctgtttgatctgatcaaaccaaaggaagctcggttcgggcctgccttcttcaaggctacgggaaacactcttgtcgctcatgatttagaacaggctaaccgaattgcttacggcaagaagaggtggcgagttgtaacattgggaggagatctaattgatgtgtcaggagcaatgtctggaggtggaacacgaggtttgtcattctatcactttagatactgaacgcattgttatgctagctgacatcattgattttatttagttcaacgcggaggaagttcgttatctcttcttttttcttctaaataaaaaacagaccctcgtttgttgatatgtgcacctgtttgaaatattgcagtgagttcgaagtttgctaccgatagaattgaaccaaaggtcctcgctcgatatgaggaagagagtgaaaaagcgcaacagagcctcatcagttttcaagcgaccaaacgagacgtcctgtctgaggtttccaatctacaaaagcagcttccagagctcgagatgaatatcaccaaggtagagcttgacattgagaacggaaagaagaggatggccgaggccgagcagcgactcaaggaacttcggtatgtcaaattatgaacaatggcgaaatgcttccaatcgatgttcactgactatttgcgttttcgaaacggttgtgcagctcaagagcaaagcctaatattggcgatgaacaacgcatcaagattcttgataaggagatctcatcggtcgaagaagagatcagttctttgcgtcaaaaatcgagtggaatcgaacaagccattaaggagcttcaagatcatatattagaagttggtggtgtcaaactccgaacgtgtgttctccagacttgcaagtaatcttagaagcttcttacattcatcaaaactgacctttcctgaatatgatttccagccaaaaatccagagtagatgggaccaagcaacaaatcgaccttgctggagacaaaatcacgagagccgaagtcgaacaagctaaggccgagaaggacgccgaaaaagctcagaaagccataacgtccaacactatcaaattgggagagatcgacgaacaattagagactctggaagctgaactagctacttgtgccggagacatgcatctaattcgatcaaccttggaggaggcgcaagaaggaagagaagcgttggaagaggacttagctgctctcaaggaggagctagacgagaaaacgctggctataaatacgttccgtgctcgggaggtttgtttctgtctatcacttgctttttgccacagcttacctatgactaacgatcccctatcttatcaaatcgtcagctggatcttactcaaaagcactccgagaatgagaaagtcctaaaggattcaaaagcgaaacacaagcattggaccgatcggcatcaagagcttgaacttcaatatgtagagtatgtctgtctgactaggcttatctaataataattgtaaggaacttaaatattaactgacttgaccggttcatagggaggacgatgaacaagactctaacgcagttcaagatgatgagaacgctatggatcaagatctcgaggccggggcagaagacgaaagcaacttaacctctcaccctgattcattaccgcgaaagccgagaacctcgcagctagaattcgaaaccttcagcgatgacgagttaaaatctcaagacaggaacatccttgtggctgatgtggccaacctggaaggtgcgcccctgtggctgtcttctcaatgctttggacgctaatagaattgattatcttacactgatcagaacgagtgaataaatcgaagcccaacttgtctgttttggctgagtacaataaacgacaagtcgagtttgatcaacgtcaagccgatctggaagaagtcaccgccaatcgggatctagctaagaaacgatatgaggatttgcgtaccacaaggcatttagagttcatgactgggtttacagccatctcgtccaagctcaaggaaatgtatcaagtaagggccatttgtgttgatcttctcaagagtctcttgatatacgtatctttcttttctggagcctgaaccgacgaataatcttcctatttgcaacatctcgttcttttgctacttcagttgataactcttggaggtctagctgaattggaactcgtggactcgctagatcctttctcagaaggtcagttctcatactcgccatccctttcaagaaaatactgttctcacgaagctgtctctgatcaacaacttgtccatgtcttcaggcgtcattttctccgtcatgccgtgagtccaaagtgcatgtctgccttgtcaattttgaaagttcaatcgaactgataacactcttattcattgattgtctcgcaggcctaaaaagtcttggaagcaaatagcaaatctgagtggtggagaaaaggtgaatatttccataagcgatacgactgatgttctatgtaaagcgacagtgctaatgctctcctaaatatactttttcgatagaccctgagttctttggcacttgtgtttgcacttcatgtttacaaggtcagttctttatatggtcactttatagcgtcaatcccagctaataattgtgacgctttctctgggtttatagccgacacctttgtacttcatggatgaaattgatgcgggtaagctctcaaccagattcttggcgctgttgtcttttacgtccgtccttgctcacccaagtgttttgcaacccttgtttagcgctggatttccgaaacgtctctatcatcgcaaactatatcagagagcgaacaaaatccgcccagttcattatcatttctctccgttctgatatgttcgaattatcgtaagtttgtctgcctgcttgttcttcaaaatagagtcagccgcggaactgatttagggtaattatcaatcattcgtacgggaatacatttaagacaccgactggtgggaatttataaaaccagtaatgcaactaagtcggtggctatcgacaatggacagctggtacctaacatcagagccgcgagctgattgaagatactgcctggtagttcttttcaatatacttctttatttcgacgtcttgatatctttccggtcccatcatccctcttctcatttacttgtagcaacatatattggttctcaatacgtatgattgattcgatgtcttctgtaatttttattctcgttcaccctcttcacttaaggttatagagtatgtcactgtctttcgagatctagttcattgaagataaagcagtatgtgacacgaggtgatgttgaaaacatcataagatacagtactgattttgatcaccagaataggaaatatctaaatgtgaacacgataaagcacaatatctgttgaaaacaggtggcctttgtcatagttttaactttatcttcaaaatgcaacataacaaatgaaatatacgtctttttacaaaggaagaagattagatcgagggtcatataaaatatgccataaagtaaagagtcaagagacaggatacagatgcaaatagggtaagcagagctagcagcctcaatatcaaaagtatttattctgatagcagccagttacacaattatctgcctactcttttatcggtcatcacagtgctctcgccgcttgaagattgagcagacttttgatagcttactcactaaacaggagaggcaggttctcgttatgtatggacttgaaggaaagatggaacggtgtcaaatttctgaaacctgatagaacactataggatagcagtactacagagagtttcacacgtaggatcacataacagcaaatctccccatgtagcatccaatgaaggtatcgattggctcgaaagacgtttatcaatgccacatgagccagagtagacttcacggaacgaagatgactgtgtaaacaaacagatcaatagaagtcagaagtaacttgattatatctgaacgtggtccgtcatctctctgcttatcatctatccaactgagttttacgggcgcaggcaggagagctgtgtgtgaagggattctcagcgtgcttaagccctcaggcaggaagaggtcatgggacgatacagagtagacaggacgatgatgatgaggaggaggaggaggaggatacggaaaggtaatgtgagggcggaagggcccggcaaccgttttgttgcgactctatggattgtagagttttgttatgggcgcaggcaagggggctgagtaagggatgcactcagcgcgctcaggctctcagaagggtcgtgagagagggaaggacttcagccatcagttcgtcttgttcatagcctgcttttatgcgagtcacgatgtcaaatatctgtccttcagtctcaaggggtgcaacctgcatcggccgtaaaaggatctgaggctgttcgtcggatgctcgagcattacccccctccataaaatc

SEQ ID NO: 543 - DNA, 475 bp, Xanthophyllomyces dendrorhous
gccagaccttgaagctatcgacgatcgccaacagctccttgtcatagatctcatagttacactcagctgggttcatcttcctcgagtggaacgcaatcggcctagaccttccatcagtgtctggctgcgaaagaacacctgcgatagcaaagcctgaagcatcagtttcgagtgagatcggcttctctgggtcaaagtgtgctagcacagaggccgaggcaaacgagttcttgagtgtctcgaacgcctttcttgcactttggtcgaatgaaaaccgcacatccttcttccgcagtcgagtcagtgcgacacaagtacgagagtagcaaggaatgaaccgcctgtaaaagttggcgaagcccaggaaggcttgtagttgtttgatcgacgtcggctccggccagtcaagcacggtttgtactttacccttgtccatcgtgacgccgtggtcagacaccacaaagccgagaaactc

SEQ ID NO: 544 - DNA, 369 bp, Xanthophyllomyces dendrorhous
cagtgatctgtatcaaactcgcacttttcgagcttggcgtacagtttatgatcccgcaggcgagacagcacttctttgacatgttcttcatgctgagaagggtcagcagaaaagatcaggatatcgtccagatatatgatgacaaagtcgtctagtagatcccggaagatgtcgttcataaactcctgaaacgttgcaggcgcattggtaagaccaaagggcatgacgagcgactcaaagtgtccatagcgagtgcgaaacgccgtcttccactcgtctccctccttgattcttaccagattgtatgcgcctcgcaagtcgagtttggtgaagatacgagcttgacggagacgatcgattgattcaccg

SEQ ID NO: 545 - DNA, 527 bp, Xanthophyllomyces dendrorhous
tattttcttttctttcttcccctttctggttctctcaatgaacttgctcactgtgtgtgtgtgtaaaattgtttgagaatcagagaattatagaattagcattaggatcaggtctatccgaggagaatcagttgtctcgaacaaacgatcaagaagattgtcatggtctgacccggtttgatccgcgcagggtgaccttgcacaatgtagaccgattcttacaacagcctcttggtactgcttaactcgctcttggtacatcttaactctctcttggttatatcttgactcttccttggtatctctcagctcctccttggtatctcttcgctcttgcttgtggttgcttgtgtttccttgtgttcgcttgtgttcgcttgtgtttccttggtctaacatctcgaatgacatatataccatgtagtcgttagctatctcccctttactcccccaagcttggaacctcgttaaatcctcatagttcccttcaataacctcttcatatccctctgcaatattgcatgatc

SEQ ID NO: 546 - DNA, 794 bp, Xanthophyllomyces dendrorhous
gttgcgagcaagtgcaatcagagtggacaatctactgtccgaaaagaccagataccaacagaaggattgatatccttattacacaaacagtatgcctcgacagcctacttcttattctcgtccgtttgttcctgcgtcttgtggatttgttgctagacctgtagatgatgggccatctccgatggacattgatgtcgtcgagacaccggccgccaaacagaacacttacggaagagctcccacattccatcctgtttccagaacagctgcaggggtaagtcgacccaacatcatcaaagtccctctttctgcagctgaaaagcaacgacgacgacgggagaacctatgcctatactgtggcgatgccacccaccatcgcaacgcctgccctctcgtccggtagaacaatcaaccgtctcagatggcagaactaaccatctacctcgatacggatgagatggatgaggactcggaaaaagtcaggactcagtaggtcgtcctctgctgggtcatcctcactctagcatccacggatcgttcaactggtccgagccaatcgctcaggcacagtctcctaagtctacttccttttgttctccttctcatgtttcttctcatacggacacttctcgctctcggaacaatccgactgactccgttttctcaagtaaatctcgcgttgaatcttccatcacatctatatcccctgtatctcctctcttagcctccatctctacttctcctgtgacccgttcagcagatcactttcaacagttgattcctatacatgtgtc

SEQ ID NO: 547 - DNA, 369 bp, Xanthophyllomyces dendrorhous
cggtgaatcaatcgatcgtctccgtcaagctcgtatcttcaccaaactcgacttgcgaggcgcatacaatctggtaagaatcaaggagggagacgagtggaagacggcgtttcgcactcgctatggacactttgagtcgctcgtcatgccctttggtcttaccaatgcgcctgcaacgtttcaggagtttatgaacgacatcttccgggatctactagacgactttgtcatcatatatctggacgatatcctgatcttttctgctgacccttctcagcatgaagaacatgtcaaagaagtgctgtctcgcctgcgggatcataaactgtacgccaagctcgaaaagtgcgagtttgatacagatcactg

SEQ ID NO: 548 - DNA, 475 bp, Xanthophyllomyces dendrorhous
gagtttctcggctttgtggtgtctgaccacggcgtcacgatggacaagggtaaagtacaaaccgtgcttgactggccggagccgacgtcgatcaaacaactacaagccttcctgggcttcgccaacttttacaggcggttcattccttgctactctcgtacttgtgtcgcactgactcgactgcggaagaaggatgtgcggttttcattcgaccaaagtgcaagaaaggcgttcgagacactcaagaactcgtttgcctcggcctctgtgctagcacactttgacccagagaagccgatctcactcgaaactgatgcttcaggctttgctatcgcaggtgttctttcgcagccagacactgatggaaggtctaggccgattgcgttccactcgaggaagatgaacccagctgagtgtaactatgagatctatgacaaggagctgttggcgatcgtcgatagcttcaaggtctggc

SEQ ID NO: 549 - DNA, 641 bp, Xanthophyllomyces dendrorhous
tcacagcatcctatccagatctattctgaccacaaaaacctgcagtacttccactcgaccaaaatgctcaacagacgacaagtacgatggtcgatggtgctgaactcgtacaagtatgtctttaactttcgtcctgggaagaaaaacaccaaagtaagtgctttcactcgacggcacgactatacagaggggggtaacgctcgagcatctgacgaggctccccagttgctgctacgaccagtcgaggtatcacctttcgagacggacggggccatggaagactcagcagacaataacccagaaaatgccttggaaaatattacggatagcgcaacgtcggatattgcgactcgcgtgaaagcaggttatcagactgacaactatctgaccgaactcctcccttttctcaagaacccctctcgtcaagctcccgtccagttgacaaaacaactcaagaaactcactcttgagcctgacggactaattttatatcaaggcttggtctatgttccagatgaccaagacttatagactgacattcttaaacagtgtcatgaccacccctcagcgggtcactacggtcggtacaagacgctcgaactgttgtcccgcaacttttactggccgaacatatccaggtt

SEQ ID NO: 550 - DNA, 507 bp, Xanthophyllomyces dendrorhous
gcatgtgcaaaagacgctagcgttctgtcgttcgggcatgtcgatcgcacaagatctccaggaaaagtatgcgaacgaacatagaacaccagcacctccattcaagccaggcgagctagtgcttctcaagcgggtgaatgtaaaaactgaccgtccgagtgacaaactcgatttcaagctacttggtcctttcaagatcattcgagccgtcggcaattctgcatttcgactggctctcccatcgaccatgcatatccatccgacgttccatgtatcccttctcgaacggtactatcccaatacactgccagcaagacagatagccccacctccagacccgatcgtcgctgatgatggtgataagctatggcatgtcgagaaaatactgaaatctcgcctcttccgaagacggctacagtttcttatccgatgggaaggatacgatgcgagcgaagatcagtggatctctcaccatgaactgatggatgatgaccctaccgtcttgga

SEQ ID NO: 551 - DNA, 7376 bp, Xanthophyllomyces dendrorhous
gatgaccctaccgtcttggaattctatgctaagtatcccacttctgccatcaatgctgctaaacgcgctgccgtccaacaacacgctttcggattgcagaatcagatgcgtcgttcgtcgtcgtgatctctgtgctctccgttctctccgcctagaaagggggatactgtcagggatcagaccgagtagtatatgcttgtatgtatctgcataccatctcaacaatacgtatttgctaccttctatattttccacacttcgatacctgcatgcatcccttccgttttgcatcccttctggcttgcatacatgccgagcgacaaagagatacaagtacttcgtcgctttcccttcccaatagttctttttcctcttttctcttttctctcaagtttggattttgtcatcttcgttcgaagtatcttcgtcctgtctatcattacacctatgcctatgactttggcatctttctaaatcctcgagagcctgagctttccacatacaacctcatctgaaaactctacaaccaaccaagtcgcaacaatcggctgccgggcccttccgccctcacaaagcggcctaatcggttgggtcagggcgagtgatgacaggctttccctcgtcatgagtccggatatagcggtggaggttgttgttgggattttgttggaatcatctgttcgagtcctttcctcgaattaccttctcaaattaatggtgtcgaaattgattgtgtctgaagtatctgttaaacttgtcctctttcaccttcgacccattctgtctcagtcgacatcttggcagctatcttcttccatcgtggctgtttctcttagtgtcgtcttagcttctctcttcttatccttcttctcatctaagcacattgtgttctctcacatatatgtgcgctcgatactttcgtttgttttcttttctctttctttttctttttctttttcccttcctcagtattaacaaaagactgtttgtgtgctgagttagaatatatttgttctatctcgcagaacaaaccgtgaatctcttcagagccttctcccattagaacaatctcgatttagttcttttaggcggagtacccctccgaggagctgggaatgatgtgttgcactcgttatcatcatatctgggtttgctatgatctgtattgttgatgtttgtgtcttttttttcaatgatgttaacgtacatgattacattggagcgttttatgttgtagaatgtcttgggttagtcgcccaaagaccacaagtatcgatttcacctagtttttgaaggcatcgggttttgacactgatcctatactggcgtgaagcaccaaaataagatcaaaacctttaaagtcttgtacccgaaggtatcttagcaagctatttataaaaacacaacaaccaacacatgatcgactagtagaactaaacaaattacagaaaaatgcaaaaacaaaagaagaggaacttgaactatccgcagtgttcatcaaatcaaaagagaagaatgcgaaccacgtcactgtagcagtactagaaacgaagtcatgacagattgagagaaccgagttgaatagggtgattgataggactacgtaaccatctagttattcctgaagtgttcgatatcttatagacagtgattactataggtattcttgggaaaataacaacacataattaaaacgtttgtttaagctctcctgaggtcgcgttctttcaaattgtatgcccgagtgacgaagcatcagtggcacatcatcatttcgtgtcgaccccgattaaaaatcgtcgctttattcaaaagtcttttcactgggatttttagttaaagcctcatccaagctcggtaccaatacgtgatcgttgctctcacgctacacgccaattctgacatctgagttcaagatacctcacatcagatgaactaggtacaatcacactcacataatgtttgatcatatagagatactgattattttttcctcttctcatacaacgagcttcattatgaggtgtaaagatgggagatctgcaatacaaagtaccttatgatgaaggcttgagagatgaggcttcacgtgcattatacgcacgttatgttctgtacgttgttaagaaaacttgctaacgttcaaaaaaaccttgccatgattatctaagatgtctcatcacaggcattgggcagcgtcatgcttgatttcatttaatcgatgaagtccattatgtctttgtccgttaacttgcgagagattcacacagagcgtctatatgcacctatccatcttcaagcttaactcttcatatggagaacaacagaatctatgatatgtatctttaagtgataaaggaataacagaagaaaagtaaacgtcatgcatggtaatgtcgaaatttagacataaaacagtctcacaatgcggtcgtccgcacgaagaccgagttagagtcattgatacctcaatcaaatcaaaagcgggcaaaaagagacgaagccagtcatcggatctaatataaaaatgtaaacagataggtatcatataagtacaaaattcattgttttctttgctagattatgtatagaaacaaacaatcatgttccaatgagagagttcagcattgaattgattctgattacgagaacaaggtctccatttagttgtgaatggctttgtggatagtcttgaacactgaacgatctatcgggaaaaggttagaacaatcgaatgacagtgacttctatttgattgggtgggaaaaccccacagctcaccttcgggctatcgctcttcttcacaatggattaatgtatctagtcagtctgatttgcgaggaacccttaaaaccatcatgatgatgactctcagcaaaattgtattcaacccgaacagttttaaattgttctgcgacatataccactgttgatctaaaaaacgtttcaataatcgtgcaaagcgccccttttcatgatgggtctgacgttgttcagccagataaaggatagaacttccactcgataccatacgcaatggttgattgacacaggttttacaaggcaattattgtcatgttctgatacttttcctcactgatcatagtatctgtccatggatttctaccataatactgtgctttgctctttgagtttgacaacaccatgaaacatgtcgttgtgtaagttacaaatcattgtctcatgccgtcaactctaaataaacgtcataccccaaaagatgaaaattttatcaacattcgcggaaccaagataagaagcagagttgaaatacacatacgatgtttaattgaagagaaagaagattggaagaaagaagcattcgggaaatgttcatgatcttaagaatcgttacaaacacacatcacacttgaggattcggcgaatttatttatgagacgaatacacattgagagcacagttctacaaaaatgtggagatgatgcaggctcattcatattcaagcaatcaaaatcgtaccaccctcaacatcatccctcaaatggcaatcttttcttgatatcatgctgtcgatgctaccaaggtgaaaggcaatgctgactctaatgataaaattagctatcacatcatagaatatggatcataattaacgacgatagcgtcttcatatggttaacccgatgaaggaaagaggtaaaatgaactatcacattgatatgccatggggtggtagagctactgttgagcaaaattaacatgacgtgaagtagacgcagaccaaacttcatatcagtgcattctggtagaaccgatgagcgtataagataaatatcaaaaactgatgatgagctcgccatcgtcagaatcactcatggaggcgagtgatgggattcataaaaacatttatcttttcaatctgtaaaacattaacaagcttacatgacgctgtgagaaaaaggtgatactacaagtatccaacatgcttaaaaaccaaacggagcacaaagtatccaattggctaacgattgacctcaacatcttttatatttgtacaaagtgatatcatgtttttttagcactacttcttagccgtttaagcaactgattttcaagagtctataagtctatgtctctcaatacgtaccaatcatattattattgttgccaaagcacagcgacttcttcgcctgaatccgtgtcatggagtattgatacaaaacgatgatgtagctcaagacactgaaaagtctgggtcgaaaatagtacacgacctttgaaaagatggtaacagacggtcaaagctgcagcacaaggaagatatgaagagtactagaataatggcactgtatggccaagagatgtcatggcaatatacgatgtcacatcacctctcaagtgactctcgataatgttttgtttgttgtcttgttggaccttgcatctagagagtgtgttacggccaagctttttccctaagtaatgtgaactgttcgcaaattgagtctttttcacgtaagcctacagagccaattcattgcggttgaacgaattttacatcatttgcttttgtagtggtactcggataaacatttcaaggaatgaaaaagctagaaagcctaatgtgaacaatggagtgaaaaccacgaaaatcatatctgacaaatttattcaagtgcagctagaaaagaagaacgttctgcatataatcatgttagcttattatgtcacactacttcgcacctcgagtgatgttcaatattgacaaaatattcacttgtgtgtatctagacccccaaacaattctaccgcaacaaagggttttgaaattttaaagaagatggaaatacctgatgcgaaccaatgtagatgattgcacctagggcaaacatgtttgacattttgaccaaaaacgtgcaacatatcaatcgacaatgtgtaatgttgttatgcaatttttcgagagcgccgaaatttgacaaacacgctttgatgtaagcaatatttatctttgtgagcatttaagtatcacttcacgttccaagaactttgattttcttcctttcataaaatttgtgtgtgcacaaaaaataaaaaaactagcggtgtcttacttttgtatcattgtcaaacaaattattttcttttttctcaaatgaactgtttgtacaaaatattttcatagacataatactgtggttcattgagtaaattccattgatgtttgtgttaaattaatatcaaacatagtgaaccaatattcaaaatcagagagtaaagctactaggatccatcacaaaggaaactctctgcctcgtgtatttaatttcatcacaatcatcattgactaaagaatgatttgtgaatcaacaaaaatccacctgatgcggtagattcaagaaataacatgccatgtaaaatagattcttgttccaagtatttctggcggtgcagacatgactattcttattcttatttacggcaacgaggtttgtctcaatctcagagtagtttaccaaatgctcgctgtatgataatatatcataacaacgccattttgatgtactccttacagtgagtctgatttgtacatactcctcttcctcttccatggtggtttacaattataacagagactgagcaatatatttgagaggcgcatcacctgatcacaacatctgcaagaatgaaattgacaaactttggagcgtcgttcgtgataattcaatttaagacttgtttttttatacacgcgttgttatttttgtggtctttgacataacttgagattgtcaaatgcaaatgctgacgtcaaacatgaggtgggcaacaaaagaattgattgtatacctttcactgtatcattcactgctttacatttgaagttcacccagcaaaagaaattgaacaatatatgcgattcaaataaacgaaaccctgaggtcatcacaggtattgtagacaatcaaagtgtataaaatcgtcagaaattgcttgaccataaagtgcataaatgttgacatcatgattgtttttcgatcacattcatagaatgatgacgaagagcaatatgataacaaaaattgcgatccacatgatttactcgtgttgatgaatctaatataaattcgcttgtaagaaggtgagtgtcgatcaaagagttttggcttgcaagctgcagggaccggccctgttcatgaagctgtgcagtggcagtgaatttggtaatgacaatataaatgacgatgcaatgattacagtactgtcggggtcactgatcaagattcagcatttgcacttcagcaactcacgatattcagtcacttgattcataacagcacatcgttgtttatttggaggcttcagacaatttgcaaagatgctcatttcatgcatctttcccaagactttcgcactgtatctcaatgtaagcagtaggagcaacctgctcattgtcattgcaagaaatactgagcaacgaaaactgtaaggatgatttttcaaaagaaaaccaagaaaggggtgatctgactacgcgataaatacaaaggataccaagcttcatatgaggataagtgaaggaagaattgatttaaggatggaggagaccatgatccatgatgccgattcaagcttgaaggcactagtctgaacaaatcaaacaatcaagtgagacatatatcctgagtcaaatgaatgatgaagagtgggccgaggtcagtggttatgcagttcagttgagatagaatgacgatctcagaagatcgaaatccctgaacataatggacaacaagatatgcaaacataacacgaaatatatagtctaaaaacgttaagaaaaagggcaatagaaatgataacaatgcttatatcgtcagtgaccatattgagagtactgcaaaatagagcattgggttgctgaatagcgtttgtttagatgagacgtatctaccggaccgggctgatttgtgtcgagttttcttttccttgttcaccttttctgtcatctttttcttctttcttagcatatactgatagtgttccgctggcgttggaattgttttattacaatttctcagcaatacgaaaccgtatctgctgttagattaagagcctgatttactctactgctacagatatatcttacgttgtgtagccagtgtggcccactgttgcagagccgtcgtatgtacagatctcaatcaagcttgttggcaaatacagtttcgtattgctaagaaatcaaaatgaaacagtctcagcaccaacggaacagttctggcaaatgctaaggaaggagaaacagaaaacaggaaagacaaagcaaaaaagaaaaagaggaggacggaaaagaagagaagtacgccagctgacagagtgcgctagctaaggcttag

SEQ ID NO: 552 - DNA, 1063 bp, Xanthophyllomyces dendrorhous
aatatattctaactcagcacacaaacagtcttttgttaatactgaggaagggaaaaagaaaaagaaaaagaaagagaaaagaaaacaaacgaaagtatcgagcgcacatatatgtgagagaacacaatgtgcttagatgagaagaaggataagaagagagaagctaagacgacactaagagaaacagccacgatggaagaagatagctgccaagatgtcgactgagacagaatgggttgaaagtggaagagaacgagtctaagaaatgattctgacataaagaaatccagaaggtaattcgaacagatagttcgagaaaaggattcgaacagataattccaacaataattccaacactcccactcatcgttgctgtttaaacaacgatgtgaagataagatgatgaaggaaaaacaagaaagaaaaggtaaaaagaggataagataaagaatgaagaaagaagatgattagataaaaaattgaaacaaattgaaatgaaataaaacgagatcaaccaggatgaaaagagataaactgaaatgaagaagattcgaacaaagatgaagcgtcaagaagtcgaaaggccgagatgtcaacatgtcgaataccaaaaacagtcgcgactcaaccaccatcttctacttcttgcttcacctctggggtcagctcacgagctcccactcgaccaccaagaccgcctttgtctctcagatactcgaacgtctctctcgagagtggcttggtgagtaagtctgccggcatgtcctttgtcttgacccatccgaggtcaaggatgccttgtctgtacatatccctcgcgtacttgtacgggacatcgatgtgtttcgtcttgttgtgtagctgaccgcttctgacactcgctatggctccttggttgccagtcttggcgacgatggtcggaacagaataaccgagctggtcgagaagcgaccggacccagacgacctgcgaggctccgttcgagagagctatgtattccgactcccaggacgacttggtgatggacggtatgcgcttgcttttccagtagaccagagctcca

SEQ ID NO: 553 - DNA, 648 bp, Xanthophyllomyces dendrorhous
tgaatgactttcttgactccttgtcttcagcatagtccgagtcggtgtagagctcgattggcgagacggatggggaggacttgtggccgatggtgagtgtgaactaatgaattagggagctctttgttatatatcttctgattgcctaattctgattctaattgtattaaaacacctgattccctcaaactgattcctctgatcccttgattctctcaacaagaatacacacacacagtgagcaagttcattgagagaatcagaaaggagaagaaagaaaagaaaacaaactagctactgtatatacgagatcacctggatggaaacgatatagaagcaagatggaaataaacgagaatggaaataaatcgagagagaagtgacataaagatgatgtagaaaaatagaaataatgtagagatgaaataaaatgttgaaggagaaagcaaagagatagaaagtcaaccaacgcgcaatactcgatgattgatgtctagactgctatatccaataaaaacctccaccgctatatccagactacagacgaaggaaagcctgtcatttcttgtcctgatacaaccgatcttgccgcgtaccaagcgtgggatgcagcgcggaacaaagtgctgtcgatcattctgtctagac

SEQ ID NO: 554 - DNA, 4918 bp, Xanthophyllomyces dendrorhous
ggagaatagaagacacaaaagagaatcaaaccaactacgctgagcaatcaaagaggttggtatgaccagaagtgttagtaggattggattgtatataatatacaaagatagggaacaatgtagtagagtgctgtagtagagtgctgtagtagtagaacgctgtacttttaacacatgtttcaacatgttctgcaggatagaacaaatatattctaactcagcacacaaacagtcttttgtgaatacttatcatgatataaaataacaaacctgcaagatagaacaaatacattctaactccagaacacaagtaagctatcgatgaacacgatacaaaagaagagagaaagaaaacagaaaaatagatatggaccaacctcagcacacaaacagtctttgtgaatactgaggaagggaaaaagaaaaagaaaaagaaaggaaacgaaagtgtcgagcacagatatatgtgagagaacccaacgtgcttagatgagaagaaggataagaagaaagaagctaaaaaaaaacaaaagagacgataagagaaacaaccacgtgtcatgatctgacccggtttgatccgcgcagggtgaccttgcacaatgtagaccgattcttacaacagcctcttggtactgcttaactcgctcttggtacatcttaactctctcttggttatatcttgactcttccttgatatctcttcgctcttgcttagtatctcttcgctcttgcttgtgtttccttggtctaacatctcgaatgacatatataccatgtagtcgttagctatcccccctttctctcccaagcttggaacctcgttaactcctcatagttccggacaatcatcctcgcccttaacctcctgtcaatatctcattacccttccgagagcctgagcgcgctgagtgcatcccctactcagcctccttgcctgcgcccataacaccacgatggaagaagatatctgctaagatgtcgactgagacagaatgagttgaaggtgaaagaggacaagtctaagaaataattccgacacgatcaattctagaaggtaattccagaaggtcattcgagaagaggattcgaacgaatgtagaccagccacagcaagcaaacaaacagcatttgtgaacgctgaggagaggaaagagaacaagaggagcagaaaatgttgagcgctaagaaacatgtcaaagaacacaaggcagaatgcgactgtcaagatgagacgaaagataacaacaaaaataagaagagagaagctgagaggacagcgagagtaacggctacgatggaagaagatgtctaccaagatactgactgaatatcaactatctctataatcgcacgttggctagtatactcttgtctttcccctccgacttaagaatcattttttcgacaccatggattgacatgtatattagtattgtaaactagtgaaccacccttacttattggacgattaaaatgagcatgaggcgatatcaaaacctcatgtcaagatgtttatcttccttcttactttgttaaatttcgactatcatcaggtcatatattgcccgatattagtgtgggacccttttctttgagcttatcagaagataatgcaaattgtaagctaccgtatccgcagtgattgaattgtatcggcggatgccgagggaaggaagaagaatgaacagccgaagcatggggtagtatctctgaaaaagagaatgacaagcatattttgatccaacctgatcgagacacatcaagatatcttggtctcaagattgtttcatgtgagaacatgagcaatgaggacttcaaaaccaattgtgaaaaatcaggactgtaagggacgattatttgacatctgattgaaatatttcgcaacgtcactttctacgacattgacttgttgctcagattgaaagaaagaaaagaggccggatatcgaaattctgtagagagtgtctcttcgtcatttggagtagtttggtggaagagtggagctaagtattgggttcgtatcaggttagggtgcattttgttataacagtgggtagattcatgcaagctcatacaaaagataaagtacttctctcaatagccaatgtgtttggactaagactgtgttctgtggccttacacaccgaacgacgcagtgacgagaaaagtcaagagagatggaggatcaaaaggagatttgcatgtaagcaaattttgccatgaccgtatctataattataggtacatccgacttgatgatgttttcttggtgccacaacttggttgtcgctttggaagttattcaaaacgagtgagccaccattacgaatagagaggcttgaacgaaataagtcacctcagatcgaatgacatacgaagacattagtcaaatcgaacacatcaaacacattgttgacatatatttcagcgatctttgagttaattagagtctgcgacacgattattatgatagggctgcatcgtttgatcgatcagtttggaagctacctgacatacaagttaagacagatacttcctaaccagcgataataacagaagagacaacagcgaggctagaaaggaaaaatctgatatgggagacgccttgccacaggtgatatccgtcaatcgaggacctggtgatgagagtattctaagccttgaggtgccagaaagctatatctgactcatccagacggctagtcctacgtgttgattcaacaatcaagacgtatcctaacagaatatagacacgcccccgaaataaacccctgtcaacaaaaagtggagaaaccgagcatatgtaagcgaacatttgtcttctggttgacgactacaagtctgaaaagacatgtccttgatcattctcttgcccaaaccctacgccacagcttgtttttttttttcttttcaacctgagttatcaacatccttctacctccctgtctttctcctgcgaggtttgagtcacgatggagaggtcgtgaccaatggctcagaaaagacaaagagagaatgcagaaagtgcaaacgaggcaagcactatattcattggtgtcggctagtagtatttgtcaatccattataagacaggtctatcagcgaacgatctgatgagtcaactagtcatgacatgtggatatcttgcctcatgacgcagctatcgatcaataatcagcagaatgaacaagtcgatcaatcaagattgagcgagaggtgagagcaaaaaacctgaagcatgaagcaagaggtgacgtgttagaagaaagaaatgagacgaagagctgttcgaaagcgattcaagtgcaacatatacatggtttagatgcaacaaccaacattatccaactagtatatcagactttttcctggcctgctcatccacacgcggcattcccatcttacaatctcttgtgcctggaaagaaagtatgagacagtccggaaaataagaacgactatgttgaggtggatatgcgcgagcagattgaacaaaaaaaactatgttcaagttgaattgcgtttttgataacagacatgtcaagcaggcgagtttagaaggttaataacggttctcgttcgttggtaccacgaattaatttatagtcaaggccaaaatacacggatctggtcttcataaaaagttaagaagggagaaacaggagtgaagaagtggaggccccagagagaaaggcctgagggccatggtgatggtgatggttgagatgatctgtgatcaaagctggtggcctaacgggcagtcatcgtcaaccgaacgatcgacccgctccgacacgtaactagagaggctggccatgtcgccttctccggaacgcgacggcagatgacgcggttgatttctctatccgctcaacatccttaccacgcttgaacgacactcatccttcccgcttccacttctgctttcgtctgcttcccgtccagaccacatagaccttggccgactggcacatctggtgtcgttcatcttgcaccgacgacgacggactcaccgattgatccactttcttctacctcgcctgccttggctctactctgtttacacgcgtttatactggttcgcactcgaccacagccgtccacgattgtcccagcaccaacacatctatcaaccgactgccatgtcaccgacctctatcgagctgcatggattgaagcgggtggacgtccagaagctatgcaaggtccgtctctgctctgtctgtctctttttctctgtctcgctgtcgtactcatcatatgcttctttccctacttctggatcatctctttcttgtctctcatcacacagacactcggtatcaaaggagcaaaccagaagacagaggctcttatcggccttatccttcagcactacgcaaacagccagtcaaccacgagcgagggcgaacaagcaccgcctgcagaactctcttctgtggagagcggttcgtctggtgctgtaggagaaggcattgcctcagcgttcgtaccaacccctccctcccccctgtgttctttctcacttctcccgatcttctttctcccttctcctcccctttatttccctttcttttcttttcttttctgctcctttccgtttccccctcgtccattcactcttctgttctgtcagtcagtcgagatcgaccccgtctcatccagcctattgtcctttgatttctatgaccggtagaaagaccagctcgaacagcagcttgcatgtcagccggaacggcaagtcgaactccaggcttctccagccgactgcgagctctcgagcaaagaagatgacgaagcaaactatctctcagaagccatcgaccacctgtaacgctcggccaaagaaagaagccggccagcctgtcgaggccactctgccagaagaccaagaggaacccatgccggtcgaggct

SEQ ID NO: 555 - DNA, 926 bp, Xanthophyllomyces dendrorhous
tctttttgccattccttgctattcatgctgttcactcatgcggccaaagtttgtgctttcaacctgtcccaatcgaactcgactaccctctagcagcgtcagcctgtgtatacacgcggtcatccctcgttcagccctcggatctgttgaccgatctcctgtccgtgcgtacctccttggccgaactcacagccagggttgatgacctgcccacacgagaagagaccgagctcaacaagcgatctgtctacgacgctctggcgtgcaccgatgccaccgtcgagttcattggcgcggagatcatggtctttgggcggatgtccagccgggccgaacggctgtctgtcaagaaggaggacatcgaggcgatggtcgaccagatggtcgagtcccgcctgaagctgatcgaacagtcttttgccagtcgactcaagacagtcgaggacaggctagaggctcggctgtgtcagtcccagacgtgcgcttctcagccggaagcaatgaaggtctctgacttgtcgcttgacctagagaggcagtcggagcaggttgagcaggttctgggcaaacgtgctagaaacacggtcgacatgtctgcgcctgtgtcttctaccttgaccggtggtaggtcttatcctgacaggcaagcttcaactcccacttcgtccggtttgtctgatcctgcactcccgactcccatcccctcttccgcggccttctccatgcctttctccacagcccgcatggatgcaaccggcctggatgatcaccggcagaaacggtcgagggtcgtcagcctggcagtcagcgagatggaggcgggcgatatcgaggatctgttggaagacgtatctggcgagcctagtgcggctagtgcggctagtgcggctagtgcggctagtgcggctagtgcggctagtgcggct

SEQ ID NO: 556 - DNA, 705 bp, Xanthophyllomyces dendrorhous
cggctagtgcggctgatgaggatgacgggcggccccttgcatctactaacgattcattgatcaagtctcccatcgactcttccgtcatcgcctccgctaccgttcctgccatcacctccactatcacctctgcctctctgacacctactggcgtttgccgtacgccattgcttatgacggcctgatcagctgccgagccagctagacctgtcatcccacttccttctgcctcccacctgggcttgactcagacgacgaatggcaacgaccggactccactcacaaacccacaggtgatcgtggctttcactcccgaccatgggccagtcaaccagcctggcgacaggttctcccatccgcctttctctccgtccgaccgccagacggtccagtctcttcttccgcctgtgcctgtcgacggacctttctggatgtctccgatggcaccgtctcggcagttgcaccggcctacgtctggatccaagcaggagacgcccaagcgggcaacaaagggagctgcccagaaggtggctgccccgttcacattgatccctacgggaacgcacaacatacagcttggaccaggccaagacaacgagatcgctccactgacgccgccaggaccgaagacgatgtttgggacggaaaaggagacgtttgggaggttgttcagcgatgagatgacgccgtggatgccgtgagcga

SEQ ID NO: 557 - DNA, 90815 bp, Xanthophyllomyces dendrorhous
  misc_feature (391)..(400): n is a, c, g, or t
accatgggccagtcaaccagcctggcgacaggttctcccatccgcctttctctccgtccgaccgccagacggtccagtctcttcttccgcctgtgcctgtcgacggacctttctggatgtctccgatggcaccgtctcggcagttgcaccggcctacgtctggatccaagcaggagacgcccaagcgggcaacaaagggagctgcccagaaggtggctgccccgttcacattgatccctacgggaacgcacaacatacagcttggaccaggccaagacaacgagatcgctccactgacgccgccaggaccgaagacgatgtttgggacggaaaaggagacgtttgggaggttgttcagcgatgagatgacgccgtggatgccgtgagcgannnnnnnnnncgtgagcatcatcactaggtcgctcgacaggattcacatcaagggtttcaattagatttctttccccccttttttgacaacctctctctcgtttttttttttcttttcttgttgtattgttgatctcgatccactgagctctatcagagcttatgtttgtttgtataatctctccgtcaatatcctgtttcttgactacattacattcatcaactactctctctcttcgtacttcgttcgcgctgcatttctaccttattcttacgtgacttggtcccgtctgtatattataatctgatatcataatccttacttgaaataccagaaagatgacaacgacgacgacgacatcattagatgcaaaacacacaagtacgttctttcaaacctgatggtgattatttgagctttcagctagagggatttcagtgaatcctcttttgctcaaccaaattcgtggaagaataagacgttaatggccgtctttttgaatcacgactttggaatattcactattcagatttaatcgccgtgccagtctaataaaacagtctttttactgtaaaagagttatgattgaattgtttttcaacaggcatgtcaaaacgtaaccatttccgttatcgcccggacgatattgtcccgtgctctgtcctccctgcatcggcattgacagggacggtggcatctgtacttgcctatcaattatttctcttggcttccatttgtttttgccgtgaatctccgaggattgtagtgatacatgatattggagatccatctgaacccatttgtagtatatgacaagacacgaaccaaacaaagagacggtttcaatcacgaaaacgagcgaaccagacatactcagacacattgagaatcgaccgagaggttaggataagaaaagtgcgagcaaagacgaggcgatcatcaagagacaacggcatttaccgccgggattggcaagagtcatttgcgagcccagttacgagatatcgggatcagccagccacttggttacagttcctcaatcgcccgggtccctttttgtacttttcttttctctccctctttttttctcctcctctctctttgcctctttactactcgtcgatttcctcttccacattctggtcttttccttctccccaccatctaggcaaaagaacaagtgttcttccggtatctgatcatgacttctagaattccctccaccatcactcgagcctcctctattttggctcgaagaggttttgcctccgtcgttcctcctccatcgaacgtgacggctcccattcaggccaaaaaacgaaacttcaggcagactttcggtcgggtcacccttggaacattgagtgctgctaccgcagctttcttggtcggtgagtgctttctcttcttattatcgtttccttatccgaagtctcttctctttcgaaagaaacatctataatggatgtcagggtcgcatagccctcctcggagatttttttttctttcttaccttttcttgatacatatatgtgttccttcgatgtcttcatcagctttttataccaactttgctaagcatcaatcttttgtcctccaaaacgtatttctctagcaacctaccttgacaacaaccccgccgagcagcttcctcaggatcctaagaaaaagaaccttgtcgtacttggtagtggatggggagctaccgctttcttgaagaaccttgatacggaggagtacaacgtcgtgcgtatctgccttttttggtttatctcaatcatgctctactaggtgggtattgtcttcgtatcttcattctgactcttccgtgtttcttccattcttttgaacggcaaacgaatcgatactgtgtaccctcagaccgtcatttctcctcacaattacttcttgtacactccccttcttccttccgtcacagtgggaaccctcgaggcgagatccatcatccagccaactaggttcatcactcgacacaagaagcgagcggtcaatgttattgaggctgaggctaaggaagttgatcctatcaacaagaccgtcacctttgagggttcgtatcattcatcttgatcgttttcctcagcaggtgcacaagcttatgtgaccgttgttcaaaaaatatcaaatccagacaactcggatatcaagggttccgtcgtctcgaccaccatcccttacgactacctcgtctatgctgttggatgcgataaccagacctttggtatcgccggtgtacccaaatatgcctgcttcttgaaggagttggctgatgccgacaaggtccgacagaagatcatggactgtgcgttcttccccctcttatgttcttctctttcttttaaatgtagacgagatccgacgctatgtgccacagacatcttacttacacgttgtcttacctggatctcacataccataggtgtcgagtctgcctctttccctggtcagtctgaggaggaaatcgaccgactgatgcatatggtcgttgtcggtggaggacctaccggtgttgagtatgcaggagagctgcacgacttcttgatcgacgacttgaagaagtggtatcctgaggttgccgaccgactgaagatcactttagttgaggcccttcccaacgttcttcctatgttctccaagaagctcatcgactacaccgagtcgaccttcaacgagaataagatcaacctgatgaccaagactatggtgaaggacgtccaagagaagcatattgttgtacaagacgccaataaggaaatcaaggagattccctatggattgattgtttgggccaccggaaacacctccagggccatcaccagaaacctgatgggtaagttccccgccgtccagaccgagcgacgaggacttgctgtcgatgacactttccagatgttgggagccgacggaatctacgccgttggtgatgtcgccgccacaaagtacgctcctaccgcccaggtcgcctcccaggagggtatcttccttgctaagaccttcaagcagttcgccaagaaggatgccgctgaggctgagcttctccgactcaagtccgatcctactgctacccctgccgccattgaggctcaggagaaggctctcgccaaggcatccaaaatccgacctttcaagtactcccaccagggttccttggcctatattggatctgagaaggctatcgccgatcttcctctctttggttctgagaacttgtcctcgttcggaggacaggccaccaacattttctggcgatccgcttacctttcccagttgtacagtttgcgatgcagagtgcttgtcggtatggactgggccaaggtgaagatcttcgggcgagacatctcccgagagtagttggtccgggcatcgaacaaccaaaattcaacaacgtttccgttctagaagtagttccgtcatcacatgtggtcatagttctatccccctttcttttgttttctttcttcttgagcttgggctttttctccttttttcttattgtattctttccgtcattgaggctcttttgtgtcttagtatggtcaatcatttctatatcttggttcgtaagttttgctaaaggaaacctaggttgttccgattgaacatttgtttgaaaaggctgcaaagagaaatccattgatgcctttggttgtcacaatacatgataggaaggcacaggagcgatgggtgcagaatcaggaatctgaggtggtacagtatcgaaagcgcagcagaaccacctacgaaataccaagctgtcttgcagtctcacactcacccagcggatttttctctttcttttttttctcttctctacaattagacagacgcatcaacattccgatcaactcacaaccacagcatctcacacttccttatctctagccagattacacctctttcactcctgtagaccaaatggcatcccatatccgacacagtatgtgattttcataagacccgatcgaaccccgaaacggagttgctcgtttttggcattccctgttggaacggccgagctgaatagcttatattcacgatttatcttctctatctctcattgtgtgtcagatggtgttcgtcatatgagcagtgctacaaagaccgtctcagctccaaatcccctagtcacacaggtgctccttcaccgacgaccgtttctgacacctcctaaacctgcccacatggacgccgtgtacgactacaatttcaagcttcgaaaagcactctcgtcccttttcccgacacatctgtacctcaagaaggggtcgatggcaatgaaacgatatacctatgaacaggctatggcggaacatgaggcctttggaacgcctattcctgaagacatcgaggtggtcgagaaggatgtagccgcccaggcgatccaacctagggatacactggaaaaggctgccgaatcgaggggtgaaaagagtttggacagaaaaggagagagaagtttgtacctggtcgtcaaaggaaaacaaggctggcggtttcctggaggagtggttgagtccaagcaggccggagaggggcaagagcagccatctagattggaccaggtatgtcgtgaaactctcttttccgtctcttccggtttttgttttccttgattctttcgttctggatttgcctacgagaagttcgatgaatcttatcgtctttctttttatgatcgatttcttcagatcgctcgcaaaacactccacgctcatcttggaccggacatgtctgtctggccagtgggtcgatttcctatagcgtacattccctctgattcttcggtttcgtcctcaaagacgtttgtgttcaagacacacatcctcgccggtcagccggccatctcggacgtcggatccaaagcgggcatccaggatttcgcctggttgacaaaggaagagattggcgagcgagctctgagtgaggggtcggaagagggaaagttgtggtggaacacagttggtgatttgttaaacgagtattaatcaactcggaatgagaaaacgtataaattaaatatttcaaactggagaactcaatggacacgctttgtgccttgatcgatatccttgcaggtagatggaagctcgcttagcacaaagacgagaataagcgatcgagtgaatgggaaacaatttaagcatgatacatctatagctcctatctttgtttcctgacgatatatatttacacccaaactggaccaacagaagagctgagagacccggaagagattcgaatgtgaagtattaagtcgacatggctgtaggctcgttggcttgtttctcgagttcggccctataattaccacgacagatcgaagaaatggcaagttgtaagcaggtatacattgagaggccgtgattgaggtcagtgaacacaattcgaatctcgagctgaagagtgcaacatacctaagctgcttgctgaagtcttcttcgacatcatcatcatcccaattgtcttcccaaagattcgaggtcgtggtcggtgccgagtcggacgaaccagtagtggacatgagatgagcgagggaggtttccgaaggattccagtctgacggttagaagaggtcgatcaaggcgggtacgaacaacgtataggtagttgacaggtaagtcaacgttagtaccgcatgaccgacctggaaggaaacgacagctgaacgtcatatctgagagaagaggtgaagctgagacataccctgttcggcaaactcctcaaactcgtcgtcttcctcgagggcgccaagctgaggaacgaccttgtttgtatcctgagatgaagcggaggtggtagctactccattggtagactcacttgtggaagcgggagcagacatcgatagttgattgagaagatgggacgaaacgatttgttgatagcggtagtagtagtagaagaagtagtagcagctatggtagtatagttggtggtagtgatgaatgagcgatgatggggatgagctggaagtgtcagaatcgattagagaaagttgtagtcgactttgtaataatgatcgatgttctctggtgacagaccacaagcgtaaccatcacccactccgaccttgcgcccatcctgtttctacaagcttgcatgtcctctgcgcgatcttctgtatcgatcaacgtgcatcttgatgtctcctctgctccatcctctatagaccaaaagagaaccagatttgattcaaccacttgctcagtctttgggctttgttggagacgcaggtatatcgttacgtacagcaggtagcgctggactcttaaagcggtgcaagatgtaaccggttgactgaccgttcacacagcccgcccaccgccctttgatctttgcgtttctctgttctctttggagttcagccttcttttgtcttgatctcgctcgcttcaacaaacgagaacgacatcatctttttgaaggtcccttctaggtcccgatcaagatcatacagagtggaagatcatcatgtccaggtttccagaggtaaggctcgaccgaatcgaattagtctgtgtaggcctgaatgtcaacaatcacaacaacaatgatgatgaaaatcataaagacttacggctcgatcaaaagcattgcatgcgtggtgatggcgctcacatcgtttcttcaatcagaaatcgcttgatatatagaactgacatttacttcttctcatgtttaggccgatgagggtcaataccagtaccagaaccagccgtatccctatccaagtgacacccgcccccccgtcgctccgtacccttcggcccagagtccacctccaaatcaggcatacggttaccaagtccatcagacccctccacccgttcatcaaggaggctatgcttcccctcctcctcaagcgatgtactataacgctcctacccctgggcctggttacacatctccgccgcctcctgaccctgcttcaagtccttactatggtcagccagcctaccagcagacaccaagttttggacaggtgtatcagcagtcgactacacctgcgctcagccaacagcatcaacagcaacaccagcagactatctatccgcctacgttctctgaacccaacagagtgacctctccagctgaacccaacagattagcctcacctaccactggccctcaaggagatcctttgcagaatgcatcttccttcggtggcccctattcctccatcaacctcacaggaacgcctcagccaatgccttctccaggagactatcctcctttggtcgattcatatcaagaggattggcacccgtctcgagctagttttgaagatgatgctgaacgactcctgccttcttcaggggttggcagatcagatagttcaaacaccattcccggctcatttgcagatctaggggatggtgaaaaccaggaggacaactaccactatggacctgtgccatctagagtacccaggagaaacaaaacggtcaaaagagtccagtatgtacaacaggtcgttgatgtatgtgtgagcgcgcacgcgctctaacccaaccggtcttgctgatcaactgtatcgcgcgcatctgcctcgtcatctctctctcaaagattattccgtggtcatctagtactggattgcccagtgccttctaagctgttagaccagtgcaagaacacgactgagcaggagttcaaaactatgcggtacaccgctgcgacttgcgaccctgacaatttcaagtgagtttcaattgaacacatcgtctgcgtacaggattcgcaggtgatctgatatattgtacactattctcttttgacagagcggatgggtatgcgctccgacaaaccctgtttgctgagcctcggaagacggagctcttcatcgtcctcacgcagtatgtcatcctatcttgcactaactttccatcacactgcgctcttgaatgaaagattgacttcaacccttttgtgatgtccagatacaatgagggtgacgaattattcctgcggacattacgtggagtcatgcagaacatagattacctgtgtactaaagataagagtaaaacatggaaccatgacggatggaagaaagtttgtccacttcaaaatatagacctgaatctgagtggatagcgtggaaagacttcaagatagtttggagtattgatccttcagtcttctctcttcaggtcgttgtttgtgtcgttagcgatgggcgagctaaaattcacccaaggaacttggcttgtattcaaaaatgttagtagtctctatagtattcaggaaaacagacaaaagacaagtttacaaagtctcgcaatctcactgcttcgtctattcatctgtcacgcccttagtgggatgttatcagcccggtcccgccaaaaacgtggtgaatggaaagctggtgacagctcatatatatgagtataccacccaattcagagtcaattcgaagctacagattgttccaggaaacgcagaatcagtacctgtccagatgctattgtgagttcatacttctacctgattcatcgaccaaatatatccacccaagcttggtatatataccatcactttgggtctgataaacaaacgacattccttcaaatacagcgttttgaaagagagaaatcagaaaaaattgaattctcatcgatgtaagtattcaagcgtatgatcgagaagcctcgagctaccagaactcaacaaaccttgtgtgatgttgtgttacctcattttcattagggttcttcaatgtacgtagctaccgtgatcacatagatcacctcgatgctcaagtagtatgtgatattgatcgtgtacatcttgaataatcaacaggccttcggacctgtgctttaccccaatgtgtgtgtgttgattgatgtgggaactcagcccggacctagagtgagtgctgttagcgtattcaaacaccaaaatctgctactgatagaaagctaaatcccattttcccttttcctctcacacctgcgttttcaaaatggttccacctctcagtctatctatcatctttggaagagtgagtttcaatcctcaccatatatcagttgtccttccagcctttcaagctgatcaccgtatatggttcatttctgtgcgctgtctcgtgcctgttatgcaggttttgatctaaattctgaagtcggaggtgcttgtggagagattgtagctcttaaaggtcgatattggtcgacgttgctcaaggtgagttcatgcaatggacgcctcgactacttggggagtatgtttaactcaacaggtgaccatggtctcttgacctttttcagaacccgctggtggccgctcaaaactttgagtgagtctaatactcatgtgagagaagagcatacacatatcttgcaaccatactaatcgtgtcatctggattgaaggtacaaaatgagcaacattttggacaagcctctcgaatcgatttttgggtttatttcagtgttgcctggagcgttctcggcctacaggtttgtcagaacgtcacaatttggaacagtgctctgtatctttccttaatgtccttacaatttcaccgttatcaattaggtacatcgccgtgcaaaacgatccaaggaccggggaaggagttcgtctgatctctctgatgcaatatagtcctaattcttaaatcgatctaacgcctgatgcgcttaccattgtctgaatacagcctttgcaaagtaagttgtgcctttaaccttactaccaacgtttggattgtactttatcatgtacaatcattttattttatttatttttctaagaatacttcctgggagaaacgttacacggagctgggtcagtcactactagaatcatcaaacctcatagtctctagcagctgatgtcccttttctttttttgggcttgaaacagagctggcattttcgacgccaatatgtgtgagcgtgacgatccaatagatatctgaactttagccaagactaaacagttgttttgcttctcacgcgttatatagatctggctgaagatcgaattctctgttgggaattagtctccaaacgtgattcttcttggcatttacactatgttaaatctgcctatggtgtcaccgagttcgtactgccctttagtattctgtatcatccgcgatgtatgcgctcacaccttgatatgtcgactcgatttgtaaagcgttccggatacggtatggcgttcttggttgatctgattttgtacattcttgataaccaaactgagcatcatctcgtcttccatctacaaatctagattcctgatctggtcagtcagcgtcgacgatggttaaacggatcattctttggtttgtcaagacaattttagcatctcgcccgtgatatcatgcaactggtagaattggaactcatcattagaccattttgatctcatctcctatcagcgagtttgcatgctacctggcatttttactatatttatcgaagcaaacatactgctattcggaagttcatgcttcatatcctcattggttaccaagccattcagttgatcttttcatggtttggtatcgtaagttgctatattgatcttccgaggttgccgccccgcactgaccttttactcctggggtcggtattgattcattagggaaactgtaagtgggttgtcgttcttgattgatgtcattcttgcattgatcgtatggatatgttttttcctcctcagacttcatcgcttttgtaagctcttttaattctcactcgacactaggatcaaatatcacattctgacctgtcttcgtatatgtctttgtagtatgttttgaccaagtacgtcagctatactcaggcagtgaaacatctgtctgttactgatattctctctcacgatagatcgatggagagctttacggctggtctcaagtggttaaatctaatcctaacttatgtctacagtggactcaccatgtgagtgcatcatagcatgattcaaaaaatttcatgtcctcatcgtgtcatattattattccatagcgcatgtttcctaatggctctgggaaatcgtccaaaagggtatgtagttcatggagtagaattgagccgatacagacagttggcctcaacatattgtggtttcgtacagatccaagttcggatactcgatagctttcgtcacctttgctatcagtgagttacctctatcagttatgttcctcgcatgttctattacaagtcgctcatgcatcaatttctgttcatccatagtaacggtatacatgacgtgcgtatacgctattgtaagatctttacagaagcatgagtcgacgatcgcactaacaatatcccctcgatcagattcgccgcattttatgttgccgtcaagagtattagcactatcgagtcggttgtcggaagtgtgacgattggtagtttattaagtgatggtacgcctgtgccgcttatcatactgtagagtggttgtgcgttgtcacagggattgatcgctgcctccatcgtcttgtagccgcgttcacacagatcatcttgtctctccttgcaacgttcggtatctatatattggccagtctgattgtaagtgtccgtatatcgtggtatgctattggcccgtcttgctgaatacaggtcaatctcttgttctgtttgaatagcattatgatccgtggcatatgggtgcgttaacatctctgattgcccagtatttttgctagaacataatggagactgaagatcgatgataatgcatttgcatcgttagtcacgagcttgatccagtaccttttgatctctccaagtttcatctcgggtaagttgccctcctttccacttcaatcaccactgtcttttcagtcgtaccactaatatgaaaccgcctctttccttttcctttctatagttatgaacgtatacggtatgagactttgtcgtccgtaatcaaaacttctagtgggcgtgtatactgatactctgaatatggtcgcgcatgaaagccttctgcaatacggttcgtatcacacaaaccatttgcgctatcaccgattgatgaactaactagccatttgtatattttgaatctcgtttcttcgcagcatgatgttgtaagtgatgagtcttgattctttggatcggttagcagtttgcataagcaatctgacgaattttctatcgtcttgcagagctggggaactaaaggacaagataaagtctcaacagaccttggagttgttacctctagcaaaggcgggggcaatcacgcggaagtcaacgttaccatagaagctcaagatcttaatgccgagtatcaggacgccagtacgttcacggagccacaactgcgactcgagatataacgaacgcaagctgatgactatttctgttccttggttcgacctcgaccatcattggatagttgtcgtgctttcttcgacacctcccaagattgtcgaagtgcctaatccagaagaacttcaagaaggtatacttgaccgcaaacgtacattcgtctttgtagtcactgaagatatctaacacatttcgtttcatcaaacatgacagactactataaggcttttagaacccggtttgtccatgttggcttttttttttaacgcctcaattccacagatcgactgattgatggaataaacattgtattctggttcccaaatcattgatcatatagagtgcgtttgatgttaaatgtcgtcgacaattctaaccgtatgcggttgagcttatttctttttgatctgctttgttttcgcatgtgtcagcttctcttggcctgggtcctctcgaacggattcttggtcgctattgttttgactgctacgagcacattcacgactaaggttacagaggctcatgctgtcgagcaaagcacttccatgtacctcgtcatcgtcttatatgtgttagtgatcttctctttcgttattcacgaggatgaaatccgaactgatgactgactcgtatatctaataatcaattctcacttgtcatatgccttgaatgtatagtgtggttgtactggcctgtaagttgcatcgcttttcagtttgatgactatagcgaacggcgaactcgttcacgcaatgcgagaccaagactaatatctctcttcgtatctaatcttcacttgaccctgctgtatagttttccgattcatgggatcatgtgcttacatcatagtgcggctgttcgttggagaatagcacagcttcgaacactctccctagccgtttcatgatcattgtatatgtatacctctcttcccttctccaatttaccacgttgttcaagataacgctcaagatattcttacataccatcgttcaaatactatttgatgtcgacctaggtcatctccttttttcatcatcttttgctcacgtcgttttatgtatctcatttcaatctgtttcgagaatatatcatgacctttttccatttatgagaagaaaagaattgcactcgagcttgttgagatgatatcgtgtcagcagatattatacagccttcgcgctgattcatgtcaacgtgtaatgggcagtgaactcgagaggagtctatatagcgggtgaatgctttctaaacaactccttagacgtcgtgtttacctcattaatagcttgtttgcggtgggtgatgcaaatttgacagctgtaaagaagcgcgctaacgccatcaagatgtgacaaaggaagaaggaaacttttacagggttctgagacaattgcccgcaacaaaccaacccaaaacaggacactcgaagaccaagagtaatcacttgaacagcgcttcctcctcttgcctcaaatctctttgtttccagacttcgaccactaattcccagatcatccagcacgccatccgctcatcctcgtcctcttgtcgactttgttgacgcaatctaaccgtgttcgatccctcttgatcggttgtgtaaagttcaagttgacgctcgatgacagcgagacaagctctggccagcgaccgtagatcagatatgctctcaccggaaagaagatgggcatctagtctggtgagtaggctgaatgaccaataggctaagatcggtggaatcgaaggactacaagtttgagggaggttggaaggagattcaatgatccatgaggttatgtgctttagaagatatattacggctttctacgcgtgttaggaaaggaacatcgaagagagaggcacgtcagaatggtccagaaccaggctcaacagggaagagaatgaaggggtcgcagctttacgctctgacgtacatcagacatggcttggagaattagcatagacggttccttcggtgaatgctttcctggatcgaaaggctctagctcatcttctggtacgttatccccaccctctatgtgatcgttaagctgttcctcctcattgtcgttctggtcgtctccttcgctgtcatcacaatgaaattgtctctcctccatatcttcatccagttgccaatcttccatatcgacactctcattcagagcagcctcttcgtcatcttgtatcagattggatacatcacgggacgtaggaatgaatgttgcttcggctttagctaaatcggccaatcgccgtcgtttggcgccgaagatgaacagggtccaagcagattcgtctgaggcttttggtaatattattgatggcttcttgcttggttcatgtgagagtgctagtaaattctgtcagatgatggaaggtaaatacaattttgccgttgcagaaggataggtcggagcaaacctcaaaacgtacttgccgcagatttgagaaatgaagcagaaatgacaatcgccatgcttcggatggcaagagaggatgtctaggtgatgctgacggtccaatcaatgtcggtgaagggactgattctttctgaaatgtatcgccacttggttcgagaaatgtagcagaggcgagagcatacggatttagcgccttggtgaaagtaggtaggcttgcttcctctgctctgtcaagacaaccagacgggatagtagcaggacgtattgatcgaacagaaaaatcgctagtcagatatcagacatatgctcattcccacagatacgactttgtgcaagcaaagatcagagttgagctacctcacgctgagtaaataaagctctgcttcgctcaagccaagaacgttaggatctgatgacctatcgacggcggacgttgaattaacggacgtcgagggaatatggaaaaatgctctgggttgatcattccctgagtttacgtttgaccctctcttcttatatggctttttgggttgagatatgttggacatgatgataatggcgagcgaaagcgatgatacagatagaagtcgaaacttgaggaagaacagtggatgatgacaacgaaggccgtagccatacctccaccttgagcgtagccaaggttacgtttcaacgtgtaaccaaagcctctcaaattattcagtaaattctcttcagctaactttccaaacggccttactttcctttcctatccctcatcccctctctcttgtttctttcgcccttttctttctctttcattcttgattagacaacatggtctccatcaggaagagtgagtcgcctttctgtgctctgtcgctgtagagaaatgcacgtttgaccattccctacgaatgaattacacctaacggttaatgtaccacagaaacctccaacagaggaaccacccaccagcgatccaagatcaagcaaaaggctgccgagacccgaaagaagaacaagaaggccgccaggaaggatgtcacctggaaatctagtcagtcgttgatcttacctttcctgacgtgtaatggtctgacttggatgcaaggcagcagtctgtaatcgatccgaaatcacatgctgatatcttcttgcgtttgttatagacaaaacgaaggatcctggaattcctaactcgttcccttacaaggatcagatcctagctgaagttgccgagcagcgccgtcaggtcagtcacattcttgtctcgttacttgtccctttctctgcattgagctcgggctgatcaccttgcctattcaacattgtgtcacataggctgaggaggagaagattcgcgcgaaggaggagagaaaggccgccaagcaggaggctgccgagcaggcagaggcagaagaggttgatcagcctggagtatccaagctatctggagatagggtactcgccttgcctcctaagactgttgctgctcctgtggaggaggaggatgagtcggcgcctctactcttcgatgcctcgattcctaccttgcaggccgcgctcgagcaggcagatgtgttgctcgaagtcgttgatgcgagagacccattaggattcagaagtccgtggttggaggagcagttcctgactgtagacgagggagacaaaaggaagcttcgggtggtggttgtgttaactaagattggtacgtctgaacgtacttgtactcaatgcgagtgatgaataaacaaccttgtatattgacgcgttcaatgtgtttcgtggctttgttcttggaatgactgttgtgtcaacagatctggctcccaaggaggctctcatccagtggttgaactacctccgacctcgtttcccgacagtccttttcaagtcttctattcctgcctcgcatgttccccttcctcgatcggagtctacagtggagccctcgctcgctccttccgagtccctcggacgagaagagctcatggagacccttcagtcgtgggctgaagccaaaagaaaactgaccaagaagggcgcagattcagaagaatttgtggttgccgttgctggtctacccaacgtacgttgcttcccgccggaactgtattcacattcatatcttcatcaattcttaacctgttctctctattcttgattttaatctcgtctgcgccacacaggttggaaagtcttcgatgttgaacactttgttgcaggttccggcctcatccttccccgtcgcaacctatcctcctaactcccttcagcacggcccaacgaccacgacccccacggccactacgtacaccttcccttctacctcctccaaaaagtctcctctcgagatcaagtttatcgatacccctggctggatctttgccgacgtcttccccggagacaatgaggattctgaagacgaggctgacgatgaggacgatgaaggagaagatcagggtgagacggaagaagaggccgctatgtgggacttgattgaggtcaaccgaatcaaggatctcctccgccgaaacatcggacgaatcgaaaagatcaaggagccgttcgccctggctgagtacctaatcactcactcgaacgccaatgacctcgttcttctctatggtacaccctcgtttttaccgaacgactcaacgtctttccttaccggtctcgctcgagtaaccggtcgaatgaagaagcatggtaccccggatctcgattctgctgccaaattgatccttcgagattgggcccttgggcagttcccccactattcgttacccccgaagaacttgacattagaacccaccgtaccggccaacctcgagtctatcaagctgttcacgaagagagaagaggatgtattggctcgattgcgaactcgaagagagtttatgagtgagaagggtggacgaggaatcgtcaagatggttttggacgagaccttcgagaaggagggaggtgatcaacgagagattgttctcgatgatgagattagggaggatgaggacgagagtgagggcgagggtgagtggagtgatgaggaagacgaattggatggcgatgaagatgaggttatgaaagaggatgagccggaagaggatgaagaggtaagtgctcatattactcctagagtttgttccgttctggtctctctatcgaccgccttcctaaccgccgaccggttttcacttttcctttttaaaggatgatgaagacccagccggaccgtccgccctggatgtccttctcgccgccaacccgtctctactcgggtcatcccgaccttcctccaagaaaagctccaagctaagcgctgcttcggtccccgttcctagcctcgccaaaccctctaaaaagacttctgctacaccggcttctgtatcatcgtcgtcgaagaacgcttctgctgctaaacgagttgtcttcgctgccgaggagaagggcaagactcccaacggagactctccaatgtctgtcggcaagggacctagatcgattctaaagactcaaccggcagctgttgagtctgctcctgccgttgtcgctgttgctgcttcaaagggagctgattcgtcggccaagggtaagaagcgtaaggctgctgccgcttctcaggaggaggacgtggtaaccgctccgtccaagaaggagaagagggaacaggccaaagccgccgcatccgttgagaagattgacaagaaggtgtccaaggttgcctcggctgctgctcccaaaacgactaaggcggctaaggctgcacccactcccgcggaggtcaagatggatacaaagagcaaggctgctgagagagcaaaagacggggaacagggttatgatttcaacaaattctttttctaaagctgggatcttcatcaaaaactagacagacgaagaacatatctagttgtcgtttattggcttatgccttagctcctgctcgtgtcagcgagtttctattgagggtcgtttcgaccaattttcacttgtaatcctttcttccctgattctaccatcatatatttcatggccatttcttgatgttgttgttctcgtaagaagcacgtgtcgaatcgcataaccatattagccatgaactcttgacagtctcacagagttgagacgaacagattcaggaattctccggatgttggaatgaggtatcaagcttatgagtatcacaaaaacctagaaattagggttattctgaccaagggcaaatccgtccgaagcggtatcggctgacagaacacgcagttgtggttcggctgatccgcccgaagtgtcatcaattttcggttttccttttttccctatctccagcagttgaaaacccaacactcactccctcaatcacttactcggcatacaacagctacctttgatatcaatcatcatgtccaacactttcaagattgcagtcattcctggagacggtattggtacgttctgaacactcgtttattcgccttttccttgcctcagtgaggatgatctcatcatgaaatttacatttcttccaattttttgcttttataaataatgtactttcgactttcttccgaaataatctcaatcgtatcttacacggttattctttcttcgtcttccaggtcctgaggtcgtcaagcaggctctccgagtcctctctacccttactgccaagactgatctcaagcttgagcttactgagtacgatttcggaggaatcgctatcgacaaccatggaacccctcttcctcaagagaccttggacgcctgtctcaaggccgatgcgattcttatgggtaagtttctcactgtgatcaacttgaatgccacttgatacttgaatgatgatactgactgccttgccgtatgttcccgtcccattcaggatctgttggaggacccaagtggggtgtaggacccgttcgaccggagcagggtcttttgaagcttcgaaaggagctcggcctctacgccaacatccgaccggctaactttgcctcagaaagcttactcaagcacagccctcttaagcctgaagttgctcagggctttgatatggtcgttgttcgagaggttagtcatgtgattctttacagctggtcttagtgtcgaatgatggtatcacgttttgtcagccaaaagtcgccggctaacatcttcctggttggaatttacagcttatcggaggtgtctacttcggagaccgacaggagaccgacgacaagggtgtcgcatgggacactaccctttactccatcccagaagtcgagcgaatcactcgagtggcctgccagattgcctcggccgagtctcccgcccttcccattcattcgatcgacaaggccaatgtgcttgctacttcccgactctggagaacgactgtgaccaaggtcgttgagaaggagttccctcatttgaagttggaccatcagctcgtcgattcggccgctatgatcatgatcagcaacccccgaaagctcaatggtgtcatccttacggagaacatgttcggagacatgtaagtctgtctgatcataattccggttcttcttccgttttgcccgatgataacttatgttcgatcctttttctctcagtctttccgacgagtcttccgtcattcccggatcccttggtcttctcccctctgcctcccttgctggtgtcccctcgctcgacaagacctgtttgggtctctacgagcctatccatggatctgctccggatatcgccggtcagaacatcgccaacccactgggaaccatcctttccgccgcgcttatgctcaagtactctcttggtcgaccgaaggaggccgagctcattgagactgctgtgagaaaggttttggactctaaggacgttggaggagaagatctcaggacacgagatcttggaggcgagagcggaacgaccgagatgggtgatcgagtcgttcaggtcttggagcgattgcttcagtaaacttgtctgctttgtttctgccgaactcaatatttatttcttctcccgcttctcgtttcctatttgcctcttctcgtccgtagagccgatgtgtttgtatcggataacccaacaaaagtagtaacaatcaatgtgctgtgtctcgtgaagtcgtatgtacagaatcaatcctcagagttttatatgagcgaactgtatatttggggaaattcgatattttattttattttatttttaccaagcattacgcgtccagattaactcacatagtatgttaataaaaaagaaaacaagaataagacaaacgacgcgtacgagcgatagatttaaccaccaacacgtcgtttccatatcctctaaagataccttcacattcaccgaccatcctctcttcgcttataggcgctacctttatatatctggtgagctcagtggcttctcaatctagcattttacagttctggctcaatattcttcttcatacatatatcagcaaccagatgtataccgcccaaccgctgccgtattatcctacgctctcttctcctcctacgacccaaccatccaactctgttccctctcaacgatcctctacagaatccacagctgatacatccttactctcagaactcacctcagatactgaagggggagctggagggaaaagttggggtcacctcgatctgagcttaggcttgggagccagtttgagacgtaacggatggacctctaacaacggagaccataaaggtcaatctagaccggaagaggtagaatctcctgaagatccgtaccaaataaatgcaaactggagcaattttgcggatgatcttatcgttgttgatgaagacgaaacagaagtcgaaggggagactgaacgccaagaagatgaaacggccaaccaacccagcacgtcctctcgccgattttcctcctcttttcgagactcaaggtttcaaggatcccatcagaccgacctattagtagacgttacccctccattctcctcttcgactcctccaccggcgtcttatcatccattcccgtcattgaaacccactcaatcgggaggagaggctatagggtcttcactaaggaatcctggtggtcgaccgtctcttcagacattactcaactctatagaggaccgaactctgcaactgcatcaagagtccatatctgggattaatcgaagctatcgatcctcctctcgtcctagccaacaccctgatacaaatcatgaaaccccccttgtcaaccatgttcgaccgaacgggttcgatgtcacagctagcgcgcctcgtgcgagctcggacgcggtgcagcggttgaaagaggctatgaaccgagcaagaagtacgagagaaagctctccggtacttcccaagcagtcttcgactcaacaaacgaaaaccgcccagaagagggaatcaagatctagagcagctgtggaaaattggctcgaagagacatcggctgaactctctcctccgcttcgatcaaactcacaagaagacgagccagctgaaatccttttccagtctccgtctcttcccccggctaaactcttacttgcatctcctcatgctcagacatctaaaagcttgcattcgacaacgtcttccggccggcggatgcacgcacatccatcattttcttcacgttcacctcgactcagcaaccaccatcctcattcattgagagaagttcccaaagaggaagatgaggtggctgaaaagctttcttctgcttcgtctgaacaagattccccacccacccctcctcctcgattattacctcacttttcgagacgttcgccttcttcattcgtggtcgcccctccttcttccccgccttcgcctcctccacggatcacgctccctcctccgtctgcatctctaaaaactctacacgatcaccgacagtcacctgagccacggtctgaatactcaacacctgcccgatctagtatgtcttcgttagtcgcgactcctgttctaaacaccccaccagtccgagatatccagacaccagctgcgccgacagagaggggacggacgccttatcagacgagggtcaacaggacggatagagatgtcacgagggctagaggtgaatccaaaacaggagggctggaaacagaacacggagcgcaggaagttaatcagcagacagagattagcctcgccgtgacaaagccttcaagtccttattcatttgacaaagcatccgcatcctcaatttcccaatcttcatcacatcagactcctctccaaagttcttccaaggcttcttcttcaaagtacatccctgtcgtctcgtctaaatctccgaggactcaattaaacgctgcttccaaagaaaaatctggatctctcacgtctgcctcaacctctcccgtttggcttcagtcttcgctcgcccctctacgtgatcagatttctccacgttggggtccatcgacgcctgttggtactccttcgaaaaaggttcagtttgaaccgaagacaccggctgctcccggtggttggggatggacaccttaccagcctaagatccgcagagacatcacgcgtacggagaacaaaggaaaggaaaggaatcaggctggagaccaaactggtcaggatcttgatgatcctaacaagggtgcagataaaggtgtcgaaaccaaagtgggattcaacgttgcttctgagaaagaagtcactttggtacatgatgcagtatcgcctgatcatgaggatgcgaagattgggacgacagaagtgacatcagatgaacgaactgaggacagactcgcgatcgtgggagagaagaagtcgaggaaggaagacagcttagcgacggaggttatcgtgagcgatgacggatctccagcggcccccaaacaggaggacgagcgagagcaacacggttcggaggaagttcatcccgatgccaagtttatctcttctgagattgaattccattccgtctctctctcaccgaccagaaatccatcttcccaagagtgcctttcttcacaggaccatcggtcatccattatctgttctacggctcctgccacacccccattagccaaattttctcaacattcatctcaaacgcctatttttcaatcattgtcacaaactcctactttcaagacacctgcagctccaggcgcatggggatggacaccctttcctttcaaaagacgaccttcgaccttggcgtctcaatctccagtggtttcatcatctttacctcaaacgtctccctcgccttccactcctcccaaagtgtcatgtagccctaggtcaccgtcccagataacggcctcatattccgctgatcaaaccggttctcctcttccgaagaagttggctttcggtccaccctcaactacgaatgcttcttctgtgacatctgctctatcgacggtgacaacgacggcctcgccctctcgacttcggattgctcatcttcgagcacagctgaataaggcggaggaggatgaaggtgccgctcggcgcagagtacaaagtgctcgaaaggattgggagagtgtcaagtggatcagaggcaaggctggagatatcggtcctagagaacccagagcgattagagctaaggttggaacatggacgattcttggatggtgcgccgtgattgcctgggtctgcttctcgtaggttttctactttcatttcccctttattgttgacatcaaatgttcgtagactgactcgctgtttcccgctccaatgctatgtctcatcagaatcgcacgatatgtctatgacggatacaacgaccctctgacctcttcgcctttccacccggccttatactcgcctcccgagtcttcttcgcccttgttcactgcctcaatggggcttccacccggcttgtctgcgtttgagatcccaggccaaatacaaactggatggaatttactgctgagagattggattgcagccgagtggcttaagctaaagtgaaggagatgacgaatttcgtaaagatatggagataatgaaggcgttcgatttctttgctttgttgctagcccattgggctgatcgtttcctctctttctttcttccctcatcataatcagaaccttaatatttctagtcgttgatatggtcgtgtatagtgacttgattcagctgtataatttcatagatcctgtcttgtcctgacgaagatgatgtcgtctttctttcatacttacttgtatttccgttttcccttcgcactcctgattatacattacatgtatctgttccacggtattcataaagtttttttttttgcttgggatcaaggatgaatcagaggtggtgacgctcttgagttggaaattcaagaaaatgggaagacacgaaaacacctgcgcgggaaggattcattcacgccgctgtcgacttctttccgtctacaacgccttcttgcaatcatctatttaggcttcacgactgacaacccactaaccactatcatcaaaatgtctgccaagtctcctcacgatcaccccaattccccaagatcgccttcgccacttcctcccccctccccgcagcggcttcccagtcgtagttcgagttcattgtcgcgttcaaacccaggcgcccatccacgtcctccgtcttctacgtctggtgcactctcttctcaatcatctcatgaagctggattcttaggccggccaatcccgctttctacttcatcgcactcagctacaactacgaatggcaccaaggctttgtctaggccaagaaaaagacgacgtacggctgaggaagaagaggttgcgcttggacactcactattgggaacgagctcagaaaagttgtatacgtttgacaagaagctgggtgaggggacgtttgggtaagtgcagcaccttattccaggtctttgaccacttcatgatccatcatgtgatggcaggaacaactgataatgaacacatcgtattgacgtctcatcgttgttttcaatcttctcaagcgaggtccacttggctatccacaaagagaccaaagctagagtcgctctgaagcgaatactggttcactccgaaacagatggagtgagcatcatcatgttaattctatctttgctttagatatgagctagagccgattcattttgtttatgctttaggttccgatcaccacgatccgggagatcaagcttcttaaacaattgtctcatgtgaacgtagtacccgttgtggacatggtacttactcaaggtgcgcctgctttgctgtctcgctctcaggttccccttaattgaggccaattttgtcaatatcgtgtgatcttgacaatttcaaccgttaggagatgaaacgaataacaatcgagggaagatctacatggtgtttccatatatggaccatgacctagcgggtttacttcagaaccctgaggttaccctgagccattcccacatcaaactatacgcccagcaactcttgacagggacagcgtatcttcatgccgtaagcctctctcctttgatgaaaagtaccttgatcagtacatacatatgctctttctcgaaacgttttgtacctcgaagctcaatctgacaatgcttcatgaaaatcttacattcttacgaatgaaacctgccttgacagaaccatatagttcatcgagacatgaagtcggccaacctgttgatcgacaatgaaggttgtcttaagatcgctgatttcggccttgcgcggacttatgacaagtccacatcgagaggaggcaataagatcatcggtggaagagactacaccaacatggttgtcacacggtggtaccgaccaccggagctgctgttaggttgcaagcagtatggacctagtatagatatgtggggtgttgggtacgtgacccttcttagtctaacggatgaaaccccgactttcgtctcgctcaaagtcataaattttcgtctcgttcaaaatgcgctatgttgaatatctgaaacagctgtgtaatagcagagatgtacagaaaacaccccattctccaaggaaacacggatccagaacagctggtagccatttatcagctttgcggaacaccctccgaagaagctttgcctggctttgatacttggggcggttgtgagggtcagttgatgttgcctcccatacctcttccgcgaagagttatacccgaattttcatcgtgagcttcatactagcatttcaacgagactatgttgtctgcttttggcacacgaccgatcactgatgtttcttgcaactggccattctgggcgacgacagattgagtaacgaacttgccagtctattggatggactactatgtatggacccagcaaaacggacatcagctaatgaagcccttgaacatcccttcttctgggtttcacctctacctgccaagctaggctcgtgagtcatctgcgttttacttttcagattagaaattactttaatagatttttcaatcctgtactgacacgacataatgatttagcctaccccactactcaccttcccacgagatgactcacaaaccaaaagctgcccctcgtccagttgtagcaatgcctcctacggcgagtggtcgtatacccgcgtttcaggcgactggtcaaccaagtttcatggtcccccctcccgcgccggcacctcccttcacctatgtaggcggtccccctcctccaagcgtcatcactaccggaccaacgctagcaaatcaaggttggtatccttcttctggacctaacgcccgaatcaatcccggaggcatggctagcgggaacaacctaaattggccgggaggcatgtatgcaggtggtcctccgcctatcaaggttcctcctacgcagatggcattccagtctcaaccttttcatcaaccgacttacaatcaatttcagacctcacagccagcccaagtatattctacgtctaatggccgaacaagctcttcttacccgaatcatcggtccgcggggtttccgcctttggcttcgacaacttcgaggccctaccaacagccagcgaattcttcatcatctgcggcatatcagatgccctacaagtcttctattcccactcatccaggtcatccgccagcgccgccgccaccacgtgcggctgcccatagatcaaacatcactgctagtagacctatgcccgcagggtttttcaagcctgtggctggaacgggcgataagggcagctattcgagctctactaatggatcgagcagtacgaaaggagtagagagcgagagagatagagaacgaaggatccgaaacgagaccccggctgggttaccatattgatgagccaccaatggaatgacgatatcttcaatatgcctcgtaaatgctaaatacaacgcgctgtgacaagattaggtatggctgagcgagcagaagtgtgatgacgtaatcacagactgcgtttttgtctgttatgcgctaaatgcacggactctaaacaggctaaggttgtcaggaaccagagttaggtaacatatacacgacagcgtgaccatgctcacattccattattcatcatgccttccatttcgttatgctccttctcctcaccttatgcgcttgataatccttctcagctacgttcccttgattagtgataggattagtgatatggattagtgatctgttgcttgataatctctagttgataatcctgtagtttagtaatcgagtggcaaccaggtggccacttcatcgtagctagaacacataaaaggatcgcgtgcgcgctccttcaagatgtggttcttcaagttaggatccttgttaaataacctagtagctaccagtgctattcaatcacgattcatcctctcttccctgagcctggaagcctaaacctccacgcctcgagcatccctagtcaactacagtcaccttgcgtaaccctgtaacccggccccttacaaaggttacctgtgagatagttattgagcccacccactctcttcttcgtccaccatctcgcctactacttatcttgatacacaccgaaagcactaaaacatgattccagctcagaaggtaagcctggatcagaataagcttggaaggttgaatcgacaaaatagagagcaaaagggatgctctgaggatcgtgagcagaagactgagcatcttcgttgaggattgttcctgaccggaaacggtctgagataaagtcctaggcagacgcctttagtcagtgaccagagctgacccttggtgtttcctattgtgtagaacaaagtagacctctcggtacgtttctctttgtatcttcttctccttggcaaccgtgaacgaatagattgactcgataagcaaactactgtttacacctttcagactttgaatgaggaggagaagaagcttttccagttgtacggaaagttaccctccaaaaagtcgaatcccctaagcaggatgcaggttcggtcttatctctgagtgccttctggacggataggaaaccaatcgattgactgacacactttcatgtttctgttgttcatctttttttgctcatgtcaatttcgaaactaggagaggaagtagtaagtcatgtgattcttacattttaacaggtgggtgtattccggattctggttgtcacgtacctgaccatgtgttttgtataaactttgtgattgtcatttagtttcgattccggagattatgccatgagtaaagcaggcacgatggcaggcaatccagtccaagttggaacggccattcctaaacctgaaacgtaagtttcccatatgatagattcctagacttaaagagctagactaaactgatgtctttgcctctcttggtctgtgccggcaaaacggagtagaatccctcacgcttcccctcccccatcgtcaggcagtgttcctactctgtcgagttcgccttcaaaggattctagtatggggagcatgggcagcatatttgaagggtaaatcttctccttgctcggttgttgaggtgtcacctatcaatagaatgatgctaacaagcttgaatctcattctaccgactcacagacaacatactcggcggctttcctcgtcgctatctaacgtttgagaattgagatcttgtatatatattcttcttcaaacacctctcgcctgcctcttcgacgcttcgagtcctcggctcttccccgtttagtgatctcttgcctatatatattcaattttacaattactgtgtttggtgatgccttgtcaacgatcactctgagcgacgtgtatatagttcgattcctatagccatggttatctcgagacatgtgtgtatatgttatcagaagacggagagatgtatgccagatcacgcctgggtggcgacgatcacgtgtctggagccggatgagagactgagagagttgggaaaaaatggctgacaaagagagcggcgacaaattctgagggttctgactggtcgcccctttttggggaatttgtagcgaggcctcctgcctttatcattctccaagctgccagcatttttagcaatactttcgctcctcttttctattcatcacagcatacaaagaagtatacagacgcactcataggccttcataacacaggatagaaaaaagatgtccctttcggcagacgaccttcctgttggactctcctcgtcctccacccttacctcctcctcttcgatcacgtcacctgttggaccgcagttggtcatcggttcactctcccttggagaagagtatcaacgaacgatcgccgagctcgaacggacaagtaagggatcaaacgaagttcagaagttcctggtcgataggattgtcgatggaggtaagtctcatctgaaaatcgactgaggttccttcttctggctgtgtctttcttagtatgagcgagagaaaattggacggcgggcggacggtaggcaggtcgggagatattcatgcacaccagacaggaaaagataatggagatatagagaagagcccgatggaagatatcaagttcccattcctctttgcttcgtcaaacgaacaagatggccgagagtgtatttcgagaacaagggacgaaacaagtgctgacttgttgctcttttccactctcacacaaacccttgaacagccgccatccttccttcgacgcactttgtcgaaattcacctggtactaccttcggagttcttgaatccccagctaccgccaacgcttcattctcagatcatctccgcacttgtaccaacgaccggccgattatatatccgcctgcctacgaccggccccaccgaacatactaccttgatcgagtcccttgtctcatctgggctgacatccgtcccatcgtcatcctcttcgtctgactctcatcttgtgttcgcaaagtcatccggcgaaacattgtcatcggcagcagccgcacagggaggagcgaggctcttgaagcgacccaaaaaccgggctcagaagagtgcaatttgggcattaagctcgggaacatcatcaccgacaggaagtggaacgattaccccgagcagtttgctcacagaggacgacttgaaacgaccggtgtgcgagctaccgacgggtgacaagggtgtcaagcgaaaggtttgtctcaagttcttcttcgcttatctcaaattgaaacagagatgaatatcgtcagactcacagagtattttttctcttcataaatatagagagcatgcaagggatgtacatgtggactggccgagctggaagaggaggaggaggaggaggaaaagaagaagacagtggccgctttagcgccggtactgaactttgacctgacggacgacgtgccggatgcgctgttggcgaaggccagctttggtatctcgaagccagtggcgtaagtggacatttgattaatcatctaatgcctgactctcttttactcgagtggtattcgtcaatcgttacttatcatcagggtacatgtctttgacctgctttcttgtagagcggaagagagggcaagactaaaggcagccgctgccgctgctcccaaagcgacgagctcttgtggaaactgttacttaggggatgcgttccgatgtggaggatgcccttatgcgggtaggtttattttcttgatcgtgttatatctcttgataatttttgccttttccagtatttatgatctgatcttccctgggttgcttgattggtgtttaggtcttcctgcgtttgagccaggacaacaggtcgtgttgggctcttttggagacgacgatgtctgaatatcataaagggtgattttctttttgaccagccagcccctctgatgtacatcttttctctcaatttctccacacgcattttcataatcctatgcatacgtatatacaatttccattgacatagggaaatagataacgccatgaagccctctatatctcctggcgtatcttgcttctattcaattccattctgtttgaccttggtcgtctgtacagcgagtccgagtcttagtcacagtcccttcgttctctgccttttttgtcacgtccgtgacccggagtttatctccatgtgtggtgtgtatatcctcttttaattttctacttggtctgatccaatgacataggtcggcttaaccacacttagctttgttcggtgcgagtagggtgaccgatagaggatcggacagatattacaatagagcccatcatttgaaacaccgttgttgttttatagagtttgctaaccgagtgacaaactgacgctcgtacgtttgtcgtccaaccggtacttcttcggctctgctctcttcctctttttttttcctctttcaccttcaactcccttcctcaacttatataatcctaggcggtcgttaatttatcttcctccaagctccattctctcctctccttattccttccactcgtatctcaacccggtcgtcctcttgtcaaacatgccctctcctacctcgctggtcctgctcgccttcctttcttccgccctagcagctccatcgattgtcgatcttcacaagctgttccctaggcaaagttcagatctcgctgtcggttctgatggttcgtccagctaggctaatagatcaagtttcttgcttgttttgtctctatgtctgtttggttcttcttaagcctcggtgcctatatcgggctcggccgagtgctgttttgaagaggaaaagacacgcgcgtctgccaagattcttatcgcgcatctttcttatatcctttcttcttttctatttggcatctttctcagcttggaaagcttcctatccctcagctcagtctactccgacggacattcctcaggcatggctcgacgctctcaacaccgccgtcgcagccggaaagatccctaatatcgtccccgccacaatgacgaatggatggccgtcctactcagatggatctgaccctagctctgccaagatttgtcattataccgtcggctgtgtagcatccaccgatagaatcaacgctcccgatggcatgatgggggtgtgtttttgttttcatttggcgagaaaggaacacatactgatctcttggcctgatcgatcttttgtaatctgcgctcttttaggtcgcccaagacgatgggcctctcgccccaggagtcgcgctcgtcgatttctacaacgagaagaacatctcgtctacccacttttacatcggttctaatgtcgtgtataatgttgatgttatgcaacacgtatgtacctatctattctcgacatcatgttgtcgtttacgatctcgcgggctcacaacctcgatgtacatcttattctctgtctgataggctatgactgtccctggtcagcactttgccgttcacacatggacccacccatacatgtcgtctctgacaaacgcgcaagttgttgccgaggtccgtattttctttttgcttcggttcacattctgtatatgggggcgtctgtgtctgacaacatcgtccgctttcctcttcctcaacctttagctcggatggacaatgaaggtcatcgctgacgtcaatggaggaaaaattccggcctggtggaggcccccttatggagatgttgataaccgggtgtgagcattgcttccaaatttcttcgtgccatgtctggctgatcgacttgggattttcctctatttcattcaattgtgacaagaaagacgtctctgatgctaagactatggattcatgttccctattgataagtcgagcaatcgcatccgaggtgtttggcttgacgacggtgatatggaaccaggacactgcagattggacgttgggaaccactggaaaagtcgctgatattacgagttcgtaaaatacctcatcgttcttctcattaaactcttctccttctgatctaacattgctgtacggtttacaaattctcactcacataacagacaacctccaaggcttcatcaatggagccaaatctcctggacttttgatcttggagcatgaactgtacaccggctgcgtcgagtaagtctgctttcttcaacttcgcttttgctctgatcgccaagctgatcgattctgagctttccatctcgtcagcgccttcaaatccgtctatccttccatggtgtctcagggctgggatatgcgaagcatcgttagtccaacttgagttttcctcgccgttcaatatttgctgacttgcgtgcatcgctaccatattcttagccggacctttggggagaaaactggtacaaaaatgccgttgacgagtcgtctgcgatctccaacgttggaattgttggttcgaccaatgtaactgcctcggcagccacatccgcctctgcatcttctgtcgcctctgcatcttctgccgcttcttctagctactccgcacaggcctctggaagcgtgtcatctacgagcgtatcatcaatgagtggtgtatcctcctccgttcgagcctcaagttcagcctcggctcgatctacttccgcgtcggcgttcgcatctgccagcgcggtttccagtacgtcaggagccacctttggtgtccggaccacactggggttgggagcggttgcattggtcgttttcattgcttctttggcttaaaacctgtctctcatcatgtcctatatatctctgatacctataatctatttgtactttgttactcaactatactaatccatcgctcctgtgtcactcttgacaaattaccttacttgttctgaactgaacaccttcactcttttattggacattcaatgtgctcttccactgcagactatagaaaaattctgtcaagaactcttttgtcatctcggatgacgcttagtttatacctcgaggcctctgcttctatctgccccttccgtgttttccttatttagcaatgacttgtctatatgatgtagataagataagatcaccttatataccatcatctggcgtgatcatctgaggtcggacttcactccgacagcgtacaacacgttctttcgtcatctgccgtgctgaatactctagtgtcgtcaacactttctatcggaagagttgccgagagagatcaagattgaaggagaagaaggatgggatggattcggacaaaaaaccctttaaaacaaaaccatcaacaacaaagcattcagtcctctcatccccacttttgaaagcacccattcacaccctctcacgtttgtatcaaatgtccgacaagaagaagcctaattttctcatcatcgtcgttagtcatgttctttttacatcctagacaacatgtctgtacatttcgtagtgcttaaacttcggcatgtgttcttcctctgtcttcatccaggctgatgatcttggattctcagatatcggagcgttcggaggagaggtcagagactgattcacctcacggattgataatacaaagtgctcttgttgatgtcgaaaactccattcttggtttctcttctttgcgtctcggctggatggatttgatcccagacagatctcgactccgaatttggacaggcttgcgaaagaaggtgctcggctgacggatttccatacggccagcgcatgtagtcccacgagatcaatgctcttatctggtctgtctcttaggcgctgcttcgctcaatctggttattcaaaaggaataacttctaatgttggacgcgcgatttctttattgggataaatcactgaaacggaatgggatacaggaacggataatcacttggccgggcttgggcagatggcagagactaaagaaagaaactctgctttcaaaggtagacgcgtattttcgtctctcgatgaaccatccatgatcattcaatagtcctaatgttgctctttatcttgggtatgctttgccccatttttaacccgataggtaaacctggatatgaaggcgtattgaatgaccgagttgcgccacttcctgctatcttgaaagatcttgctggctgtatgtgtctccatcactatctgaagaatctagagagcatgattagtcgcattagactaaacagatttttctatatcactaatcaagactcaactcacatgagtggcaaatggcatctgggacttactcctgacgcttggccgtccgctagagggttcgatacggtcttttcgctccttcccggagcaggcaatcactgtgagattacacaagaccttactgacgaatggtaattattgctatgaggagttgactgctgatttgacatcggattcttattaactagacgcgtatgagccagctcatgtcgctggagaagccacgtatgaaccaatccttccttatgttgcacgtcaatgaattacacacttatctatccatctttctgtttacgaacgacacaactaataacttaggccgttgaagttcatgccttctctgtatgttgagaatgatcgtcctctgcctatcgatcagcttccggaaaacttttactctacagaggtgagttatccctcagtcttgccctgatataagattgatctgtctgtgaagctatcgtgaaggcagtttctcaaacagtatcgctgacgttcttcctttggaaatcaagactttcacatctaaacttctcgaacaactgtcgagccggactgaagctcaaccattcttcgcgtacctagcatacactgcgccgcactgttcgtatcagctctttatgtttgagtacatgagattaatcaagttctatctcaaaatgatgtttcactcttctccaagggccgctccaagctcccaaagaatacatcgaaagatataaagggaagtatgatgaaggcccttatgcgcttagggattctcgcctagagaagctcaaagagctaggtcttgcacccaaagatgttaggcctcatccacaggtcaacatcgtggctggaaacccgtggagaagtcttacagaagaagagaggaggatctctagcaagggaatggagatctatgctgctgttcgccctctcttgtttttttcctatggacttgcagtgcgatcgatgagcagcgctaatgaagtgtttccctctcacgatagatggtcgagtttatggatgaacagattggacgtgtcttcaaatacttagaagagacaggtctgtcctgtcggtcgttgtttgctctatgggataccacgactcacaagtttcttttctctcaccaggcgaattggataacacatttggtagctcccacttcatcttccttcattctagtttcagggatgtatcgctaagtaaagtgcggctactctctttccttttagtgttcttctcttcggataatggtgctgagggggcccttctcggtgagctcgatcaacttcattcactatgatcgatcatttgggctaactcatgtcgattttccttcgttttgtgcagaggccatcccggtaatgggagaccaactgtccaaagtcatcgcccgtcactacgacaactcaatcgacaatattggggaaggaaactcattcatttggtttgtcttttttttagcttcataaatatgctgtcattcatttcaattttcaccgtggcttttatcacgttataggtacggaccagagttagtcttttctgttacttgatataacaaccgacaaacaacctaaccgcgatgttatgttatgcagatgggcgcaagctgcaacggctccttctgccatgttcaaaggtatgctcaagctcaacgattgaactaaatgatcaaccattctaatcttttgttgttcagcttggatcactgagggaggcatcagatgtcctggtacgctccctcttccatatttcttattcggaacttcccatggattgacctttcacatgatcaacttgattcgatgcagccatcgtcaagtatccttccttccataccgatcgacaggcaggtgtaatagcagatacttttaccaccgtcatggacattttgcctactgtgcttgatctagccggtactcaacaccctgcgcctgagtttcaaggaaggaaggcgagtctcttgcttatattcaagaccgttaacatttattttgaattcctaagctaacattttttgatacattttctctcgttccaggttctaacccctcgaggaaaatcttgggtgccttatttcgccaatcagtctgaacgagttcatgcagaggatcacgttcatgggtgggagctggttagttcagctcttatccctcttgaatttcaggctcttcgctaaagagaacactacttgaatcttatgttcctttcatttcctcggatgagtatatcagtttgggcagcaggcgatccgtcgaggacattggaaagcgttgttcctgcctcctccgagtggaaccgataaatggacactgtttaacctagcgtcagatccaggagagacgtaagttcctcttatatttctgattctcgttcttcgatcagcttttttggccgcctagatatgaaagttgttttatatgtatcaaaaatcgaacgaaaccaaaaatacggaaacaacagtgaggatctagccgagaaagaaccagagattcttaagcaaatgatcgcgcactgggtggaatacgaagccgagacaggaacagtaagcatcaaccagttcaacctgtatttcaagaaacatgatagttcaaactgactccacaaattatgttgtgaattattgaattaaactggaacagattcttcttcgccctgaagagtggcaaccaggatacctaccacaagcttgggagtaaagtcggacagtggaaggattggtggtaaagatctgggcgaatacgagaagaaagagaaactgtgattgttgtagtgatatccaatgtgtatcttctgtcgttttacttcaggtattgttatttcaccaattcaataattattttcattattcttgaatggaggagctagagaacccagtgaccgtgtccagcacagatgacctagctgcatctaactcatcaccctcttcgatttgccacaaccatcgctggtaagggacccgaccgcctattcctgaccctaatgcggcggccacagcagccatgcctgctcgcgcgctagctcgcatcatccggccgtcccgacctcggccatatctatatcattcaaaatgaattcacaagcgtaaacgttgatttgaatgatcaataagttggagccgatagcttcagaatgaagagtcttgagcactaagactcaccctagggtctcttggatctcatccgacttagcaagaagatcgtctatatgaaccatgtactgaatgtatggaacatagtcgatgatcagcgctttcgaaggaagtaagggcgccggtggaaagatgatcgactcaaggaaagtgagaagttgatcaaggtgattcaatctagagccgagatatatgtatatgagcaaaccaattgtcacgatgttagctctgtcatgcatagaagatcatgtagaagtcacgatggtgattcagaaaacgagaacgaacctgtctttctccagccttggccatcgatcaccagcagcactcgtcaatcgctctaactcctgactttctgtacctgtagtttgattcaacgcatgctgttcgatccaacgcgccatttctccttccatacccacttcagacagacgcacttctatcgggtctgctggctctttcgcaaccaagctatacccaacttcgtcatctgccgaagtgccatatcggtcgatttctagacgatctatcagcgtcgaagccctccagtcgacatgagcgtccataaaagattttgaatccattatcgaagcggatatattgagtatatccgtagaagatgctgagcgattcttcgatgttgatgtggagcctacaaataccgcactctgctctgagaaaaaagggttgtgttctgcacataagagattttcgctttgagttgtcggatctgacctggtaatttgaagagtgttgatagaccggcgtaggtctgtggtgtcctgaggttgactaggagcagggtggccgacaacgtccactagtccaggcgcgagtgttcgatggccgtgtgaagtgtacagcctagacacatattgtgaggaaagttcagaacgttggtatttggcaatctgttcaaggtagggtatcgataaatatgatggcggcgaaagatacactaaggtcgtttggagaggaagttctgagagcgggattgtactcgtatcttttaccaaatcgatcatttagcggttagaacaaatgcgaaagagcacaaccaaccaactgtcggaagacgagacggatggaaaaactcaccattacaggtcattactactggtcttctagactctgagatcaatgcgatcacggccgcccagaatcctttatcttcttcgtatagaacatccacctcctccagcaagatcatcgattgcctgaccttcccgcttgaacttccaccttgcacatcgactatgtcctcagccaattttttctgggacgaaacaaattcaaatttagcatcaggtcgagcagcgtcttccgtgaggtcgacgacggcctgactcgatttagaccccaatggacgttggggaatatctataccgctcgccgctcgttgcctgttggagtcaagcatcataaatgacagggcgttttcactcgacagatccggttttgatttgactttcgatgttcctttctttgtcgacaaagaagacccgattgggacatcagaagcgattggggccaaattactgcccgtccctccacgagctaccaagtgatttcttcctactcctccaaccatctctactaatgccagtccggaccgcttaccggctcctggattgacttcgaatacatcccagtcaagttcggttgcgcacgcatagatagaggaggttttccctgatccaggcggtccgacgagaagtatcgagtttgagagcgcttgatcagctgacaatcgagggtacgacggggggtacgtgtgagatcgagtcagaagaacatcagtaggttcagtaggtagcggttggtcgatcgagtccgcagccaagggtaccgtatcgagaaggttgtgggtgttgggctcggatttgatcatatctctttcatggtccagagcgccgatatcatcgtcatctacaatccagtcagtctctccatctcctttcttgaaccttttcttcctcgacttgtctacctttctaacgatctctcttttcttcctactatcaggtcgggaggtgtcgtaagagctaccagcagtggatgcagagtttgtagaggatgaaggcctttgggaagcaatcttgacttcgagcgccatcagccagtcacggaggtacgtggcttcaacctcatttcctaaaacctgagaggctgatctaggtcggaatttgtcgttccatagttcggaagacaatttaaaagatgtgtctaagggtaaagtagattcaaatctggagaaggctggatggcggagtatgaagggaaatattgatccttgtgtggaaggatttgagtcaagtgataactctttgttgttaggcttagatatacaatcctgccaaaaacgactagactcctttgaagtccatctgtcttgtgtgctgatatcctcagccgaacgtgacctgttcctccagatgaacccagcggcgctaggtagattcttgctcatcggtgggacaagtccacagtgagcttcctcactggatgacgcccatctagcctcgaccggctgctggtcggctattttatctttttggttcttaacgctagttgtagaagctccattggatttgaaacgtggagcgaaaaatgcgtgcgccattctgggcgagggtcggttgggcgatttggagaggtcaacgtgatcgacaggtattgtaggtagagcatctagatctatggctagttcggccgaagaccctccttcatttgaggctaagtcgtataaaagcagttgacggcccacaagtttgagcgcaaatgatcacgaaagattgtactgtatgagcaaccttggtatcgacaagaaacatatagggcagatagtgtagctcgatatgaaagacgaaaacaaatgccaacaaggcagacacttaccagcatccacacgcaaggtacccttcctggccactctacctcctttctcctttctagcaggacctgcagaccttctcccatccgtcgggccgaagtcgaccaattcaagaacatcatcatcctcacgagtcgctttcggcttcgtttttcctctcgttcgcctcttcgagctttccccaggcgagctgctgaggttgctcccttgtttggtgtccgagcttggttcctgtacggccgctggttggaatcctaagcctcccccatgttttccaaaggaaattacggcttgtttgggatcaactatcagctttgacttcctcttctttgtagtagttgaaatagccgagttagtttcagcggaatttggtgtagagacaggaatgattggagtcggcggtgcagatactgagtcaaaagttgatggattaacggtaggtacggtcgaaggatcatgctgaccggacgacgatgaaggagcctcctgggctgaagccgccgtggcaggagctcgaaacaagggatggacaagaccgctttttgtaggctccaccatagaatgttttgacagatgttgatactcaagcttgaacgaagaatgaatgcccttccctttctgtacgatcaaggaatagacgaaagaggacgggaggtcgctcaaatcgatcggagatggtgtcgatctgacgcgtcgacgcgtcatttccatctttgccttctcgcgtgtttcgttaacagtatgttcgttcattcatctagatcttcttctacaagaacgatctcgttgtccccttttttgttctttttcattaatccgaatggtccacatgtaatacagatttctgatcctcttcttttagagctcatcatgagcggcaccctgtttgcgctcattagctagatcttccaacttttgcctatcgaactcctcaaacgaaggcatctcacttgacccagccccacccatagatcggagaagctgctccaattcatcctgctctgacactccgctcgcagattcgggttctgatcccaacggtgtttgctcgacctcaggcgcaggcttgatctcgggcgtctcggtctttgcagagggggagactccaatggatcttcgaagaagcgcctcgactcgggagaagaacctaaggaagggatggcgcgaaatcacttctcagcctgatacaaacctactttaattgagacgtgagccgggaaaacacgacgtacaaatgcatatcaggcactgtgaaaccagatcggaccatcgtgagatccaacaacgttccgaccgtctccttcaattcggcctgtgctttgctatctccctcggccccaacggcctcttcaagcaggccttggatcaggggtgaatgagggttgatttcgagcacccggggttgagatcgcatgaattttagcatagggtcctcatcaccttgagcctgggacgccatgagctgttcagattcccgagtaatgggttcagtgaccggccgtgatgctggattgacgaagaaagacgaaagtctggactcactctgatcatgttggcggacataccagcgtcgtcagacacaatggcggtgggagatgtaacgagtcgctgagagataatgactagtgatgaggaatacagaattggtttcaggaatgctgagcgcagaggtcttttgctagaaggatgatctagcaaggatacgcaccatcgctgatgaccttgccaaaggtctttttgatgaagtctgaaagaggagtgaatctctccttgatttcgacctgggattctttctcgtcttcatcgtctaggtctgtcaatgcaggttgaaaaaaaaagtcatgagaatcatcgaccttctctcacagacaaagccgaaaagatgatgtacacataccttcatcgccgaatttaagtcctttcttggtcacatcctggaaggttaacgatctgaatatgaaaagaaaacaaagacagccccgtttgagtcagttgtcttccctgaaaaaaaaacaattaaaaagaaacacaggagagacccactcgtagttccggagctgagacagacagatctcatccatcggctcatttaataacaagacttcatatcctctagcgtgaagcttttccacaaaaggcgatctagcaaggtcagaagtcggctggccgacacctgccaagaaatagatctgtttctggccggctcgtcgtctggaagcatactgtcgtcatcagaaaacccagtcaagtttttgttctcacatgtgtcagcttatctttccttgaccttcgagcgctgtgatacatgtctattgacaagaaagaagagagaaacacactcacatcttccaggctagtgaactcattcaagttgctatcaaacctaagtaacttggccaatctgactcgatcggtgtaggtctccgtcacaccggccttgagagcattaccaaccaggccaaaaagcttcttgtacttctcagggtcagaggtggaaagcttggtgaacatatcgagagctttcttgatgagatgacgttgctgccaaggtgatttgtaaatggaattgtaatatgaatatcagacattagcgcaaaccggttatataacaactaccgacatgaatctgcctttacttacaagttggttgatgaatttagaatttgtgagagtatctcgagagacggtaaggctattagaaaggtaatacattaggcagcattcagaatgatttctattttatttcatcttacaaaactggaacgaacggaaggtcatcggctatatgaaagagcagacgcattgagagagcagttaattccggattcagatgaagcatttaatttggagccgaacagtgcacttaccatctacaacaaccttcaagaagctcaaccatcgtgggctatgggagaaatatggatcacgagacagcggagattaattgaatgcacgctgaaagaacacaaaatcaacaagagagatagatacatgaagtggtctcctagatcatccgtgataaatactcgtttgaccatcattcgtacgttcttcacgccctgttcggccttggtccagaagtcctgagaaagagctgagggaacaaagatgatactcttgaaattgatgcctgcaaagtcagccctgttgtcgtaaaaagaaattgattagaaacttgtagaggaacaaagataggaatgagaaatcaaccatcactcacttgaaatgagaccaggccaaaggaccttcagtatccttgctaagtgctcgataaaatgcgtcgtactcttgatcctcaatcgtcttcggatctctgacccaaatgggctcggccgtgttcaattgctcgaaagcgacttcctcaacctcctccgtctggggctcatcgtccgggagaacatcctcgatagaggccgcgtcatctgccaacttggaagtcgatttgggggactgaagcggggagagcggacgggtgattgttcgggtcgtttgaagataaatgggaaaggaggtcgcaaaactagaatgggtttcactgggtgcgtagaagagggaagaaggagaaagggaggagagaaaggtgtgcgatcagaacagtgctcgtctgacatctgacgtcctaaatatatttgacttacacaatttctcggattttgttctcttcgagccattctccttctccctctcgaagaaccatgacgatttcagttcctcgctcgcctaaagtattccctctggggtcctcatacactttgaagctggtgccatcagcatcggattcaaaaatgtgctgaacggggtgagggttcgaagcggtcggtggcgggagagacgagactcggacagaggacgcaatcaagaaggtagagtagaagccaagaccgaattgacctgttcagaacgattgttgagatattgagtaatcctctttggccaaaaaaatgagctaattaatctgtgaatcaacgctcaccgatgagatttccgtccggcttgccattggaatcttcggcgctcgacaagaactctgaagttccagacttggcgatagttcctaaatttctttgaagctcctcaggggtcattccaataccggtatctggttgaggcaagaaatagaatgaggttgcaagaatgaaatctgagatcaacgaaccgcttgcgcaataaatgttttccgaacaacttaccatggataataagtcggccaactcctccagactctgacttgtctggctctgctcgaatagtgacattgagttctcccaggccctggttaggtatgatccagtccgttcaacagggcaaattgtcaattattggggctttgaacttgataaacaatcaaaatcacggttgcagaacgaacgatggtgacgtgctgatccttcagcgaggtgattcgaagtttctccaatgcatcgtttgcattggagatgagctctcgaaggaagattgatttcgatccgtatctgtgcgcgcgtcaggtttttcttaacatcagcatttggcgcgttgatgatttcatcctctacttctttgatagattaacacttacaaagagttgaccacgatactgaagatgagagaacagatttagtttttgatcagcatgtatgtagagcttcccgccctgattatgcgattagaagcgcttaccttctcagtctagagacatcagactacagggtttgagagaaggtgtacatgttagttgacgaatgtgctaggagaactcgaagggatcttagcccgacggacctggtactcgaatgtagtttgagcatcagacgaggcgtcagctagaacgatggcgagtgtgggtagtattgctaggagaggagcgaggagcctcatctttgtgagccttgtgtgtcaaaacgagcgggtcaatcaaaagccttgctgaatgagatggagatctcttgggcaaggaaacaaaagtcgacgtggcaaaaaccagaggagaattcaaaacagctgatgtaataaatcagatatcaatcaaaataataaataagtgatatatccgaagatgtagatagatcaagcatgtgacctgagtgttacttgtctgtgatcgaccactggtaggccgtttcacgtcctccgtcccttctccgcttcttctactctgccaacgtattgagttgcaagtataatcgttctgcgtatgtgttttcagcgcattctatggtctagttttttgttcagcatcgttagagtctgaggactatatatataagacaagctccctctgccacccataacgtagtctcccaagactggttcctttgttgatctcctgttatcattgtacaagagtacgatgtcaattctattcctcaaccttacgtgaatttttgtctcgtcgtgtcgttcatggatactcctgcaagggtctaaacttttctcttgcccaactacattccgcgcttggttgctcccatcgtaacatagctgtggctatcccagccctggatcccaatcagacattgttagggtggaagttgggctggcaaccgaagtcttacaagtgaaataaccacaaaaggggtttcaggtttccagggacgaattcaggcttttggaacatggaaacgagattgatagtatcactagggagcaaggacagagggacggggaaggataggaataaatagtaacaaagaatccaggcttcgccttcgtatctgaaagtgatcgagactgcctgtcttatatatggttctcagaccctatgagcaccgtatagaatgagcgcgcgatatgagacgcggaaacacgatacctgggaaacagaaggaggagtagtagaaacaaaggcttcatgggtcacggcctacgaaccaagtgtgattcaagccataaccctaacaaacactgcccgggttcatactatgatacacgtgttatcattacataagctaccgatgacttctgacttttttgttcgttcagcccacgtgatgcctatctctacttggcaaaatgctgaaacaacagcccctcgggtttactcggccgatgtcggagagaagattcttgataagaagccgccgggttggtccgctataacacatagctgccctctctgaatgcggactcggctcctctattatcgccgtcttttttctctctttttccttgtccttctcgagaaagtcaagaagatttttgtctatcatttttattgatctactttttcttgtgttctttcctctttctctttcttcctctttctctcatcgaccataatcgacactccctcagcatattcactcaccaacctacagtcttttcaaaactcacagctatgcctcactcctgccagaccacaaagaagcctgcccggtctcttcacatcgccgtcattctgaccgacaccagcatggcttcccacgttaaggacacccacggttcctattctgacatcttccgtcgacaccttcttctctcccttcagctcagcggcagggacgaggttgatcttgtgctcgatgcttatgatgccactcttggacagtacccttccgaggacctgcttgtcgagggcgctcctggcgcttacgatggcctgctcatctctggttcctgtgggtgcctgtctcaattttttttctctcttctctctacctgtgctttgagtttctgtgacgccggcggagccagatagcttatcttttcgtgccttcgtccctggtccatctcttttctcggtccttcctttcagtcgccactgtgtaccaagaagcaaaatacccttggattcctcaattgttgactttccttcgaagggtcggagacgattttgctcacgtccgaatgatcggtatctgctttggtctccaatgcctcaccagagcatacggcggagaagtcgttagaaaccctgccggttgggaggtgcgttggataccttaagctgttcacatacatcaccaagttctcgaattaacttttccctcgatcgctttattcttcgttcttctttctactagttgggaacttacgatatcaacctcacccctaccggtgaaaagctcttcggcaagtcaactgttggcatgcagcaatggcatgcagatatggctgtcgctcctcctcctgagggtaacttccacctcgtcgggtccagcactaagacacctgtccacagcatggtctcgttctatcccgactcagataaggttcacatgctcgccttccagggtcatcctgagtttaatccctccatcctcaacctcatcatggactcccaggaggctattggtgccttccaccccgatgttgtcagatcctgccgagagcgagcggacatcccacacgatggtcttggagtccttggccagaagatgtgcgagatcttcctcggcgaggcttgaaaccttcttcatagatgaaaggataaccttccgttaagatttcgacttgacgcgaggctcatctctccctggcttccccaacgtttgttcacccggttctatgttccctgccgtctcggccaaaacctttccaccaaaacaaaaacgaaaagatccgacgtcctcaccaattaagtgggatagcgcttgcacgatctctctacccctacattcgcattgcatcgctacgttctattggtttagactcatagagttcgttctttccatacatctctttccatcacctgtcggttcgggctttgtttgcatctctccttgctctgtttgctttatttctttttgttttctccgcatgagttcgtgggaatttagaatagaaaaagactgccatctgcatttcctgcttcatctggttctctgtgtacgctttgctttaaaaatcctacgatctctctttcatcctctgttgtttaacgacatatctttatccgtgacatatctagcttatttacagcatatagttagaggcatctttctctttcaactcatcacgaccgttcacgactattgttcctatctctacgggtctactcatttgcattcatatacatcaaactgttagttcatgaatgacatgtggaagtttgccgatacagaccaatcgtgtcacaggtagtacaaagttcgtgtgtcaaaaggacatcatgttttgctcagggtactgcctcgagctacgtatcttggacgaatagcttttttgattcaactgactaaaagagtttgttgcattcctcgacggcagagttacaacgcgacgcgactgcccgttatgcctttatttcttctccatggacgggatgttgaagtacggttgactgatgacctacccgtactttctcgctaaccacaaactgaacatgtcacctttgacggcaagacctataaaagaatgctgacggaagtacgaaccaacaagataacaatagaacgtcgtctcaccttgtttgtcgtggctagatgactaccaaatcagataaacagccaatccgtcatagggtaacgtctagaggtcttgctgaccttacctttttgatcttgtttctgtagtagaatgtagtcagaaggctgacgcagtgttgctgtgtttttaaaactttaggtagaagtggcatgtaagtccgtcactcgtaacatgcagtgtagaattgcctaggttgatagaaatacgcgttcacttcacgggatcactcaacaggcacacgctgccggtatcggaagacccgatgttgcggatcaagaccaagctgccagacatgcctcaagttcaagaaggaatgtgtttatatctcaatcgaggattcaaaaacgatctctcggggggtgtatattcccagttcatcggaagaaaagggacggacgggcaaacggcgttccttgacactgtcatccgaggtaggagaagaattggaagcggtaacagatgcagagacgtctctagcgcataataaatccgtcggtctcgccagctcgacaaaggttcttggcgaggattacgtccaacacccatacgaagcgttttttccgacgctctcttcctctgtaccctcgacttcgtcggacgcatacgaagagccgatcgagcttgagctcgggagctatgtcgaaccagatatcttcttccacaaccaatccgctcaatctggaacatatgaagaacgttgtgactcagcctctcctcttaatccaatcccatacccaccagtttatcagtcttctccttccgaaatcctgacattctcgaccacccaatttcagaaccaacctcaacagacaaccgagccagaccttgtatccgaatcatacctggttccagccttagaagttcaagaaactcaggttgactaccctctcgcatcctctccgacaacgtaccaccggccaacctcggtatccttaccagagtacacccaacagttctcgtccacatccacacacccttcacatctcagcgaccctgattacacgcgtcacatcttggaacgaacagctggcgaaccttttttccttgacggccacgaatatggacaaagccccgttcctattcctgctcctattcccggtcgcataccggcttcatctccgatgttatcgacgttccacgcccactcatacccggttcttcccccccaagaagagcctttaggtgtagtaggatggaacccagaccttattgtacggcgggacgtgatgccggatgaccacgcagaaggaagccttccctgggagagtctattaagataggcgatgtcgaattgatggaaagctatgaaggatggtgattgagagaatggctatcaaaggatgtttgattaaacttcttcctcttctcgcttgtagtacgttccggtgcaacaacattcatctcttcgcgttaattctgtaacctcgtttttgaccgtcttgacaaaatgggattgacgtgcatggcacatgtgaagcgcgcggaagacgtataaatacacacatatattatcaccaactcccgtctcaaattatatatcccatttctttccccatctagagagctgagtcatcacacccttcccaccttcgcccctgaaaaactcgacgatttctgtcggttcgatcgcacagcgatgttttgcaaagtcagagaccgaagtggagaatgattgagcaccagcaagaacggatgttgagcatgggtatataatcgacgtctcgacaagagatgtaaaggcctagagagcgggcacagaataggaagaaaagaaaagatctacagcgtcagttgtatatcatgtatcggaattgagacccagaacacgcacatctttcatgagctgacgaccgtgtcgaggtatcgcagagcctatcagtctgtttttggcaaactcgccgtatgtaaaaaacacatgctcaaaattgaagtccaggataccacgctcgcctagatccttaatagatgccaagattgccagacaaggtagactgagacctgatcgaccgaatttggagccaagtgaacatatgtcaagagagcgttgagatatctttgagcaaatagacagattgaagaacgcgctcgtgaaacgtaccccgcagacgtctggttccatgaccccacccagcaccttcagcctgatccacgaacgataattgaattcttccaggcgtcaagaagggtgcatcaggagtgagttcccccatgggacgaatctagagagagagggaagtgcaagtatgaggatcggttgattaatcatagaacgtgaagttgaaggcgcatttagaattcaaaataacctacaaggactttcaacatcatgcgaatgtcggtcgatatccagtttagtctctgcagaccgttttgaatttgaggattctcgagtaagctctgccaagtttagcgaaagggagttgcatccaagatgatctcgttgagtcatttcctttcataaaagccctgggttcccttcaaagatggtaggcttacatcgatgctttcccgccatgtacgtctccaaagactggcatcgtcgcttcctaactcttcctccaaataccatggcacgagtgctttgcttaacaggcttttccatcttggtcccatatttccagttatctcctggtcgaccgctgaggtagcactctcttgatcggccgagcgatcgccatgcaagatcgaatttactcggatgatccgatgggagaaccgagacttgacccgcttttccaatagatgaagagcatcctgagaggtagatagccaagagaaaagaggatataccgggtgagaaggttgaaagaatgctatgatatgttttcccaatggaagacagcaaacatactattcgagaggtcacgccaatcactatcagaccacggccggacaaagcgccgagtctaggtctaacggactggacgacatccactgttggagatgcgccagagaaacagatacggtcggataagaatgcagtctacaccaacacgctttcaaggaagattcaaccaaagcctaaaggcgctcacgtagacaatagagcagcatctgcctgcctccccttccaaaaccggcaaaaatatcgaattcttcaagtacgatgataattgatttttttgatggagccgtcaagatagccaataaatgcgatgggagagtcgttgggggtacaaccgccgagtcctacacaacgttcgttcatcgatgcatggcaaggtatcggtatcaacggaaaacaacgcaacgaaatctatggaaaatgcatgtaagtactaacctgctcgttatcctccaactcttcctctgtctcgaagtcgtcgcctagatcgttgattccgacttgtctgccgatctctctgatcgctgaccggtcgtctttcagcatcaatgcggacaaccgaattaccatgggagccggaatttcttccggattggcttccgagagctcattgattttttcaatcgcttgattgagaatctgggagataagtgagaagcaagatacaagattatcagattgaagacgaaccgagaaaagtagaagagttcacaatggcatacagtcgtcttcccagatcctttaatcccctgaattagacagctatttccctctcctctctccaccgttcctctaaggagctcaaccaagttgaccaaactttcctcaactagggcgtcttgtccattaacctgctctgcgccagctagcgtcggcctaggtaccaaaggcgggacccttcccatcaagtgatcgatcaccaacgtcttggtctccaacacgtgtcttctgatggagggatcaagcgtgaaggttggggcgggaagcgtccaggcagccgattggatgttcaggttgacctgtatttgaggagcagcagcagcagtaggaaccaatgtcggatttgaaggattgtctaccatcaactctcgttctagacattctgaattgctctctgtcagattatcctcgtctttgtctagtcttttccttttcttggttgagctaggaaggatcgccataggatctacatcatcatccggatcaaattcctcctgagccgagtggtgaccgtttggttggacctcgtggtctggatagacaagactctgaactggactgacagtccggtcttcaccatcttctcctaaagtcgtccacctagctgtccctttcctagcatcattttcgaggttcatcattgcatcccttgattctccggttggatcgatggccgttcggctggatagacctatccctgtccgcttctcaaactcctccttgtttctctccctcgcatcagcctcctcgtctacctctccccatctagccgccgccgcctcctttctgacgtgctttccattccgaagcatctttttcttcaaaacctcatcatcctcgaagaacgggttcggtagaatttgagaccacatatcgtccagattagaattatacgcctttggcgaagaagcagcagcgtcttgttcgtcatcttctatctcctgcatgaaccaacctggcttaggcttggccaacgcgctatccttcttcatctccttcttcggccctgcactatgttcggatccatcttcagctccaggtctggatctcttcaactttgttgtcgaaggcagacgcgagggtgaaggtaaaggtgaaggagaaggtgaagacgatggcgagattgaacgttttcgatcaacggtcatcctcgacttcttattcgatctgttctgagagtcggaagacccttgcttcgactcgtcccctaccctcactctcgatgacgttcgaccggccggtgagcttcggttaggcctcttaatggctagaggtgaggaactggttgttgatccaatcctacctgatctaagcgtcatagatgaatcagagccgggttggacatcaatcatactctcatccgagggagcaggtgaaggaggggacattggtgatgcggtcgataggccagtgcagagggtggtggttctctgtgtgagatggtcggtgatgaatcgtcaatgttgacgaaagggctatcaagcggctgttcgaatggttagaaccctaacgggtcgcgccaaaaacaggtacgctcgaaaaagtgataaaaagataaacaaacaccttgttcttacaatcgaatactcaatgagatattatggggcagaaataaatctataatgagatgaaagtaacgtcgtgtatggatgttgtacatgttttagagataggtggcaaccgatcgaccaagaaaggaaaaaacaataaacaaaagggaaaaagaagaagaaaaagaagaaggagaaacagacaagaggaggagtgttggagatcatcactgcaaatgtatgaatacaaccaggtattctttattaaaaagacaagggggaagaagaacgaagagagaatgaagaggaaggaaaaaaagtgataacgacccagacatagtgctacacgcagctgactcttgatagtaagtccgggcgaaacaagcaaaggagaagaaagacagaaggacagaaagaggaacgaatataggaaagaagagtgatataagaaaagaagaaagacagatgaatcatcagagatcgaccaccaagaatagctagaaaagacaagatcatgaaactcgagaagaaacaaaaagaagaaacgcacgagaggaagggaaagggggtaatagaagagacgtgatgatgatgcagatgagaagaggcaatccagaaaatgaaaagggaaaaagaagagatcagaacaagctatttacgtgtgaatacatagacgaaggagagaaagagtatattatttggagagggtatgcgacttgaataattatgaggaaacaagggaacgggagagcgatatgaaaacaagaatcagagcagaagagatacacatagaaccgccctattgttctgctccttccggatacttcgccaccgatactttcttcagcacctctttgaaggcagggaggctcagcggttctatttggttgagaaacaggcaaagatagggatgagctcttggaccgcaaggagagaggtgtccatccaacgtacttgatagatatgcgtagaacccgtggtcgaacacttgtgattgggtcaactgcacatttggggaagagaaatgcgatccaatcgaacgaacagtcagcataaagtcgacacgttattcgtacaggagaagagaattcagatacgaaccgtatcagtattcgccgtcaatgccacaactttttttggtttaaagaagaaacagatcgttagacttagcgcttgaacacatataaccggacaagacgggattaaaccgaggaagtaaacacatagaaactcactcaatggaccttctggaccatgttcttcagagatccgagctttggcagtatagccatccatcacgggcatctgaagatcgagtaagacctgagtcatttacgtatatgaccagtcccccaaagtgcagaaaaagtaatgtaagattttattcatatttgagggcattggcaattcaaatccaagaaagactcaccagatcatactgcttatgtgcgacagcatctacagcctgcgatccgtcatatgcaacatccacactaaaccgacaaggaaaggaagacgaatagatgagagaccgaagtgatatgcaagacaggggagcttccaaactcttacttgttgtagccaaacttttcgagaagcttcgacccgacctgcaagaagaaagagcagtgatcagaacttcgttcagctcatcaggtgccagtccgacctcttgagatcttaagaacaacgagaagagtcgaatagagaagaacgaaataaggacaatacaatcataccttgacgttgacctgtgaatcatccactagcaagattcgtaaagggctcgtctagataagaacggtcaacaaagagcaaaacgaaagccgcgtgttcagttcagagggtgaacttcaagcttcaaatgaaaagagtcagacttgactatcgggacctaccggaactggcggtgtcttaaacgtcgactttttccccttcggatctttcaaactggatttccccggcttgcctacctcttcatcttcctcctgatcttcacttgcatagaacgaaaccgtcggcctcggcattttcggtctttctagatgggataccgagctacttttgtgggctttgactttggcatacagggcggaagccttgacgggtcgacagatgaacgattcgtagggaatctgaagttgagacatcgtctcgttgatgtcgatcagacgacatgccaacagtaactagatcgttgaaggaagaaagaaaagacagagtccaatttaggtaagctcatgaagttagacatcggtaaaagatggacgagcaggcgaactgacctgtgtattgggatacatttcaataactttgtccacatcttcctttttcaggaaatctggactagcaacaatcacgtcgactgcaagtgagagcaacaacaaggagttcaacaaatgacgcagatgaagcgacaacaagagtcaaaaaggcggacgcacagtgacccttcccagctttccccttttccatccacatcctcaaatcgcgcttcgtactcgtgacggttgcgccgacatcctcaagatgagcttggatagtcaaacggaggctctgagacggacagcacaccaagacggatgtgggagactccagacggggaaacttctcgtgagacggttctcggtctgtgatctttgccttgaaagagaactggaagacagatcccttgccaactacatgatcgggtttgcgagtatgataacaaaatgcataagatgagctgatctaaactgaacatcaacaaaattgagtatcggatcgttagaacagacctgtggattccacactaacttcccccttcattagcttggccaacgaggcagatatcaccaagccgagacctaccggcaaaaacaaacaaatcaagatcaagcatcaatctacgacaaacagcggtgtgataggtaatcatgatgagacataccggaaccaccaaacgatcgtgttaccctagataatacatatccgattaaatcaccacgattagtgctcaactgttgatttttctattcagattgacaaacgtacgaagaatccacttgagaaaaactcttaaatagtcgatgctgttcaggacgatgcggtgaagagaagatcgagaaggaagaatatgaaggtatgtaagtagcggcagaagacgactaatagggaacggcaagaggagcgaagaataacaagtttgtttgcagggatacccatgcctatcgagcaaacgcgcaaggactatcagcatacagctggtcggaagggaaggagatcaatatatgtcgacgacttacctggatcatgcacactaaagattcccatacagtatcctgggtcgtcttctatgagttccatgttgaatctcaccacgattgatccctggacagtaaatttgacagcatttctgttctcacgacaaagagaacggaggcaaggtgagtgactgcattcgatacatcaataaagatagcagggtttgacgattgactgacgagagatagttgagtaggatctgggagatagacagggcaagaacaggatgtttgagttgatgttaacaacgaggtaagaattgatatgaagtagcttcacctgtcggattcgatacatatctgatctgaggataggcggatcttccgccagtcggttggcatacacaacctctagattcttacgttgagcagcagaagctattgtatccagctaagaggaagatcgatgaacgtggataattagtgaagtatttacgaatacatgattgaaagagtaaagtacatacagcagactcggccactacatccacaaatttcaacagactgatcagcaacagttcaactactcaaatggagaaggcacacgtgacaacctaccatcacgaatgtcgatgtcgatcgtctctggctcgaccgagccagattctaagcgtgtgatgtcaagtacctgatccacaaacaatcttgataagctaacttttcaaagatagatgagatcggtctgctctgatgcttacctgctcgatgagccgctggaggtcttcacctgcatctttgattgtatgtagatgttctttctgtaaaggaatgggaagtggtagagaagtcaagccacatgagtagatgtacctatacgaatcttggtcccttggagcgagatcgaacggacctgaggagcactcaaccccggacttccttccagaactgcgaccaaaccgagaatagcgaagagaggtgttcgaagctcgtgactcatgtgcgataaaaatctacgatggaacacatatcaagacaagagcttaacggttgtcgacgatgccttgcactggtagatatcagacactcacgatgttttcgcgtagacagcatctgaaacatacaatccagccaaccggcaagaatacagacagatcgtcaggtgggctggtcgttaagggtaccctcaaaccaagtctttcttaccttcgagttttcctgtttgagcatagatcaaagaaacaggatgagctgcactctagacacgtgcgagccagctgggtcacgaaaagaaagaagataatcgtgaagacgaacgggttctgtgttccatcacctgcttcaacagagcaagctcccgttcagtgttgagaagtttatcctttggcgagagatcagcgggagcggtagcgttgtccgtgttaatgttcggtgcggatgccatccggtgtccaagcgttgggatctgacttaacatcgccttggccttttccgccaacgagagagtctgagaggcagcccaaggggtaccatcactcgaactggagagataagagccacaatctgacgtagtgagcgagacctttctgggtgcatcggatgggtctggtgaagatgaatcagccgttgcagaagtttctatcgaggccccagactggaaagaagagagaacgagttaagatttttgaagacaggatcgagagcaaatcaggcaggcacagaaagtttaatccggacgacacaaatgtgaagttccaagagggagaaggaaatcgatctgtcagcaacaaagttatggaactgatgtagccagaggaaagaggcattgactgcaaagcctttctttggtcttctgttcattttcccccttatttctaactcgaggcaaaggaggacgaacctgattgttagtctcggccagtctgctctttaaaaagtcgatggtccttgttgcttgtgatagcttgaaatgaaggtcgatctcgacctcttccaaaagctcctgatgctcctccaggctagctttcagcaggtcgacctcgcacttcaactctttatttcctctctgagatgcctcaagctgatgcttgatttcttcgaactcggattgacgctgttggctggcgatcgacgaattcacgacaggattgctgctgtttgatatgctgggctctacgttgaaagtcctgaaggactctgtagccgacttgagggtgtcagtgaaggatggttgtgagaatgggtaggatgaactaggtgaaaatgcctgactggatggggagggagcggtggatgtagacgatccgatatcggtcatgattatatattccggaggtataccgatcctttggagggttgagggacggacaatgggaaggaagagctgaccggagtcagaggaatggagaaaagtgagaaggacacagaagggaaggaaaggaagaggtaataagaagccgtcaagaacaaggaaccaagattgcctgagcagggcaaggtgggtcggatgtagtgtgaatgtatgttatgagagagaaatgatggtaagggcagaaggaagcccggaaaagatggctaggctttgcttgggctggaagaaaacgattggcagcgaaatttccttaatatgttttgagaggtatattagacgaatagaccgtttttcgtgttcgaacgacccgatacaggtccctaagtcgatcaataaagggctgcgtaagatatgattacaagcttcattagagaaagcttcaggacacgcgcctccacagaaatcatatagacctgaatgcaaccctcgatctgcagcctgcgctaaggggcatagaattaaattgataattgatagagagacaaagattaacataatatagaaaaggtacgcagatcggagtaaccatttatgaaaccctgacatcgtcaccgatctctcgtccgccatgggccgccttccaagtagagatcaatgggcatcggcatcggcatcggccttttccttttccttttccttttccctctttctggtgcgttcgcctctcttcttcatgcgttcgcccccccactcaccgttccgcgatctgttcaccctccctccggatcggatttctgacagacgagacagacgacgcgtcccaagcctgttttcgtcggcttctcgaccggaacatcgctccgaaaggctgtgcatgtcaccggcgtaacaccttcaattgtgagcacgctcatctcatgtgactgacttaatctgatacacatctttccataccttcttcaagtttatctcttctgtcccctcttggctttctatctctgatctatactcactcaacttcttcaaagcgaacccaagggcaaagccaaatagtagcctaaagcgattgtccatgatagctctttcattcatccgagctagtctcgtcatgttcttgtcttcctctctcgtaatcggtacgcctgtccaaaaggtcatctatcccgatcagtccttctcgtattcgatcgataggcagaccatgcctgaagcaggtttgttcgttctccttgtgtgtatatatacatactccgatcgaaacgctcagaattattctgcatctggcccatattccaacttcaaatatcacagctgtgtctgctagaaagcttttgactgaacaaggaacaggcacgatcggaactgtctttcctgctgataggccagatgacatagctggttcgtcttttaaactttctttctgtcatattctgtggagtatgcttagcttcgatcgagtgaattctcactacacaaatggaaccgacaacaacaggttctccttttgctttgatggaggttggtttcggtcaccgtttctttcctcctctttcatcgatcactaaaatgtcaaatacttacctcttgttcttctctgtcctttcatgtaatagtatcaagtccctcaccctaaagaccaatcttccctcttgctgttgctcatgcctatatcaacttcgaccaagaacattctcgcttctagctcacacgaggcctcgttcaccgttcagaactcaaaaggccgcgtcgatcaggaacgagtctcattaattggggtccgtccatcatcctcatctacgtctcttgaccctctcgtcttcctttcttcttcgttctgttctgagtcagcctcctgagcactgacattccgatgaacctctcttatccttctgtcataaacttcatcagaacgtgacgctcgagcgagagttgacgatggcacaggatgcgctctacacgaaacactatcttcgccttcagtatgtctctcagctttcttctttgccgaactttacccaagaaacttttcctgatccttccgtgtccttggtcgtatctaccttaagcccggaagcaatcgcatggcttccgtctgcaccagcatctcctcatgtatcgtactgggccaggctcgaccctcgagaggtgtactacgtcggtggtttcggcgacacaaagtatatcggctggatcgatctcgatacatggaagaacgtttaaactcaattgcatacttagttttctttttttctctggaagattccatgcccttaacttttctcgcccgagttgcaatgtttccttccttttccttgctcttgagcattctagagaatgtggatgtgcaggagggctcctatggacagaaagagttacctgcaaacagataacgcgcttatgaaactagggagcaaacctccacgcaaaacggcatatacacgtgtacacatataagaaacagagaacatgtacaaccacgttactttcttgtcatttctttgctcccctactctaaaagccgctcgaccattcggatcaccaatcccagatatgagcaatccatttggccaagtcggttttccggcgttcactctggcgaacgaatggatgacggagcaggtctcttgggtagggccgatccgccgccgacggaatcaggctagaagaaatcatcgacgttccgaacgaattgtgcgcactccactatgtgagcttctaaacctcatgaaacagatatgaactgaaaggaaaaagaataagacgaaccaaagtctgacgacatccttgattccttcagaccagacaacgtcctcatcatcgaccagctttggcggcggctgatttactatgaagttcaacagatcgaactggcctacaatcggaggttctccctcgggtgggaaagggaatcgattacttgctacctcgaggagagatagtccgagagaccacacgtctgatttgattgagtactcccgcccaaggatccgctcaggctagaagattatatggaaaaaagaaaaaccccgaagaagcgtctctaagcattagtttgagatcttcccttggaccaagaaagaagaaagcagaacgaacagccatgtagaaagacgtcccggtgaatgtaccagccaaagaacctacgagctcgcccgacactccaaagtcacagatcttgaactgaccctgttgagtgaccagaatgttcgatggcttgatgtctttcaaacgaaaaaagagattgaattgatgtcagctcagctacatctatatatcagctctttcgatgaccagaggagataaggagagtgaagctaacctcgatgaataattcgtctctcgtgcagatagtccaaccctctcagcactgccaccgcaatctttcctaagattcgttcactgctccggagtccttttcgcttgctctctttgactacggcatccagactctttccttcgcaatactccataaggatcccgatcattgagtccccgtctgtcaagaaggacccatagtgatcgacgatacaaggggacgagcacgtcgaaagaaattgaagctcccggaggatttgacgatgaatcgcagggttgggtgaggaaggaatgatctacgaacgcacacaccagagccaactgtaagtcagacaatggaacccccaaagtaagaaaaacaaaataagccgagctcggttcacccaccttttttgccatgacaacaccggtccgtcgatttctgactttggtgacagctcctcctgctccctcgcctaggtaagctagatcctctaactctgctggatcaaaccgtaaaggaactacttcctgtttcgctgtaaccgaatcctgctgcgccatatcgacttctcttcccgatccgtatcctgaacttgaaccggaactcgaactggatctgacggactcttcactcgaccgaacccagccctcctcagccgtatggggtcgagttcttcccagatttggtggatctcgcagactcaacccggacacagctgccctgagatcatccgccatagaacttgtgcttctactaccggctaaagtacttccagcttttggtaacgaagtccgctcgtcccacccggtgcttacgctttgcagatttagaacacctggagtgccataaccaccatagacacctccatcctctaactcggcgactgagagggggcggacggttcggtctccggaagaagattcgtcgaaatcagagtaaggtactggtgttacgaaagaggattgagagggtgacaaagtggtggaaagaaaaagtttcggtggtggttgagaagactcttggtatgacgtaggcgtgggtgtcaagtgatctgaagttggactcgacagcctgcctgttgatctataggacggagatagagagagagatagagatggtttgggtgttgccagtgttggcactcttggcctagatgcagaaggtgagggtgatgcatttgaaaaaaatgcaggacgagcattagggttgactagagatattccttgagagtcaacccatccaatttccccggcctgatcaacatttatgccaggaacctgaggtagaggaaaagtcaaaaatttagcacttctcgaactcatgattcgataactctatgaacgaagagaaaaggcgcacattcccgttcggaatgcccaatgagagtcctagttttggcctcgaggacattggtgacggagataagttaggcctgggtaatgatttcactctgccttccacagacgaggcgcttctggaaggtagagattcagtacgatcttcctcggatgatgtaggaccagattgaacgacagccaaaataggtaccctaggtctagatgctgagggcgacggagacatgctggagactgtcggggttgttagggattgagtcggaggcgaaaagttgatgtgtggagatgattgtgccggctggtttctaaatgaagatgaagaagaggtttgaagaagtgttcctcggttttgctttcagaagaggtatgccaagtttatgtcagatcgtacacaagagagtcaacaagaacttgatgccgagaacagaattgattgccaatttagaagacgcactggagacagagaagaatgtgtagctcctagagacaggctgagttttgatttgaagggagatgcgattgacgatgcagatggttgatcagaacaaggtgcttcagagaccgtcgattgaggatatgaagttgaagttgcattctggtcatcggacagttgagctcttgcgtcgttcgaatcctgccgcagctaacatcgaccgtgaatcgtagaaaacgtacgagcatgtcagctatgacgttatgaataaagaaggtactgttctctagaggaacgttacaggatgagaaggaacacaaaagagaacgtacctcggatctagatggggtagatataccaagtgtgggtcttgacggtatcgaagaagcagctgaagacgatccgggtgacctgcctaccagagaggtgttgtcctgatgcgatgctgcgagagcaaaatcagattggggaggatacgtcggacggctgtgattcgggggtttggaagggtattcatcgatgtatccgttaaggccggcgcagcttccagcttccgctgcctttgtcggtagtaatgaaggtaaaggtataccgaccaaggttgaagaaggaaatgcaaatagaggaaacagatatcgagatcaacgaaagttgagcgaaatgaacagcatgtcagaaaccctccaagacaaagtttaggcaagatatgatagaaaacttcggatgcaacggggattcaggcacgatcgaagaaagcagataggaagatatgcgctacctaaaggtaggactgaagagacagcaagagaagaagagattgtctttctttctttcgccgtcagagtgaatagaaaggagagaacgaaccaagaaattcaagcttggtcttcccgacagggacgatcccagagacgatacattgggacgagctccgcctggtcgtcttggaggaggagcgctcatcagagatggaagaaagatggggagaaaggtagaacgagcggaaaggacaagcaagagatgccagagtgggttaaggaggggccagaggattacgtacgctgataaacctagctcacgtgactcacgcacgtgatgtctagtaacacgaccgtcgtgccagctcacgctttctttccacacgagccagcgcgtccattcgtttctttctccttctatctttctcccaacactcttaccgtcctttcgtcctctacctttcttcaacttgtatcaatttcatcatgtctggattgttgtgagtccctgtctatggttctgtttcgtaattaaattgatctaaattcagttttggaaatttcgtcttcctttttcaaattcatttaggggaaaccccgctatcaccaaccttgtgttctctttgggaggtgggattgttccattcttgtttcgattgatatctctttctcttctagacggttgttccatccaatatgctgccctgatgttctgtgctgatttgagttataatctttgctttcgtcgttgtgatcatcgctcacaatctattccctctctaatatcttacttttctctctccttgccacacgacccatctcaaagccatgcaggtcgcccgaaaggtccccactgacgaccctgatgtcctcttctacctacgaatcgcctatgtcgctatccgttagtaacctcttgttgttcgagactcggtcattcgccatcgcgtcatatctgggttactgaacgtccctcttatgtgctctcaacaccgggtcgacgactgggtagaactcatcactttgggcggatacttttacatgacctccaaggtaagtctacaaatattcgacaagaactcgtccgagagatctacatcttacaatcgtgtgcatttttcttcgatccactattcctattctgataatcaggccaaggcaaagaacgatactagcatcctcaaatacgtgcagcctggaaaccctatggtaggttcctctctttcattctgaatcaaaatcaacccccagcgatatttattgaaacttctatgtcaattttgttaggctggtggagagggtgagctcgttaccaccaccgtccgggactatgatgtttccgaaatctccaagttgatgcgaggtgtctacatcgtgagtgttacaagagtcgtcttttaaagttgtattgatacaatgagcctgagagaactgatgcaattcacacgattgatcgtacgttgttagggatgtgccatcatgtggtacgattgatgtcttcccgccgattcttcttatattcctctccatcagctcacttgtgtgtcctccgacttgatgttcttccttcttggcttgttgcagcttccttcacggctacatgaagtacacccagcccttgttcatccagtcgatcatgactctcaagggtttgtacgactccaagcccgccaaggtctaccttttcggccagcccgctactggagatctcaagcgaccttggttggccgctgcccctggagccggtctcttcggaggtttgtcttgtcgaactttcgctcgtcgtcatgtttcattcttggtctagtagcacggctgacctgcttgacgtttctcctgtctctatcgaacagccgctcctggtggaaccgatgcagccactatcaaggaggccgagcaggacgccaagaagaccaagtaaaatgagagatgatgtgaataaaccgtgaatgcaatagaaagattatgccgcttgcgtgtagggcagatgaatgaacgctttctgtgatctcccctgcggtctgtaagaagaaagtaacatagtataaagtgttgaatcgcttacgtaacgaaagaggccatacaccctggctgacgtcacacgatcccactccttttcaacaccgtacgtaaccggatgggccatcgcgttttaaacaaactccacgtttctttttaacatccagtttcggtcaactctcgctcgctttcttcttcttcttcttcttcatcttcttctccacttcgctctcgtggctccttctgttcattcactcgttgtaaagccgcctcgtacgcctctcgtgcttaagtagtcactagaaatgggtcttttctcgctctcgaaaaaacacaaaaagtcagcgtcctcggtgtctcaggaagagacctcgtctccacccgcctccccttcttcatcgacggccatctcatcttctcagcaacaccaatcagccaaccacatccgggctgatagttcgcctcttcgagtaggaaagaacggagcagtccttgatgagtctgttgattcaaagtctttgcctcaaacagcgaagcgactgcctctgccaccctcgaatgtatctaccacgcctcttccccccactcctcatgctgaggatacttccagaatctattcgttcacgtcatccgaaacgtcgtctcccacgagtgctgccaacccggatgctttccggggacaaaacgttcaccccactggagcttccatccaggagcgacctcgagaagaggccatgctggacggccggcgagatgccgattttcttcctgctcagaagtttgatgaattcgtcgttcccattcctgcttctcgatcagccggtggtgcgggtgtgaacgagctggcatctcagcttcggaaggcagagatctcagactctcgacggatcgccaacgctcctggagatcttcctgaggttggcctcgctgcggattctgtgatgggcgcggcacccgattcgacccttcgagccggtccacaaagttcgaccgctaaggccgttggagcaggagcggccgctggaagggacagcttgcctgtgaattcggctgctggaccggccgcatctactccggctactcatagagcagtcgatacagtcgaggtcccaagccatcatcaacagcagttggctttactagaaaagatccgaaagaaccaccacccagtctcggctaggcttgatccagccggaagagaactcttccagacggccggtatgccaccagttgaccttgaggggcaaggtactgtggactgggaggaagagtggggaactccgatcgtcaaagagacagtatttaggaatcagcatgtcgaataccagacacagattgagatcaatcgacatgttcaccacgtctagtatgttttctttatttcaatttaatcaacatgttgtctcatcacattccatttgactccaagactgattctgtcttctaccgaccctgttcatcgttttggtagccaaaaggttcagcctctgttacagccgccgtctgtcttgcccgaggacgaactgcattacttccaggatgcacagggcaactggcgcgaggttcgaggtagagccctcgccgaagagatactcggatctctctcggcttcggagcgagcgctcgatcagccctacgagtactgggattcccgggcggtcgaggccgagtggaaggagatgagagacttggtcgagacgggcaaacaagagtacgagactgtgatcatcaagaaaaagatgggtacccgggcactcatgcttggagaggccgaagaactgcttcaggacctaaaattctggaagaaggacgaagacaaaaacctctcagttggttccaacgtcaagagggagggagagcaagggacacgaacagctgccgttggccaggccatttaaactctcgtcgattgaagctagctaccaaattcgaatccttttctttatcattctctctttaccattgcattactctactctttttactctttgttccattcttgtcttgttccatctcaaagatacacatcctgaatgctctctgcatgatctttggcttatctgtatccgtctagcttttttaattcgcttgcttgttcccttttcatgctactcgattcatgctgattcttccgtcctctccgatcggccacgaccttggtgatcgctcgactggacgttgttttaacctgttgagccgagtggagtggtctgtctgttgagcgtgggctgtgactgcgcaggtcgcacacgtcactttgtcattttcaccattaactttcctaacaagtcgtgcaagacttatcatcctacaataacatcaacaaccatcgagatctttaatagttatgtctccacctttattatctgtcaaagacatcggtgagtcttccttcaaacccatgtttctgggttgtgcgtaaggaaaccgggctgactttgttgatgtgggcctggcgattcggatggacatagctgttcgaagagacaatgggtcagtctatatggataacttggtcttgatagatcactttgactgaatgttggtcatgtaactgaatacaaaatacacattaggactggttctgctatctttgaacatgtttctttcgatgtcgaggaaggtgacattgtggtgatcaaaggacgatgtacgtatcgttttctccttacctcctatgctcttcacttccgagactctcaaatagcgtttctgatcccgctcgattcaacaaaccgaaacggttttcttttcggcacagctggatcaggaaagactactctactaaaatgcatttcccagctgactctctaccaagccggatccattcatctgtctggaaagacacctcaggagatgggggtcccaaagtacaggacacttgtggcttatgttcctcaaaggccttccttgttaccagataatccgacgaaacacctggagcatgtcaagacgttcggatcaagaagagagcagagtggaggcagctcgagtgggtggttcgggtggggaaagaagggagtaaggttagaaggagaggaagacgaacgaaataacggtggagaccaggtgttggatccgatggagttggctaagcgtaagaatctcatcactttcctaaaggcttcagaaaaactccagtctgtatacctagacatcgaagctgattgcctttctttttttttcatattcgaaaatgcttggtctgatgctgttatccctcatgtccatcttttgatagaatgggatatccagcgtccgttgtgggatcgaaattggggagatctctccggcggagagtctcaacggatcaacctcgcctgtgcttttggacgaggaaacggtcttggatctggacctcagatcgttttactcgatggtctgtttacgcctttcctttccttcgctatgtttattcctgttttctttgcttcatgctgatgattctcccctcttctacatccatctctttcatttcttatttagagccgacctcggccctcgaccccgaatccgcttcgaaagttgaggcatctcttctcgagcttctccctccgtctaactccaacccatcgggcaaaggatccaagacgggtaccggcccaaaggcatacatactgatcacccattccgaggagcaggctgaacggttcgcaggaaagggggcgaaggtgatcgatcttggagatgcaactgggaacgggaatgagtgatagattgtgagaactggcaagacgagaacggatatccattatctaggccaaaatatattcatgctgtgtacgattcgatcttgttttcaacggacaatcaaagagaagcttgtgagagagagaggagcgcgagggaagaaacagtcatggcaagaatctgataattataagataatcgagataaaacaacatcttacaaattcgaacatctctttcggtctcaacctccaactttcctcatggtcgacaccattttgaatcctctcccttccacagcaatcccatcgaggctgatccaaacagagcaagatgtcgcccactggctcgcctcgcctgggtgcagaaactacctcggttggatccgactactctcacaaaaagtcgtcggcaagaccgttggtgattgtaaacctactgtggtaagcttgctcgttcttaccctctcgtcagtaaggccggtaatcttgaacaagctttctcaacaccttgtttctttacgggaaaccttccgaaccggccagatggtcagccgcctggaagatttcttgagcaaattagaagacatcatctctcttcatcccccgttgcagtcctctcaacgttatggaaacttagctttcagaacatacaccgctcaggttaataccgtacgcccgttctcttcttgtttaaactttatccgattcatatcattacaaacattgaagaacggtcttgtggatatctaggatcttcctgctctcctcaccgctctccttacatctgatgcgagcgataagcatctcgctttgttccctcaactccttcctcttctgaccgaaacatccttccttggtaattcgacaaggattgactatggaaccgggcatgaactcgctttctttctgtttctctatgctcttcgaatcggaaacgttctgggtgatgaagatgaggaggggttggtgctcagagtttttgatcggtacgtttgtctgtgacgattcgttgctccagaatattgagtatcaggctaaacaatcaagaggcgtttcttggtgtgcttttgaactctgaacagatacttaaatcttatatggaatcttcaggatacttacaaactcgaacccgcaggcagccatggcgtctggggtctggacgattactgcttcctcccgtatgtctctagtttcttgatcttttgtaaagtcgaagcttctctcaatgtgactttatttgtgtgggactcttttgtccatgtggtagatacctttttggttcttcgcaattgctcggttcatctgtttctccgtcttctttagttccattccagtcttctggaccaactcctaagcttcggtctgttcacgccgcatcttcttctactactcccttgtcgtcgctacaatcgtcggtctctgggctgcaatcctcaaaatctgaacctccgggaatgttgccatcgatggcgatagttgcgccgaattctacaccacttccggtgcaaagttcaatcgcacgcgatgagaacttgaagggaagcacactatatgaaaaggccatcaatcgggttggcttactgaaaaaaggagcttggcatgaacactctgtatgtcttgctctgttatactcttcgtgtcttcctgttttccttctgtcgaacgggatcaaggcaagaacgctgatctgctcgatgtctatggtgcgcgttctctactttcaagccgatgctccatacactctcccactcggttacccagggttggccaaagattcattcaggcttgatcaagatgtacgaaggagaagtactcgggaaacgtgtagttgttcagcatctgcttgtcggtggtctgatcgaatggtagtgtttgagcagagcatgtctctcggaatgggtatcgcaaccccaactgttgtagatggtcagagaacagacgcgtcatcatgtcatcatcaatcgtatccagttctacatcctctgggctgaatcgacctccatccaatcaactctaaccacatcatatacttggcttccttctgaaagactctcattctgatctgtttcgatcacaaacagataggcgagcaagaaagcaaacaaggcagataggcaaaaaaaaaactagaacaagtgtacacacacacacacagctagtcgctcatgtcttccttttcgtcaacctcccgctgggtcttggcgtctgttccgttgctggcagtcccattgtcaataccgttccttccgatctcacagccagataggtttcctcctcatccgacaacatcaaccgacggattttacacccggacccaaacaccctatggatcgctagtcatgatcatctgtcatgtccggtctgctcctgagcgagccgggatgatgcaccttagctggactccttttccagatggaccagcttcctccaaagcatggagaatcgacaagtttgcttctgaggggttgaagacctctgtcgacaagtctgaaggaagaggcaggtggacagggttcaacttggtctgccctcgtgccggaagcttccaggtggggggagagaacggtcggacgaagcacattatggaactgtcgtctgctgatcgtggaggtgcagaactcgagcatggccgtcgagagcgtttagtgttggaaacagaacaacccaggagatgggcgattggaggcaagaacgcttcggacccgactgctggaccagaaggttggatcggatggttgggctcacttctccctatccattgggttgtaagtagtacagggtcaaaggccaggtggtggatcgagacattagacgatcaaggggaggtgatctccaaggtgggaacaggagtcgagtctgaccgacagaacggatgggaaggagaaggaattgctcatatggagaagaaccagttcgtcctgtgattccgtcgtcagaacactgttggccatatctttttttttcaaactgatcagcacttcaatatttctcgttcgatagtggggactcttttcctccaagttggatatgggttcagaactcgactccactagatgatccttccccctttacctttactctcgcgggtggtcatctgcctccgatgttcccttcgatatccacgcaggctcttccagcagaagcttatttggcaggactacgtgtgcccagtcaagggatcgaatgggacttcaaaccacccacaactctcaggcttttcggctgggggccactaaatacaattcacagagacgccaagcagggcacggtcaagatcgacctcattaacggttggggaaccagacggaccgttgttgaatccaaagctgatactgtgcgttctatgttcgcttattgccttgcgctgttctctttttccgtggcccttcttcttttctttttcctttcatcaagtgttgatcaatatcgctcataaacatgctttctgtattctcaacttgtcaaacctgtcggtcgtaaaaagaaaacattcatccctctgtcttgtcccatgccaggaggacatactcttcccgaagaaggatatgcgctagagagtttttgtgcccagtcaaccgtcaaggcgttcgttcgatcgggtccgtgggctgactggagggaagtctggagaggcgagatcaaagatggcgggttggaatttggaggagcctggatgaacgatctggacggatggaagatgggtcatggaaagagagagggcgagaagaaaacggcttaagcccactttgagaatgagttattagcgagagagcttctctcggaactcgctgaactgactcgaaacaaggaggagctttgtgaacctccataatgagcgggttatcgagagacctggctcgacagcagcgcttgcacgagccgagaccatgtactgcctctgtaacttccagagagatctgtcggaatagaacagatcgcgaagatgttgatgcacgccagcctgacactgaaagccgagtcagattgaagtcaaagagagctggtagacttgattaactcttccctcaaaggtgttcggtctgcatcatgttgtgtcgtcagaaccagattttgtctagattgttacgttccaccagcgtgtttgataaacaagttgatacacctgtggaaggcaaattacccgagaaacgaaagatctgatacctcaacttttttccctagagaatagtacaatattgatatacaataactgagagggaacagaaagagagattgtccgagaagaaccacgggaagttcgcagttgagaggagaaggtaaatggaagtgatacggcaaggagaggtcatctctgatctccaattttactttttacgatggtatgagaggattacaaagaaatctcaaatggatgcttaaggcgcttcgtcgatgatctggaagcgaaaggaagagagctccatgtcgtcagcactagataggaaaagagtcagtaagctaacgacatagacgaacctgacacttgatcgctccactcgagatatcagccgccgtgtgaaacgcctcgaccgcgttttccaacttgaatctatgagtaaccaagctcttcaggttaatcaaaccggacgagaccaaccgaatggccttgggatattggttacagtatctgtactggtacttgacgtcgatctcgtgagcggagaggaacatgaaaggcatcgactgaacttctttgccaactccaatgatgaaaacggttccgccaaacttgagcgactggaaggattatgaccatgagattcagtgttaaaaagaggttgtcatcggtttcaggggagaaaaacaagttggagaatgacgtacaaagatagcggaccagattgaactctccacaccggtgcattcgagagcgagcgttagctttagcccaccggcggcggccttgatcttttccgctatggcgctatggtcgagtcctcgctcgacaagcaccgtctggactgagggaacaagagttttagcaaagtccaatcgggattgggcgatactgttggcgagaaagaagcaggggttaaaaggcgggcgcagaaaggacaggcccaagagcagaggagtagagtgacttgctcggtgataacgataggacaggctccagcggcagcggcagcagctagactaacaagtccgataggtccagctccactggaacaatcgaccgaattgagtatcatgattagcacgtatactattgcatcaggcgactattggttgatgctcaccagatcaccacgggatcacccagcttcagattagctctttcgattccggcaagtgcgaccgccaaaggctccaacaacgctccttcctcccaggagatgctgtccgggatggcgtgcagccagttttcaggatgaaggtggtaccgagtgagcgttccgtggaaaggaggagttgaaaagaacacgacgtccggacagctgttgtatcggccagagacacatgcttcacctgtaaagtagaggaaagcggcttgagcgatgtcgttcccgatggggtgatgaagaaagagggtttcacaaggaagagagatcgactgacaaacttggcaaggcactccggcctcgatcgcaactctatctccgaccttccatttggtcacaccaggcccgagttctacgacttctccagctgactcgtgtccagatccacactagacgttcacaagggattgcaagattgcaatcagtggtgttctgtgtatgccgagtgtacagagagagcgcgcacaacgcgtacttacctcatcacagacaaccatggtcgctccgatctgtttgatcaaagacaatttgacggaaaagataagcatgattcaagacaagagcttgtacctagaacaaaaaaaaactgtggtcgctcacccggccgtgcttccaaaagtgtacatctattggagtgagtgatgcatgagtacgcgcaaaagattttggatcagttctctgtgagactaaagcggcctaagatcaatctagtaagaacgtaccagagccacagatcccggtagctctgacatggacgacgacttgacctggcccgggcgtggggtgaggctttctgaccatcctgatctgcttgtgctggttgtagcagcacgccaggtttgtctttccatcttgaggaacgtctgcaacatcttcgtagatcttgaattctgggtgttgaagaatcttggtgggatcatagagcttctgtgagaccgatgaagaacaaggagagatgtgaagaaagatggagaaagatgggcgatatgttagttgagattctgcagtgtgttgcctacatgagaagcgcggaaagcgcacagaacatacaaagttggtgggagccatggtgacggatttgtctgagatttcttctgagtggtgagagaggtgattgcttttcttgagctttcgaacaaacggatagagagatagagagagacgaaagagaaccacaagcaacgagctgggtcgtgagtttttaacgactttcctctgcggctccggaccgaagattccaccggccggggataaattctcaatcaggcaagtgtccgcgccgagcttggtctgtgttgtctatcttcctcctcctccttcaacatgagggctgggtcgatgtggtccactgtctgctgtgtgtctagatctacaagcgctgtatatggtcagaccagaagtcgaagggaaggacagagaggaagaatggcaaacatgcctgatgttggtgttgcgaggcgagaggaaggttaaaccttggatgtctcgagacttgtcatacatttctatctccaccttgatatccatcctctctgtacatcctccctcatcatgttgggcataacaacaaagagtaacgtgctccaagctatgttgtctgcagacaggtcttcgtctctacgaccgatcatcgatcagtacctaactgtcaagagaaactctacaggaagaacatggggtcaagcgtgtgataagattggagatctcgagttggcaagtccgagattgtttgtgacgatcctgtgccatagcaccctggcaactaacaggagtgtctcacccttctctagtatctactagaacctgacaatttgaaacaactcgtagcggttggtatttcggtgagagaacaaacttgcaagctgctgaatccatctcgagtccgccattgctgaccagacttgtccacgctcgatcaaacacagtatgaaagactgagtaacgaggtatggtctcgaccaggtcttctctgtctatgttctcaccgttcagatgtcttctgtatgctaaaagacttgcatgcattcctgtgctctgctcatagttcgtcgcgttccgaaagctcaacgggcttcctcgatcagaactcttcacccctcggttctctacacctctcactcaactttcggccatggagcgaggaagattacttggatataccagtagaagagtcgtgccacctccaacgaggaagccgaacatcctgcctgcgtaccaggagactgagaacaaggatgttccacctgaatatagcaaaggcgattgagctttagtatatcgacacaagccggtttgccacagacagcgagcactgttcatcacatagatcactcgtctggtacatcaaacacatgcagtccataggacacatcgctgcaatctttctcgttcgttcccagcccgatggatagaaaggcgatacctgtgcgatgattgacaacagcttctagattgtatgtaatggttttttgaagaacgcgcagaagacgaatgaaccaagcagaagaacaacgggcgtgtgtgatgaagatgagaacaccacattcccgatcgtcataggactgccgacagctcacacagatcgtcggactacatgccgagtgtcacactggacagaaagacagacggacagagagaaagaaggatgaaaaaaacacgttggcttgtcggacaaagctggatgaagtcgtcgctcgccatcgttcccagccctacttaccaaccaccaccaaccagcactaccatcacctgtagtgatcatggcgatggcagtctctagttcgacactcccgcctcatcagcagtctctgatccctctgtcgtctaggacatctgctgggtttatccgatatcttctccagaacatcatcaacgccctcaagagactgaatactcagacctccccttcggtcacgattcagaaactccagagacacagatggtctctccggaaagattacccatatgctattcaggcagctgtctgggtattcagtctctatgtcatggaggcacccaggtttcccttcaagctgatcatccccgtcgtctatgcgatcatcaccatggtccctatcctcggacagtttttctttccggcaacgccaatcttgacttgtttgtttttcttcctttctttctctactttgacgatagctcaatcttcgacgctcatcataggctcgatcgctcacccgttcttcctcctctactcgccttcttcgtagggttaatcctattctattcgtctcgatacattccagagaactggcgacctgccgtacacgtctccctcttgccgacgctggaatccgtcctctatggagcaaacatctcggatattctgactagattcacccatccggtgctcgacctcctcgcctggtttccctatggtgtcgtccatttcgtgattccctttgtcgtggccgctatagcgttcgtgttcggaccgagaggaagcatcaacttttggggcaaagcctttggttatatgaacatggctggcgtgatcatccagatcgtgtttccctgtgcacctccttgtaaggcctcgtgtggatatgttctcttctgagctctttgcacgtatgacacgttcttattttgacgcgacatccaatgttttccttcgttctccgtctggtggcttcagggtacgagctgatccatgggttgacgcccgcgaactattcgatggccggctcggctggaggactcgcccggattgaccatctctttgggggctctggctacactgaaacgttttcaaactcgcccatggtgttcggagcgttccccagtttgcatgctggttcagctaccatcgaggcattgttcctcactcactttttccctcggttcaagtcagtcgctctctgttcttgtcttccattttcaaaagcacagtccagctgacttgtgcgaacctctttctgtccttgaacttgtcatttcggactcatcgtttgttctattgttccagggtgttttactggatatacgtcgccgtgctctactgggcgacgatgtacctcacccaccactaccttatcgacgccgtcgctggcgcttgtctcgccaccttttgcttctactattggctcccagctgaacttcgagagtgggagaccggaggggtcggtcggtttgatgagtacagccttgtaaacagtaggtcttttcattttatactatctcctccttcttctgtttgtgtatatcggctgacctcccaccttccttgttcatctctattctcactaattcttgatactttgcgtttaaattttgtgtcccaaaaaaaaagaccttagagatgcaccttcatcaccttcaggctctcatcgatcgctagacgacgagatccgaaaactcgaagagggggatccttcacccgtcaatctttcccacgcgcactctcactcgcattctctttcccaaggcccaagccagggccaaggaggaacgatctcaagacctgcgtcgagaaacacgaacgtaggcggaactagctcggggtcaggaggtgcaaccgatggtggaccatcgagaaaaggaccggacggagagatctcctagaattctctgacgtgcgtgggagagacgaatctaattattttttaaaaccccccaaacagaactgatttcagaaagaaagaaaaacaaagaagtaaaccccaaaggaacaaaacatgatcgagagagaaagacaaggtatatagacaaagaaaagagtgaagaggtcggagaccaaggaacggagaaatcaagaaacaagtcattgggacatctggttctgtcaacttctattcttttttttttcgatttctcttcttcttcctttttattttcagcgtaaacacggttctctcccctatctttatcttagatatctatcctcccttttctttattctcttcacctctttttcttttccttcacttctccctctatctccctctcttgacgcttgatcataatcctctttgacgtgaatatgcctctcggtcaaatctcccgaccccaaaccaagataaagacaaagactgagccagcgacggcgacggtgacgttgacagtaattaagaaaaggggaatgaacaaaattccaggcaatcccgaagaaagcaaaggaaaacccaaacattctctctcgtgaaaccgcgatttgatttgattgaattagtcaagatgaaaagaagatagagaaagaatatcttgggggcagggaaaaaactcaaaaataagtaaatatgtgtagatgtagattgtaggttgtaggggggagagagagagagatggaaggaacgaggaatattcaaatgtgattgaaagagtgatttgatggggtgctatagggttattaaagtttttttttggtcacttgattagcaaaaggagaagagaaagagtgatgatcaatgtccacttgaaaggcaaccaagttgttgaggaagggacggaagaggcaagaggcaagaggatgtcttccggaatcgtcgtctcgcccttttttatacgcaaactgacatgaagctttttcaaaaaaaaaattatgcgagaagataaagagcacggaaaggaaagggcaggtgaagaaaaagggagtgccttaagaggaagaagcggcagcaacagtagaagcaggagcagcggcaacaacagtagaagcaggagcagcaggagcagcaggagcagcaggagcagcaggagcagcaggacccggattggcatcgaccgatacagacgcggaaggagtcgtacttggtacttcagacccaggcagaccatccgggtacaactctttcaacaatctgtcgactgtttggatggaatccaggtacagttatccatcagtcatcttcgaacccaggaagatgtgaaaagaaagaaaatgttaggtaaaacgacaacttacggcacgtcaacggtttttggtaaggaaacgattgagaagatctcatgctctcaaagatcggctgaagctcgatgacaagcttatctctctgggccggctcggcagttctgagcgcccgttgactgaagagaagaatcagaagaattcagaatatgaacagcaatgcgtaggtcaaagttctatttcgggagcttgactagcaacataatagacgtacaccacaaagttcccgtattggtctttcatcaacaagctcaacgagtttccaggtccgctcaccgagagctcgttgatcaaactctccctttcctctggtgaggcatggacgagcactttttcgcacacgtttgaagcaaacttatgtctggccactagatgtgttcaagacaagtcgcgcaaggacacaagaggggattgcaaaggacgtgaaaattctgtcaaaacccaaatgtctggaagacaagcagaagtaaggggagaaaaggctgagaacgaacactggacgatgtgacctttgaaattctgaacgatgtgtgtcttgtcctgaagcgaacctttctcaaggacgaactggacgacttagagtcggaaatgtaattcgaaaaagaatggaaaatttagaccgacgactgagaagaaagtactaaaaagtcaagaagaacagagaaaggaaattaggccgacgaaccatagtttccaaactggtcgcacgcgaggtcccgggtgtattggttcatctcgtccgccaacgtcctcacctggtcggccgggaggaattccaaacacttctggaatactctgcatccaaacggatgggaacacatgttgtagactgttctcaagaaagaacaaagaaggcaatacttagaacttggaaactgcatttgacgtgttaagagtgatatacgacagaccttgaccacggaaggcatcggccagattcaacccagagtttgggatactcgcaattcgctggatcacatgatttgcgttgctcgacttgacacaagtcaatatatgatcctctagttctgacacaagcgagaccgcctgagcttccgagatgtgatccagtgcctagaaagagaagaaagatcagatcaggtcaggtcagacaagacttgatctgtgaacatagaaatgatccgaacgagagactactgaccttttggaccgaacgacagccgtaagggtccagagagagtgtcaacatcgaccctcgcatcgtctcggccaacgtcgtcttctgagcgggtgttccgtattcgaaaaacttttggacaacctgaaagacagaacaaaattggtcagccggcgttgcgcggcgcatacacatttcacaatgcggtcttacatagtttccgaacactatcgacaagaaaacagacgtagagcgaaggatgagtgagagatgaatgactgagagagtgagagttttgagacaaaccatcggtctctaatgtgtagacgttggcgaggacctcttgaaacacggcttgcttgactgcctccaaggctgtttcgagtttgagctgtatgaacctcgagccgtattgatcctgggcaaactcggagatatgtccgacaatatcctgagaggaacggacaaacatgagaacatagttagacatagttgcaggggcggagaagaccgcatatcaaccgctcgcttacctcaagttcccagactttggttttatcctccctaaagtttaccaacaatctcgatctaggatccttggtctgggcatgttgccctccctgagcctgtccgccaattgattgtgtatgagcatgtgatgacggcgtcggcggtgtccttccggcgttagtattccggttttgtctgccacttcgttttgagccaaacgagttggctccggcgcctgaggattgaagctggatagggatcatctcgactgctgatgcatcatgtggaaatctgctatgtaagagagggggcagtggtggtggaagcggaatcgatgacccaaatggtggaaacgatgaggtcatcaacggggacgaaggaaagccggcgtttcgagagttggacggatgataagccaacccaggagacaacggagaggacatgaagccaggctgttgctgtgcagaaaacctccgaggctgagaaagattggaaatgtgagaatagcagatcagatgataggaaagagaggtctggattaaagacaaagatttagacatacccctccgttctttcctagagggatcccgctcgagagtcttctcgaaggtagttgtccgtgttgagagattggacttccagacatccagaaaccggaaggaccctgtggttgttcaaatgtagagtaaggagcaagtcccaacgctccgccgagtgtaccggtgcccatcaatggcggaaaggttgacgtccagtcaattcctgccggtccgttattggcgccggggccaccgacaccagctccaactccagcggccgagcctgcgttcccgacgtttcctccgttggaccccatgagggaggacccgtagcggaaaccgtcaggggtagaaggtgaggggtgcatgtacgggaagtagggcgacatcgggctgggatacgggtgatctagctcggacgtcgagagcagaggggaaggatagtagacatagtctgggataaagaatgctggttgatttgtcgggatggaggattgacgggaagatcggtcataagacatgtcagggaccctgtcaagaaagtccatgtgtggtgcaattgagagcgctggttttgtgtttgacgttgtgtttgcatcagcagagggtgtaggttgagaggatgagagggaagcgtaagataccggggccggatctagtgtggatggaggcggagaccgagaggattcaaagtaaggaggcccagtagagttctccattgtctgtcgaggtttggaggacaaaggaagagagcgttaagttgaggatgtgaaagagctgtcagacgggagacaggtcactcaccatcggagggagagcatcgtaaagactggacgtggaccaggcctgcagatccaaggtcgagtcgtcagatcagcatagttacggtcaaagaaggaagacgaagaacagattttgttggatatagagcgaagggacattcacgaaccaggccatcatcttcgatctcttgagatggttgagtacgctggacgctacggctgcttttaggacttggtttgttcatgctagaacctcggaggcggaatcagtcagagctggataaatgcggaagtgggggggagagagagagagagggaacggaagtcatacctacacgatacgagcgatcgaataattagggaattaaggagagcgatcggacgttaatcttccagggtactcctatgagatagatccaaaggtgaaagtagagatcatgagggaagaagaaacagggagagaggtaaagagatagagacaaaggtctagggttgttagcaaatttgccaagagaccgaaaggagtgattgggtgcaacatggtgtggggtctcgactcggaagattccgttggctgttgcatttgaaattcgttgggtcaaacacactcactgagatgaatgcgctggaacaatataaagtttcgtaagattttttttttgtattcgttatttgtcttctccgttgttttgtcttttgagagggagaaaagcggaaaggttcgacggggattgatagagaaagtgattttcaggtaacagcgccggtcggatggtttgtatgaacaggatcaggagtgggacccaagagttatggacggcgggagagatggaccgaagaattatcgagaccgatcgagagaaaagaggatgccgggaaggaaaggagaagaagaacaacaaaagacagagatctatgatgagaatgagactggaagagatcgaaacagagattgacggacgcacggatgatgtgagagaaaacgagccgaggccgaggtgcagggtatttttcggagaaggatttgactggttcaaggaagatgagttgtcaagaagagaagggttctttcgtgtttgttcccgctatcttgatgactctgtacaaggagagagaaggaacaaaaagagtccgcaagatccgaagagatggggagagagagaaaagggaaagagaaagggaaaggaaaagagagaccaagggtaacgacagatcgtgttcttgcttcttggatcgtttctgccttttcttgttattctctggcgagtgtgagatgaccgattgggtgggattcaccaaagaaagagacgaagaaggaagagagagagagcgggtagaaaggatgttcggcagttgaatcgaagatcgaccgtccaattctcatacgaccaaggcggataagactgagttaagaagaaagagtgatggtgtaggtgtgagcgaacggttccttacttggagagacctcagcctgtatcctcctggttttttttctcgttgactcgatgacgaacaagaaaggaagaaaagaaaagaaaaaaaggattgggagagatccaaaagtagatgggaaatgatgccaaagagtgaacgacaacaaagggaggaagaggaaacaacgaaacccacgcgggttttctgggcacagggatgaccaaccgaactgtccccaatcacccgagaggagatgaagaatcaaatagatacacagtctctttctctttttgaaacggtgggggcacgctctcttttcttttctgttctttccttttctcttcctttttctggggtagatctgctcgtctcgtttgggtcaagtgggatagacagatgggtgggttatctgttcacgatgtgcctgacaagagaggcagtgaccgaagaagaagaaaaagagctcgccggccgatggagagcgaacgacaagatgatggagaagatgatttgtttaccttttgtgtacggtaatctctctttcgctctccgtcgagaagggaacacgaacaagtttagaaggaaacactctctcaacaacaacagtctcgaccgcaaatgatgccttgtttaaatgagacgaagacgagagagtgcatgtatgtagcagaaggaagaagggaagaaacggaagaacccagaagaaaagatcgcccgacggatcagccgcgagtgtttcttcgcaccccggtcagagacatctcctttcgacgcttaacatggtctctttcctatgctccacgctttcttctttacttctcatactctattggacgatcctcgctcgcgctctcgctcgattggtaaactgtacggacagcatacacaccggatgaaaagagaacaagacgaatgaaaaatgaaaatacgaaaaatcatttagagccggcacgacgagtgcaaatgaatgacgacaggcacacacacgtccgacgacgacattgtgccgtgctttcactcttctgccccatctattcgtccgttcacaatctgtgtcaaactgagttacatgctgtcttgctttgttcttttttcccttggatgtatgtgactctgtgtgagcaccagagaagaacaaacgtatgagggtggccataagaaatcacagtatcgtcctagagaagaagacgaaagaagaaagaggtagaggcataatcacgccacgttcgatcgctcggcctcgagaaaacaagccacacggtccaaactcgttcctggctgacctaatttggcaccggacgagggcggtcgggagccaaggccaagatggaccaaaatactggaatttgacccggcacctagatccggatgcgatggcaattctctgttgcttcagcgcgctcgacgtcgttactgatgacgtcagtggcttgccaaaagcccattcagattcgacaggaacggaagacgtcgactaaatatttccaatcgaaatgtaaaagacgcacagatcgcgtgtcacccgcgcggtgaacgaagagatctccttcgtctgtaccggaacttttgcgtgctcggccgccgatgggagaaatgaaaaagaaggaaaatagaaagacaaaaaccaggaaactttaattcccccttcggcaaagtgcctgagtgaacgaatctccgctatcacccacacgtgattcgcttaacttatcgctcaggaaaacagttcgagtcgggattctttggctctgtcgagtgatactagtatgtgcatcgatcgaacacaatcgtctgctggaggcccagaacgtgtgcaagatacaacaaaacaagccgatacgatacaaaatacaacatgatacaatgcaatacaatataatacaatataatataatacagtac

SEQ ID NO: 558 - DNA, 53177 bp, Xanthophyllomyces dendrorhous
atataatacagtacaacataacacagcatgttgtattcagtatttattggaataagaaggtgaaaatgggctttttatcctggcacttgttccccaataaagccctcagtggttttataaaagcatctgcacactacccatgtgtttcagtcaaatcggataagaaacccaaagaaaacgtaggagaaccagccagaaattctgttgctcttcggagagaaactcttgggatttcgcgcaaaaggaaatctgagggtgttgcctcaagacaagataacaaattacagctcaaattttgtcaagactgttgaaatttcaatacgttacacaataagaatataaccagttgcatccctcccgtgttctgaacccgagtctgcacgcaagtaagcccagccgggctaaacaatatacaatgaacgttcaaatgaaaaaaaaacctctacttgccttgctgtcgcgatcctacgcaacatcattctcttggctctcactctttccgcaaactgtcgtgaaaatagagaagagactcgtaaagatcaaagaaaatcatagatcgtcgtctagaaagatagggtaaaggtaatgagaaaacaatggtggggtatacgacacactaaacacactaaacacacccaagacgcgctaaactggatcagaaagcaaaagctggaaggtgaaaaatctatttgttggagttaaagaaccagctggcacgtttctgactagcactcccgctcccgcttccgccgccgctctcatcctgtactctcgatagaggagatccagagaagccggtctgcgccgaaccgcctctgacaaagcctgctcctcctagtatcgggcctcccagattcactccgccaccgccgcctcctacagggacagggttaaggagacatcaatgtcaacgatcaagttctaccctactttctcaattgatataaaggaatcaactcacctcgaatcggtttagcaattcggccacctgcgagcgctggcatcgccgaggcttgagctgtagagaagaacgaaaagagggaagggagggaaaagacacatcagctgatcagaaacgttgaacgaacaaaattcaaaactagacctctgaactcacactttagaacctcgattcgatcgcgcagaaccctcagttgttgttcatgttttaagttctcctgcacaagcttccgatcggcttcctgcagaagttgttctagactggtcatccgctcatttcgggcaatcaactttctctcagcctgagcggcctccttcttcatcgccgtgttctggtcgaccaactgtttctgaacgagtgccagctggtccaggtttcgttccaagaatgccatcttcttttgttggttcttagagttcgcagccttgatcacagtgttgtagtgctcccgaagttcatccaactggatctccaactcgactaccttctcgcaccggttctgaagatccttcatcagacttcgtttggatccctcaaagtcggccaattgaagcgcaatcgcctttcgagttctctctaaatctcgagcgctttcagagagcgccttgcctccttcgatcccagcagccgataccgcaaacgctctctacaaaggggagtagaatcgagtgaaagggggaaagaaacgttgtcagtattatctttcggcaaggagtctatctctgaaacataccttcagttcctcgttcacgccctttagattatcaatcgttatcgattggttcttgacctcctgactcttggaatctatctgttgcttcaggttagcgatctcgcctgcctgagcgtcccgcttggccgcgtactgggcctctagtttagactatacgtcagagaacaggcagacagaaactcagagtccgtttaggctattcatccagaaaatgttagatggaaaagaacgaactttgagttccgacatgttctcagccacatctgcactactcgcttcctcctctcggatcgttcgttctatatatgcacaagtatgatatcgtagcaaacggatatagaaaacgggaggtcaggctagctcaaagaagagacgcgactggcaaacactatcgttgaagcaaagaggagaagaactaaccgagaagctcctcgtactcgacttcgagtgtctccaaccgctgctcgagttcctcccgccgcttgttaagctgctcggtctcctcctcagatcgtctcagacgatcatgtgaatcccggagaagaacctgtcgttcggataactgtcggtgaaggatcgtgatgtcttcggctgtaagcgcagttgatgggtcgtccgggtcgacggcattcagtttggccagtgtctctcggacagcgtcttccttctcagaaagagtaccctcctgatacgtagataacagagatcagtatccttctgtcatcctggcttctgatagaaggaacacagacataccacatcgaacttggccatcatcgccgccatcttttcggccttcttccgctccttttcttcggcgaccgcatcctttgccgtcaccttgagcgcttccacctgcttccttagatcctcaatttctcgttcgttttcctcaatctgctcctttagcgcatcgagctgaatcgcggcctccttgttttcgtactccagtcgttctttcaacagtcggagttcactcaactcggacgagtggaccttgagttcctgcttgggggagaagaaaagagggaaggagaatcatatgtagatgaatggcaatgagtgcgctgagactgagagcggatcgaagcgaaaatattgagtcagctcacattcgacgttgtagactcttgttccttcatgattgaaagctcatctcggagttccttgagtaacttttcttgagcagacagagccgattcctaaccaatcccaccaagtttagaacatcatcagtctgagttcacaaccgaggaaagtttacattgacaagctcagatggggacaaactttttctgccagttgatcgctcagctcgccctctcgcttcaagaatccttctctttcgtccttgtccaagatcccacttccaggcgtcgtgggcctactcgataggtctttcagaccgtccatcatcgggcttaccggtgtcggccccctacttgtgtaagctgatgaaccggctcccaacgaagatggcgtttgcggaagactagacccaacggcgggtgccgccccagactcgtttgccgaagtccaagccgatcggtcgaccgactcaccgtttctccacttgacgagctcgtgctccagccttgagatatattctcttgaccgtttgagctcaatcttgagttcaggtagagagagctctttgttcactctggcctgattcttgatgctctttgcccgcattccgaaccgaagagttgatagtgtctcagcttcattgtaagacgccggagaacagttgatgatcagcgtcgttcgagagtttcctcctagagattcctgcaaaattcgggtcaactttgattctcgatagggaatgtagtttgactgttgggtgttttagaagaatagtaaaatcacatctgtaagcgtagagtacggaggcatatatctcgaaagatagattgaaacgaacctttccgtcggtaagagcgttgattagattacccaatgccgagagtgacttgttgatcttcttagcttcctccaatgtctgtccggtagctccagtctttccgatctagatacagcattcaagatacaagatcagtcggccgtactcttactctacgtctgcatctaaaagagcaaagttctcctaccttttctgaaccagccaagtcgacgagatacagatgtccggcttttgcctctccggtatccagattgcgttgagagatcgaaatgacaaagatcgaatgggaacgtgacgattcagcgttcatatctatagatgaaaaggttggtaaaggcaaagttaaacatcatttctatgtagaagacaagatctttaacgattgacgtactagtagacctcacaaccctagaactctgtccttgtcgcatgatctgaaatacctcgccagcatccgagacgttgtattgagtcagacccttgacatagacacctctggacttttcttcatggacctgcagattgtcgttttgagctgcgccataagaaatcccaagagcgatatggtttgaatgagctacatgactgattgaaatccacactgtgagaagaacgtacgagccagcaaatccctgatcttctccatgtagatttccatgtagctaactttgaccatgtactcgatgttcgccgacgcacgggagatatcgttaaaaaattgctccacaatacggggggtgatacccttgagttcctcattatctatatcggctccctggaaacgacaaagtagacatgagccaggtcagagacgttgagacatgaagttggtttatgcaacacataccatcattgtgaacgttttacctgaagcgcatatatgcatggtagtcagccccgggttgtttttctttgcaacagatcagctcagtatacgctttgacttaccagatccagtttgaccgtacgagaagacagttccgttgtagccgttcatgacatcttgatgacggtcggttttgtatcatgtcagtaactttcatttgagttcaaggcaagtagacagatggaaacaacaaaccttggacgatttcctggactccatactcgtaaatctcaacttgccgggatacaagatcgaatgaacgatcaaaggtgaagccgtcctgtagtattgatatacgagacgttggagggatgaatgagggttataaagatgcatctgactgagagtatctgattcgaacagcccccgaagccgtaaaacgaaccttctccgcacctgcaagggcaacgttatcacccttgagactgacagtcttgaggttctcatcaaagtcaacgaccactttagaattttctctgatctcgatcgagttcagtggtcggaaactgagtagaaagaaattgagagatcaagaaagtatgaggttctgtttgggtctgtatctgttcgggctgtcctctatctccctcccttctgggacctaaccttcacgctcggctgaggtgactcctctgtccaagaaacacggttctattccgggagaatcagagacaaaaccacataccgacatatgactttgatgttgttagatgccatgacggaagaaaaaagactgtatctaaaaagcgcaatgtgtctactgttcggttaatatatgaaccagaaggtgcgagcggacgagtctatctgggctgctagtcggccgtctgaggataatctttcggattacataggaagggaatcaagacagaatgtcgatatatcagtttttcctctaacaccttcctctttaaaccaatgagctcactagacggtaacgatgactgcttgtagagaacgataaagaagcggcccactctctctctctctgacaaaacgacgatgggtgtctgtttgtttcctagggcaggaggtgtgatgggtaaggatggggagccagagggaacgcggtacaacaacatcacgtgcaagttgccacatcacatggttacagccctacgtaatttaaatttaaatttcatcttatttttgaaagattctctatagcggcagacgatccgataccaaaaatcccattgcttgcacatccactctgcttccttctcctgctcgctctttcaccacagacacgttctattgtacatacaggccatctgtgttaactgttcgctggtacgatgtcaactccagattctttcgcagcgctgcctgaaccggatgtcgtgtatcgagcgagatcaggtatcggtcagaaacgaccgaggtcgtcagattcttcagccatagaaagtcctgttcctcgtcgaaccaagagtgtgggtgcagacccgaaaggaaataacaggcagctactagcaaagtcatccttttcaaatggatcatcaaatggaaaagacgacagctggaagggagatatgtttcgaaagtttgtcaggaaagcattggtggatatggagaacgtatgttctccactccttggaattttttcctgaaacctctctcgccttgaacgacattctgaccagagcttcgttcgttcgttttgttcgtccgtttgtcctgttcatgtctcctagggtgactcgaccacctacgatgatctcctctctcagcttcggcccgttatcactcggcgttcccagtttcccgacccggatggcgaacctctcctcaagacgtctctaatccacccgctcctagtcgctctgacatcgaatgcttcccttctcagctcaacacacaagtcattgatcgaggccatcattcactttccttggatgacggctaatgatacgtttgtcaaaagttacatcatcctagtcggggtcatagcaaacttgagaatggagtatgtaggcgaattggtcaagaggtgtatcaagggtttcaaatatcgtttgtcttctttccacttgttgtgttcatgaccccgcgaaacaggcgcctaactgtgtactcatcatcggtaatgcttctgtcgtgcgctcaacagaggctcaatttagaaatctcgtcgatcgagagaccgagtcgaacaatctgactagaggaaaggtctttgagcgcttgcatacgcttcttactcatctgatttcacttatccccacccttcccggagtaatccagcctatcttagtcaagtcgttcccccacaaacgggagccgaagatcgctcatctgacatacatccgaaatgcgctccgagtggtcgaatactgtcctgttctgggagataggatcctagcagccgtggttgacagggccattcaaattgacgtatgtgttttcttctgccatgcacatacacgcatatataatttttcctaatcctctttcgacttggaatgtcgctcgattgattttttcaactcgatccaggtggagatccaggtggaatgggacgatatggacgaggatgccgacggagaagaaggcaacgaggatggtcaatctgatgctgaatctgacaccgatccatttgataggttgctcgcagacgaagtagacgatgaggaaccgtctgatgatgaggattcagattttggaggtggtgattcgtctgatgaatctgacgacgaggccccccctgtcacagagaatctctctctcgaagctaaacgagagcgggtcaaggttattaaagagatggtctcaaagctagatgtgattttgaatacgactttcgagcacttcaacaaactccagaaagctacagatccaaactattgggttcaaacgtctgcttccaacagtttgagcggcgtggatcctgtgattgggacgttagtcgaccccgctttggcgcttggcctgcagactagtgttccaactccaaccgggaccaacccgttcgatcggatcacttccttccctttccctcctacgcctgcggcgtctcgtccttctagtccatccgagatcgaacgcaatcgtacgcttcggctgtctcaatttcactcgttgctgtccatctttgatgggcatattcttaaaacattcaaatctcggtacacccagttcctcctcttttggtacacttcgcttgacgcagacttcaccgacgagtttcaagggcttctcgtgtctaaagcacttttcgagaaagatcagccggatgtcatccgaaaagcggccgcgtcctacattggttctttcgtcagccgagccaagtgggtcgatggtgttagtgtgagaaatgtggtaaaactgttatgccaatacctggaagctcagatggagaccgcaaagttatacccagagctattgtacggaacatcctccagcagtggcgttgggggaggaggaagttcccagaaaggatctatcggaggcgtaaacgggcagggtgggctcggtgtgttttatgccgttgcccagtcggtcttcctcattttctgcttcaggtggaaggatctggttggcgagggggatgagccaccgagacctgatgaggaggacgtactggacatggaaggagatcttggggaagagagaagaacaacaggttgggcaccgggtttggacgtcctgcagaaagtggtctccagtccattcaacccgttgaaggtacgtcttcgttttttcactgctccttatcagcttgttctgcgaagatagatgctttagacccttgacgaacgaactctctttttttccttgatttctgaaactcatatcaacaggtgtgctctcccaacgttgtcaagcaatttgctctcgtagccaatcagacccgattcctttacgtataccatatcattcaagcgaacaaccgatcatcctcttctgcctccgtggacgtctcactgccaagcccttccgtcgagcaagctcagttcctttccgcgggtaaagcgaatgtgccgatccctcatctccgagactggcaacactctacgatggaagaagccgacctcgactcattctttcctttcgatccctataacctacccattagttcaactttcatagacgggatttaccgggattgggagggcatgtctgatgaggatgatgatggttcggatgatgatgacgacgacgacgactcagaggacgaagatggggacatctccattcctgacgcggtcgagagtagtgagagtgactctgaggacgaactaactagacgagagttgggcagcagcatccctgagtccaaggacaaggtctctcggttgacatcgaaatcgattgaaggtcgtcgtcccatcaagtttggctctggagggttgtcggtcagcgcggacgatcaagaaatcaacctgttgggcaaaagtttcgatggcggaatgagtatcagtccggcttttgcgaatgggctcgctggaaggatgcaacaacatcaggaagctcggtcgtagacacatggcaacctttccttctttttctctcctttattcgttcgaacgcaatattcgtctcctacttattaccatttcggacttggagggcgttctcagcgtaatcactattcacacactttatcattcctccctgcttacttctctcggattcagttgtattattattctgtcaatctcttcgatctgtcatccttcgtaccacactcgcatctcctttcctcctttgtattaccatcatattcatcccatcccactggttcttgagcattaatcattcttgtctcgcctactacactctcacagctgttcgatcggtagcgtatctatatatccgcttggttttccttgggtggcattgttatgtttatgcatcgcatgcatctgtattcgtgccagtcttcgaggttttgaaaattaaggcgaagcattacattcatcagggtcattataaacaggagaaacaaagaaagagagaattggaagaaagctctaaagatatgtctgaatatgttgttgccttcattttttttatcgaaaattcagctgttaaaacgatctcatcgagtgttcatcagatacactgagccgatcatcgaaagaaaagatccaaaggcatggaggacgaatactggcttactttaagtaggaacatcagaatgttcataagtacatgcgcgctggctacgcctacaagttcgaacggagaacatggcccatactgtcagtctatcaaattttcccgattccaaggtggtataatggtgtttggatctgagggagtgggaacgagaaaggttttgacctaaggcgaaggagaggaacagactaacagcaagcaggtacgagatctggataatcgcgcatgacgtctagaccaacaccatttatgtccatcgagaacccccatcgacaaattgcattagtagtaactgatgtgatgatttccgaggcctaacatcgcgtcaaccataggtgcaagaagcaaacgtacgaagccgtgtttgaagaaagacgcgaaagatgagcaaacaagttaacttgaggaaactttaactaagaagaagagagatgcattacccagatagcagaactggctgtgaacgttaaactaaaagtgtaatcatcgtcttggaacaggataaagatcaagtttgagcaaagaaaaaagatgagcaagttactgagtgtggaaaaagtctctgtgatagagcagggcagaaatagcgtaccggcattcccgaacttgaagaatggatagacaacagagttgggcccgctggatgaagatgatattttgatgagtttgaagaatatctcatcactggaatatatatgcacagaagagaaaaggtgctcactagtgaaggatggcagcatatcctcttggtgtgagaagaaagcgcgaaagagacaaaaattgagtcaaactaagatcttcaagatctcgtgacaaccagatggttttagaaagagcatacaagaaggcgaccatcgaaacctacacaatcaggtagcgtagcaaaagcttgtcagttctttgaaatatgcgttgagaagaacagatagaactactcacattctgcgcgacagatttagcatggagtcctggacgaattgttggttttgttcaagttgttcgaatcagaaaactcgaaaattgaagagatatcatctaagagaatgtcagaagcgaagaaaatgtagaccaaccaattgctagactttctctatgctccggcagactcttgtcatatcctcttatgaacactaggaacctatgaaagactgccgacatttgaagaggatagaggatgatgttgaccagcctgtaagaacgttaattaacatcaagatggtgttgaacatttcacgatggtcgtgaaagaaggaagagaatcccttacgtgctaacgaattgaacaagaatgacttttaaatgagaagtatgttgttagaaaagtgtcaagctgttatctgccaactatgacagatgcttgaaacaaagatacagaaagtctcacagtcggcttgttggacacacacacacacacacacacatgtttaatcggattgttaattggcgtcagcattgttttcacagaatagaacgacacggtaaattcaagtatgagagaacgcacacaaagatctcattctagcgaacaaattacgatactgaagtattccgtgattgatattgataagatatcagcttggtcgtctttctagcctctttactaaaaccaagacgtacgaaaacgaagctaaagaaggaacgatgattgatgagctgatcgagtctacaacgataaaggattatataagataggtatctaggatgagaagactcactaaactaaggctgaaaaatatcggaagagatacagcagtcctctacttcgaacttttcgctcgagaatggaagtggatacaattcctagacactgttgatagaacggaagaaagagaatatggagaatggttgtgtttgtcagagagcaaattttaggagtttcgagtacaaaagaagaggctcactgtagttgttcctacccactgcatacacaaatcgaaataagactgtgaggcccccgactgcaggcaaaaattgaggtatgtatatacgtacagagtaaacccacatggcagcatccaaactcgtatggggcagggtactcaggtatactgaggtataagctattagtaaatcctcaaactagtcagtcttctgtgtacaaaccaaggcgagacaagagcgcgaaatgcccgtattatatatacaaaccttgtccagcgatgagtgcgaacatggcgatccccaaaacggccatgaaccatagaaaacgaagataagacgcagggattcggccggtcaattggcgttcaagaaaagttcgctgatgaggggtgagggattttcggtattgatgtctctgatattattcgcagtagaggtaatgaagaagatattttaggaggttactgaatgtgcgcttgttctgtagataaaccagagtagactctcaaaccttgtcgcgcttcagtacagaaaagcatacaatagctcttttcaggagaacgtgaacaacaccgatagagaagagagagaaactcagcaagaaagtaccatgaccaaagcaaaggtcgtaagtgtgaagaagactaacgggcagcccattgtagcaaacgttagtacgatccagaaggctgagtaggcgtattgacaagcaaaacaagttttggatctcttcttcagcccaaattcatgatactaaggaaatgtaagtttgttctttcaaatggaagaactaactttttcgttcccagtcgagcccgccagcttgatcggacccctctctacctagaaacttcttgattctaccaacgagatcaaagtgatgtgatgaccaaccgatgcacaaagctgtagcccagaagaagaaataggatgccttcccaccgattctcctattccgaccagaggagaaactcattagcaggaatatgaaccagactatgataaccgaccaaagaagatgtaagttgaaagaatgagattgattacttacttgggccaccagttgagcctatagagatcgaatagcttcgtcatgaacaacaaggcgacatgaaggtacactagattttatatcacagagagcgcaatacatataggttaagaaagacgggtaggaagacggacccctcgcttgaggacagaagtcagaataacttaacaacaacatgaaactcacgtccataatagaagaacaggaagaagaagaagttgacatccaaaggaagttgctccagttggccctctgggttcgttccgtttgacgcagttgtcgtgagtgcgctctcttgtgtaagggagaaaagtaaagacgtgaagttcctcgaaggtatggacacagaaggtgccgaggaccaaggtgtccgaggccagtgaaagcctagttcaggtttatatctttatggaaaggggaaatacaaacaattggcatcatatcagacatcaggatcagttgggtcatgtacttgtcagaaacgatgcgacgacaagcacgcagaaggaaacctacgggtcagctacaggaaaaggggtcgctacccagagccagacgacgcaacatgggacgagtactaatatcgaccatcgtttccaccaggttccgagccaagactccaccctgcttctgctcggcttggtgaatgagaagaaatcaagatgtcagaaatcgtggtcagggtgtttggatggatcactatatgtttacgatacttggctgaaagatgcttactctcatgagcgagtaccaccagcccttttccgctgcacccggctcgcttatactgactcctctttctcttctttgcttcatttgggctctaactcctggctgagtaaagcgttgatgtggtccctgagtcgtggaacgaccgttcgagctggaagagcctggtttcgaatgctgaactcggtcgcctatgtctaacgagctcgagaattgagctggacctcgcagcttcgagggagatgcctttacatgggctttctgatgatcggaacataacacataaaaaatcaactgagaataaagctcgtttgatgctgagaggatgaggctaaaaacctacgaatctgccggcagtgtatcgatcagctagagtggtccaatgtgtattggccaagggaagaacgccagttcagacagagacgatcattttgattctaccgttgcttgccagtgatagaacgaaaggaacacagacctcgttgagattcatccccattaccactcgagaagggtacgaacatgatgagctctcaggaatgaccgacttgtctggacggtgtatgttgtgttgttactgagagttcactttcagctcgggacgaaacttcgggtaaaccctacggcgacattctacacatcaaccaccatcaatcagttacggacgacggtctactagccatgtcctcgcccgtttcagacaagatcgacacattcctcaggccgctaattgcctccaagcagccatattctcacaggccattcgtcactctcacttatgctcagtcgttggatggcaagatcgccgggccggatggccagcaggttcagatcagtggacgcgaaagctcagagctcacccatcggttcgtctgctcaggttgccttttatctgtctcttctacaggtaggcaatgctatctcatatttgatagcgctaatgttctatccttcctcttggaatgccaatacagattgagatcaatgcacagcggtatcatggttgggattgagaccgtcctaaacgacgacccacagctcacaggtatgtctgttgatgatttttgggctgttttcttctatttttattctttcatgtaggttgacctagtcattcttctgcgtatcttcaccaaatgtgtatcatcgcttcatctggctacagctcgatttgtgccgaatccatccgaggtatctcagcctattcctgtcattttggacgctcgctgtcgattcccgctgtcctctcggttgatgaagaattacaaagccggcgttggaaaacgaccttggatcgtatgtgattctgggatgagtctggctaagagacgaatcgagctagaggatgctgggtgtcgaatcctggtcatgcctacaaagggaactggttcgtctcttttctctgtatctcaaagtcaaacattcgtgctctcacaccttttcgtatcttctgcttaaaacaaaattaggccgatttgacctgcttccgcttctggacagactgaatacgtcaatgattactcatttaatgatcgaaggtggagcccgagttatctcaagcttcttgaatactcctaagaatacccttgacttggtggtcgtcaccgttgctccggtcttaatcggaaaaggaggtgtcgaaatcgtgaacgtgagcctctatgtttcgcctctgtgtttgaacgaattcggttctggcaaactttgcttgttgtatccttctgcggaattatcttgacttactctatccttctgatgtatgtctttgaacaaataggaaaactcgaccccttctccagagttgctttctctcggaacagagactttcggcaaagatgtggtgtttgcttgtaaagtccgacacagagactggaagttctcgtagaggcctcttgacagtgctcgtgttgggatctcatctactccaattcaatcatctaccatcactcttcctttctcttcctacacatctcgtttctctagtcgtcctttctcctcttaatctgtttgctctgttgttggctctagaaaatgctttccttcattttcggaatagataagaacatgcttctgtcggtcttgactgggtttatttttttattttgtattttgaagaaaaagaatgtcttccattctgtgatgggctggaggtaaaacatatatagactattcttcttttatacggagctttagctcttccatcttcttcaaacatgatgtcgcgcacaggttgataaaggaataaatgatactgggcaaacttcatcaagccattcgctcggtcgaatattgttgaagagactctatgaaactcgccagatcttcctttcggacctcgacgacagacgtatcgaacttgtcatgtttggcagcagcagccgaatcagaggctgcgtcttggaaggctagaccgaatttactatcaacatcaagaagttgaagaacgggagatcagttatgctgagacaagggaagaggtagaacgggaaaaggagaacccaggtatgtagtcttgttctttatcctcctaagaacacttactttttacgaacgtctccaaattcaggcgcgcccgtcacacccaccacgacatacgttcctgcgctctcatctagacaggccagaactacaggcagactcttcgatctcctcttcccttcttcgcttcttccgccaatcgaactcatgcctgccagtcgatctctcaatgcgtctaccaaccagagcgctagtcgagagagtgtcgagggattgacaaatagggagagatcgggtccctcggtaattactgctaaacggaaccatcgaagggatacaatcttggacttgtcgatgagagcagaaccttgtcggatgatagctttctggagtgacatgcataaagggagggaggcatgtaggagtgtaacacttgatgaaaagacacaggaacaaggggtagaaagatcagctactttgctgaacgaatggtgcttatgtaccgaagggcattatacagtacgatgaaggtcttactctccacctgatcgaagcgcgtcgaacgagctccagaaacacttctcccaagcgcgctcatctttctttctctttcgctctccgttcgtttcctcctctttgtcttcatcttcgtctttatcttcagcctctatctctgccgtctttttccctagaccattagcatctaaactccaaattctagagcttccgaaccactctccaccacctttacttccctccacttcaacctctacacggactcctactgctgcttccaaaagtgcgcctacactctcgacggcgtcggctgctgataacggaagagaccggaaaccgtacgttcgagtgaaggatggataagtaagttcgacaaggccgtattcaggcgcgatagaatccattcgggcgaaaagattacgcttgagacttatgtccatatttgtatacgcctggtggcattgggctaacgagaacctgttttgaaaagatgaaagaagacccaacaaatctgtaattagacctacagaacagaaagaaagaaataaaataaaaacgaataggtatataagacaaaccccatcttggctagcattccttgcagccgacccttccctttctccctccatatgcccatcttactggccacgtaacccgaatgaaacatcgagtcgtataagttccaatgtctatacatcatgaatctcaattcttcactcggacgaattgcgtgatcgtccggattggctagcgtggatgaaatagcaggttctgctgaggcatgaccattgcgcgaagtaggagcagggactgtcggtaggttcaatctggcaacttcgtcagtgtagagggtgtgaagaacgtcatatctgtctcggtcaatccgggtggcgatatattgatgcgtgaggcctaaaatagcgagcctgttcgtaccatgatgtttccgtcagccgattcgagaagagacagatcgttgagtcaaaacacttgtgtcttatcaaaagtataaagcagaaacagaaggtacataccaaaggaggtcgttgtcctctctgcccagggcagaagcaagcatataaactgtggcggcgacgctttgaccgaaatgtgttccagcctggtagtacctgttgatagtgatcgcgtgggcgcgccttttagaccgactgagtggtttgggctgatgtgatgatagggcaggtatgttttggtaagaacagtttcagatctgtctgttggggaaaaaagtaagaatgaaagatgatcatgatatgaacatgaacgaacctggccgctttcatctatctttcgacgacggcgtggaggttgaccttcttcgtcttccgagttactgtcttcatcgctccggtcatccctatcggtattatcttcttcagatgattcttcagggtccaggtcagaatcgtcgtcagagtcagagtctgattctggttcgtactatcaagaccgagtccaaatagtatctaacgtcagtttgatttaaagacgaaggttggccaagatggttgacttacctctaatgcttcaaatgcttttcgctctttttcccatcgttttccaccctgagcaatatcttgatcaaaatcagcgccctcatcgccccagacccacaccctctctctaccttcgatcccaccaccaaacaggttttccagattccatggtcgatgagcatcgagcacatgtagatgaacgttttgattgagcctcgttaaaaagtgggatgataacggaaggagcgagcctagggagagtaaaacgagcgtgtggagttcagaattggtttcaagagactgggttcgggtttcaagatcggcgtagccttcgacggggaagattcggtgaggaatcgagtctgaggtaagaagtgtggtaaacattctttgtaaatggagatccagtgagggaaaccccgacaagtttcgaaaggtaagcgctaacgactggttgaacgaagagagacagagagacagagaagagaacggtttctattctgacctggcaccacacacaccatcgacatcgttcgccaccatgatcactagtccattcccaccgccctgaccttgagcgatagcttttctagagcgagcgacgatctgggcgtaagcttgagggtaagaaggtgatagctcatccgagtaggccgagggaataggaagcacgggcatttgaatgcggatatttcttcttcctgttttcttctcttcccagatacctgtgtctggttcaaaggaggagtaaaagcaagaaggacgctgatgagagacttgggtagacacaagttcaaagagtcttttctttgctctcgctcgtttagttggatgatgtacgttggtcgtttgtttgtcagagttagggttaatttagatgacgcgtttcgttcggacgcgtttgaccacaaacgacgcgtcttagcatagactcgcacggcacgtatgacgaatgatgcacctgaagtgtagcaagggagaaaggacgatggtctcaagaggagaacgattgtgagtcaggtctatagtttgtccatacgcgatgctgatactaaggtgtcaagcctaaacagacacttgaaatcctatctttgcatgtttgtatggtggtttgattgaacggtgagtgtatcacatgtgttgtcgtatgagatcgaacatatatatatatcacagccaacgacacacactgtatatgcgcaacataaatgaagaagaggacaagactgttaaagctagatctgcgctgtacttgggtgtattggtcagatggtatgcctcatccggatagttgtatcgttttatctccatccattcgtgtatgagagtgaggagccaagtacttaacctctgccagcgaaggcatgcgctgcttctacaactcggaaccacaactgaaagggtagcatgtgtccctttgtcgataaaaagaacaggacaacatgaggaagagaatacttataataaccgatccttattgcgctgacaattttctacccgttaaacatctctcttatattctcatcggatctctccaaaccaaccaagcaacctgtctcattcagtgttctcttgttgtcgtgtgtatcaccctttcacttctcgtttgtgctgtgcgttgaaccaagagcaaaccacacgcctacactctccgagcgcgtctcctaaatgatcggccacgtgtttttctttaggtcgggttctaggccttctgcttagtcagcggagtcaatcccacccgcctttctatcaatgccttcaaacacaacgcatactctcacttaacccccccgactcatcccttgcttctcttgctttcctctcttcctctatctctttctctcggttggatataggaaggacacatagtcatacacaaatactactttaaagccaaaccgggccagaatcgagtatatagagagagacaagagaatcttggaaggctttgtgtctgtagataccgcaacattttcagcagccgtcgcaccactactaccaacaacagaaacaacagccgcaacttttccagactcgtccgacaaaagtacccttccgtcaggtctctctccattgaacactgctcagatcaacccatcctctgattcgtctatcctaatgcatgtccgggaagaacttggtatacgttctggatcagccacatctgttcacatggaggagagagagaggtgctaccaagccgctgggcgtaaggatgagaatgtccagatgaattatgagcacgagatgacgagagtaagtaccaagttttcttcttcttcttttcttctttatactcttcaacctctgtcctattcccttggagcatccactacacaactcgactatgctctcgctcctggaagatcttccactatagagattgaagcgtggtttgagacgagaaaacgtctggcttcttcctcttcggttctctcctcttgtcattgagtttatagagtcgcatcggtatcataagcaccggactgatttcgctcttggccctttctcttttcgtgatgaactcttaaaaaatcagtctcatccagacactaccgtcgagcccgcccgactgaatccttatcatcttctttctcaatctcaggctgaacatcaatacatccattcacttgatcttccctcgacttctactcctatcttgcccgaagatccctcgtcctcatctctaccctcgacacgtaacctacccagccagaagatacatattcaacaggcttctaacaagcacggagtacaactctcgtcaggcaacccagaagaagagtcaaacagctcgagcgcccgactcgtaaagaagatcaaaggtatagctaccaaaattgatacctctagaggactaccaggatcgagtgaccacattactgttggcaatggatctcccatgagaaaccctctcacccatgggccggcaggtcctccaggcccccatcgcttctctgcaccccctagtccacctcctagcgatccagatcaatccagtgatgagtctgacggagagtcatccagcgattctagttcggacgacagtcaagatgaagacgaagacttctcggagactcctcggtaccaggcaaccacggtctcccaacctttgtcaacgacatcgccgccgccattgacatcgcggctgccgtcatcgtcaccctcacaactgccggtgcctgatacgtcatctaaggtcgactttgctcctccgctagctcccgtctttggccctagcttccttcttgaaagcgtagccacgacctcatctccatcttctaatgacatccgaagcgacccggctaccagtaatgccaatcctaggcccgacatcactaagcttgagcccgagttcacaacatcaccaaccgaaatacagttcaactcttccttgacttctgaaccagagcgagaggatgatctctaccctctgcccacgccaggtcagatcaaccaacgaaagagtagcattgcatctgctgcctctatcccaattccaggctattttgatcccgcaccttcaggtccggtctctacgctccccattttaccttctcactccggtccatcgatttcgtcggcgcagcctccgtcgaatttgattccctctacagtcgcacccacttccagctacccatcatctttaccacatcctacgatcccaagacggaacactacgggctcacctgttatcagtccgtccgtgccctctacgtccgcctcagcaaacttaatggctcagaccactaagtctgggtcaggacgatccatgtcagtctcaaaccatcatcacctacaaactcattccagaccgatcacctctcccgtgtcttcctctttaggccagacgacacccatccctggaattgatggcctcggcctcgactcggatattctggcacaagcagaaaagctccgaaaagagaggctgtctaagagagcaagaaaggctcaactggaagaagaggctgccgctaaccaattgggtggaggaatatctactggcgtggaaggagtgcctagtctcgtgtctccttcggctggaggtacatcgggcggtccaggaggacttggaagcgggctcgacggctcgctcggtctaggaggcgaccatgcgacgtctggagttcatgatggatttgggccagaggttgcccaagcctatgctcatcaacaacatcaacatcaccggacaggttcaaaacatcaccatcatcatcatcaccacttgcatcggcagaagtctcaacaacaagcccaaggagatgtcgaaggaccaattggagttgccgggtctgaaggtaccgacaatgaagcccgagcggcctctggagttgctggaggacgtcagatgtctgagaagtcacaggcaagaggcaatcatgatcaggaagatgcgaaagtcttggttggaaacttgatcggagaggaccatgtgaactatgtgttgatgtacaacatgttgaccggaatcaggatcggagtacgtgttctctgttcccctctgttctcttcttcttcttcttgccttcctctgttcctcttttggagagatgacgaagtctaacaagtcaatcgaccaacctgttcgcaacatgtatcataggtctcgagatgtcaggccaagattgctagaccgttgacggatgaggattacaaagctcgtcacaaattttcgttcgatatgtacgtaaatactattctaatgtcttccgatactaattactgcatggctgatgaaacacctgtcgaaatttcttgtgaactaacagtgttggaaacgagctcaccccttcggcccgatatgactgtgggcatctcttctctccttcttgattcttattcttattcttattctttctcttcacctggttgatatcttccttatggtttcacagtcaaattcaaagattatgcaccttgggtattccgagatctaagagacaactactttcatctggacgcagcggactacttgctttcgttgaccgcaaagtacatactctccgagctaggctctcctggaaagtccggctcgttcttctacttctcgagggactaccgattcattatcaagacaatctctcacacagaacacaagttcttgaggagcatcctgaaggattatcacgagcatgtggtcaacaacccgcatacgctgctctccaggttctacggacttcaccgagtcaaacttccgagaggtcgaaagatccactttgttattatggtatgttcttatacagttagctttcttcgagtcgtatccttgtcttctgacgttaagctgtattttggtgccatttatcagaacaatttgttcccgcctcaccgagatattcatgaaacctatgatctgaaaggatcgtcggttggtcgagagtacccggaggaaaaggcaaagacgaagaaaggtgctgttttgaaggatgtaaactgggttcgacgaaaccgatcacttcagcttggaccggagaaagcggcgttgctaggcgaacaactcaagagggacgcagagttcttgaaacggatgaaaatcatggattactcgctcttggtaggaatccacctgatgaagcgaggaaacagggacaacgtcaggcggaacactttgcaggtgtttgatgtaagtcactcgaactattttgcaattttaggagaaccagattctgatgttatcgattcgattgctcgtttgttcaatcgcggtttgctacaaccagccatctcaagcgcagccgatgcctaccggtttgaaccgtcgacggccctcttcgatacaaaattcggctgaccaggtcgcgcttcgaaaagccatccaacgagccgatccaaaaacgacaacgccggcaggaacgactgctgtcgatcatctctctgaatccgacacattcgaccgaaagcatttcctgttctaccaagacgaaggaggtctgcgctcgacggacgagcagaacgaaccgctggaggtgatttattatctaggcgtgattgacatctgtacgccgtactcgttgataaagaagatcgaacacatgtggaagagtttcaccgaggatcgccatgggatctctgctgtgcctcctacagagtacggaaaccgattcttgcggttcttgctcagtgttatgcctaatgccgatcccgaacttcgaccaataggccttcgaccggaggatataccggatgctgacgacgccaatagcaaagagcacgttcgggagaagaaggagcgacctcgactaaagggagagtgagattgacgaatcatccttcctctccctacatctttctttcgccccttagtttcttggttcctcaaccttcttcctttcttttcctcttttcctctttccttttttcaaccttggacttttgacaaaactctgcccttcttttacgaccatttcattcgcgttcagtaattttcccatctcatttcttcttttctactttacgatctctcccttttttactcataaacaactttccatactctccgttcttctcttcgacacatacagcatttctttcatcgttcctcctcattgatttcctctcctcttttcttaaaaatcgatatcaaaaagaataaagcatatagaaagcgagacgggcaagcaccaaaccttccgaaacatgaggaaaatgagatcggtctgacaaggatgcctcgggcatttatagagttcaacgactgcttctacttccttgcgcatggttctttcgccgtttgtgattctcttgtgtgaaacataagcatgaatatatggacatctacttttcgagcagacgaaaatgaggcacatcctctctggcgtatctagaggcctccctacgtttcttgaagagaacagcacgcagaattttgaacgctggccctcgagcttattcgggaaaagataaccgactgggctaaacaaggactctccctaggtgtatcctcgtgtcaaacatgaacgtcttcaatcctgggtcttgctcgatatcttgggtttcctggtcgtgaaggctagatgtggttggtcgggaggtcgattttggatggtcgggttcggtggatagatcatcttcggactggtaggtgaacgtcactcgaagggtaaactatttggaaaagaaaaagtcaaacatcgatagtgaattagaccagaccagacggcaaagaaaaccgacagatgatggaagagaagaatgaggagagagactcacatcgatatcacctacaacgtcctgccccaactggacatccaaccccacctttgtcatattccctttcttccaaatgaaacccttctccctctctcgatctctcgctatgagcccggaccgctgtagggagctccgtttccgtctcgatgcttcgctctcttctccgccaaggacgtttctgtcaagaattcgatcgacctcatctgaaccggatgacgatgaatcctcagctccgtattcccatgggtcgataaacgccgagacaggaaatgtagaaatcggtagactaatcaagtatggcgagatataaggttgtgaactagaatcggacgaagacgaacggggggaagggaaggatgggtggatgacttcaagatggacttgtatcggatcaaaaagggggttggtgaatgccaagtggaatgcatactgatccatcatccgaacaaggttatacaaggaattaatggatgcagaagaacgatgttcagacagttagcgcaaagaggaaaaggagggaagcggatactgggagaaagacatacgtttcctcctctatgtagttcgttatctgatcctacgattgcgctagtcccggcaccagcaccactggtagacgagctttcagccgtcatactagcccgtcctggtctgactccaagcttgctggctgatcggcctccaccgattttccgagagacctctacggtcgggatgtacgacgcagcaaggagcttgatcttgaatcgagttgattgggctttctggtcaggcttgatgaggatatgccggcaggccgagcatcgtttagtctttttggaacggagtgggatccgtagtggtttaagatcactaaggatgaatattgtagatgattaaaatgaacaaaacgcctcatcagacaggtctgctgaagtttacaagtcagacgggctgtaagctggagcctacctagtctgaacaggctgtctccaactgtttgtccatctggcctcaagcccgacgacgtcgcacaaactgtctttggcgcctaaccaatcgaccaactcgggctcgcccagccgacctgacccgatctgatcggcaggtaagtcagcgtccattctcgcttcgtacgggcgaaggtcttcgatcccaaacttgggcgctggctgccgactggaccggctggttgaagatgctgttctgagggagggaacgtcccgtcgaagggccgaggtggctgcgagcaaggatttgtttgtagtggctgttgccggatgcgaagaagctgaaagcgctttcagatgaggctcatagtgatcccggagatgttcgaactcgaggaccgcaggagaggcgtcttccaaccgctggagttgcactaagagacatattgagatcagatttggaccaacatgggcagaaaacaacatgggagaagtaaacacgacgaaaggtacgaacaggccacacccgtcggcttctcgaacgtgattccgttctctgccgagctgaagcgacaatggttgcagctcaggtagtagtaaggctctttggaagtctctgaggaggagtctttggaggctgctggatctgtagctgccggcttggatgcgttgacggccagcggactggtacatagcggacaaaggaagcagtttcgggcacatctgctcgtagcaatcaggcttacgcgtcagcaatcactctcttcttcgtcttctggttagccggagaggttgagtgaagcgggctagcgctgtatcaaatgggaccgacctgttctgttctgctcgaacgctggctggagggacttcaaatagacaatgggggcagtagtaacaggcaacctcctcttgaacgcagcgggcgcaccgaagctgatcgcattcctcacagaaatagagcgactgaagtggatggaacggtataagagacgatggacgaattggataaggcagggcggatggatatgagggcaagcatgggcaatgatatgcgaccaacggagtactgctgctgttgtcactgttgcctttgcccttgttgctgctgctatctttactgctgctcatcatctctggccaccgacggatggatggaggggcgagaaggtgaaggacggcatttagaaaagactacgaaccttcctaatgatcatcatgaaaagtactacaacgttttctaatgcttgcctcacagatctccgatagcatatacccatcgaccaccatcatcagcaccccatccgtcgagatcaagtgtctggagcatggataacagacagccagatcactttcggagatctcggtcgagatccccacataggttctctcacaatggacccccacaggctcaggccaggtcgtacaatcgaggtcctgaccgttgggccgaccaccagcagccgcaacagcagcatcgtcatcatcagccttaccaccaacaacagcacataccaccgcctccacatcatgggcagcatgattatcctcaccgaggagatattcactcagaagcaaagtatggcaatccgtcctatccgccgaacgaacacacatacccgtctagtcaagccagttttcatagccgagccggatcgagttaccaacgggctggacaccctggtatgaacaaagaggaccgaggagagcctgactatggagactatgtgccgccttcggaaaggaggtctccaaccagatccaacagagggagagaagactgggagggaggctatgaagccgaacgaaatgggtatgaagacagggggcgagacagagctggctttggcggaggagggggacgaggaggatttcactctcaagggcgaagcgacttcagccaggttcgttttcgttcagacatctccccttctggcttcctaggcttcacttgattgtgtgcatttcatgggaagcttactcttcttccattcttgggggtcgcgcttgcgattcatcctcacgaacagatccaccatccaggagagcgaggccaggcctaccagtccaatgctaatgttccttcctttccgccctctaatcacttaaaccgacctcgatacccgccttctcaggctgagccatggtctcaatctcagccttaccgcgatccgtcaccatctcgagcgtatacagcgtacagccaacactcggctaatgaccaacgggctccgtatgatcatcgtcagcagcaacctttcgatgaagtctatggaggctatgatgatgagtatggcggagcaggtaccggaggaaagccaaagagaaaggagaaagaagggccgtctgaagtttcgaggcacatcatcttcctaggattggatccagaaatgaaggaaacagatgtgagttggctggatgatcataagctcgtggtgtcatcggctaacgtagacctgttacgacatgttatcaaatagttgttcgacttcttgaaggaacaaggcgctcaagtggagagtaccacgatcattcgggacaagatcacaggtgagcgaataaacaacgtttcttattctctgttgtgataggcttcacttctaaagccgttcgaatgcttaatttatcgtacacgttgaaggcgcatctcgaggatttgggtttgctctgttcgcccacaccaccgctgcatctactttcttacactctcacttcccctctatatccattcccttcccttctgatgcgccccatcctcgtcgggttaaaatcgacttctccgcttcgccaaatcagccaggtcatcagcctcattccaagaattcttggggagccactttgtcatcaggctctagttctatgtctgacggtcgcgtaaggagaggagcaggaggaggaaacgatgggatgcgggacattggagggaatgaaggaggtgaaaacagagtgttattgattcgtggtgttgatgtcttggctcgatggaaggaagttctcgatcgggttgttcaggaggtctttgagttttcaaagagccagacccagacttccggccaagatgaatacaacaccgacagcacacggccctccactgaagtcggatcgactttcattacccgtctgataggtatcagggataaagagacaggtggaagctggggcttttgtttcttggaaatgcgcacggccgagcatgcaatcggtcttctaaacagagtactgtctccgacgattcacccaactgggtttagattggacccaagtccgaagccggtgtcaatttcttatgcgaacccagcggcgttcggaccgaagaaattatcgtcagtcggaataagcggtcagggcaaagtgatcgatggaggagggcagttcggtctaggagggacatcagagactgtcgcttattgggacgatggcgcagagctcgttgaagtttgggcggaaggagggaaagaggcagctgctggtgagtgtatctttgaggactgatgagcccaacaatatatcttcctttctcgacttctcatattgatctcttcttttcttcttacgcctcctattctttaacaccagccgacgccgaactagcgagcttcctttctggtctaaaggccgatcctaatttcgctttcctgaccagtaaagaaggcgcacgagtaaatgctcagcctacctccgcattggtgtcggcatcaaactctgcagagtcaaaaccaatatctagctctgcgcataagaaagaggagatcatggtgccgattgcaattggagggatcagattacccaaagcgggagctgaaaaaggtcggtctcctatcttgatcggtttgtatccagggatgggaagataagctgagaggcttatgctgttgtcgtttctgatgaaccttttctgtcgtttccatagtaatgaaatctgtctttcaatctgccgaagccgatgaggaagaggaagaagagagcgtaagagaagagcgggaggcagccgctgccaagggtacgactggctcattttggttgattgatagagaggcgctcagtttttcctatcaagatttcactgataccaaaaccgtgccttaaatcacagcgaaaggactgtacaaagttcctcctatggcgagtagtcggaaggtttgtctttttgcctatcttgttgattctccagacttattatctgataaactgattcttctatgatacatcgctgtcgtctttgtgcagattgcaaacagtatcaataagtggaataccaaacaatccgaattagcgtcggaaccggccccttcactgagcgcaccaagctcaatatcttcagaaaatctaactcccgtaggcgttcctcagtcaaatgtacctgactcatttcttcctacaaagaacttgccgaccctctgcaattggagaagttgtcatcagaatcatgctcatcaggctcgcttgactcttatctgtctcttcttatttccgggaaccctatgcgcagatcatcaaccacgaagaacccgatggcgagtttgagttctcggataagatcaagttagcctgcttgctctgtcagcgacagctgaaatcgctcgaactgctttccaaacacaaccaagcgtctgatctccacaaggtttcttgaatttccctctcgtatcgctgacctcctcgagcttctcttgagacctttcttgaggggttttactcttggtgtttcccgagaaggatctccgaactgacaacatcaattttccgaccctcgatctgttttcttggttaccatagaaaaacctccaagatgccaccctccgagaggtcgctcgaaatcgagtgaaagccgcccgagaagcggccggtctagcaaacccgcctacatcagagtacgtcgaccgggcctcccaacgtcgaacattattcaatcaaccggaagcacctgtaccggtttccaagtcggccaacacggtcttcaaacggaagttcgtagaaggtccaacaccgatagcccaaccggctccgccaccaccgccggtccctttaggtcaagatcagaataacgtcggaaacaagatgctcgctagtcagtaatatcattcacaggacgaccgatagacttctcctttgattttcttattggcttcactcttattcttgactcttggttctaacaaactgacgaattcattgtcctgactcacgttccttacgcttcgtacatcgctcttagagatgggctggaaggacggtcaaggtcacttttctctttcaaactcactctcgtcttccgttttttattttttttaaaaatacttctgacgggatgagcttgtgtactaattctgctttcaaccatatcatatttgtatccgttattaccgggcatcgacccttccattcgattttcccactctttaccacgaaaaaaggcttgggtatttctggcgagggaagagtagaccccgtccaggctcttcagtttgcccattcagcgggcttaggatccgtcaaacccaaggattcatcaaagaccgcatcaacaggggaggacacgtacagtgcgcaagttcgggatagcgttcgtatctcataccccgaaattatcatccatccatccacccatcgttctgcaacgagcctcacgcgtgtaaagtcgcgatcgtcaatcattctatcatcggatgtgctaacaaagtcgtttctcgaaacggtcgttctcttttcaaatctcttggtcggttggtcgtgaacaggctcggaatcggtacaattaactagtttgaacctgaagaacgagatcgagaatgggaaaaaagtatataactgaaaacgtctgtgaagattggggtcaatttacatgattttcttaacgtacatcaacatatgtgtgtgtgtgtcccgacaaaagataaaagacaaaagtgaacaagccaaatcgctgataaaacgaggcagattgtaaacggtcatgttccattgaggtagatcattctttcattccaggtcatcaagataggatcattgtaagtctaagtctagaaggtagagggaaggatgttaaagttcggaagcgtacgcgaacgaaaaatgggagaagagtaaattcgaagagaggaggggcagaatgcactttcggaaagatgaagagatatgaagagtgggatgatcgatagagaaaagaaagggaagaaaaggaggaaaaatcatgactgaggatttaggaagatgatatgaaataaaataaaatgaatgaatgaaagtccaagagaagagtcatcgagacgttaatataacatcgattaggaagtcgccgcactctgcaccaaactgccgaaacttccggacgatcgatggatattaaatggacggctcgtccttccggccatcatcatcacctgctgctgttgctgttgtccctttgatggcccatgttggtaaggtaccccaggtcccctttgagccaatccggtatacaaggaagcgcctgtggttgcactcctggctctaccgagagccaaagggcgcatgcccggtccaacaggtggtgtagaaaggagatggctagagtgatcgtcaaatcgagacatagctgtggaaggtcgtttggtgtagaggacatgtaaaagggtgacactgtaatcacaatggcaagggtcgagaaacagaatttaggtgaatatcggttagttcaatcctagcacgaggaaaagatataaccaaaggatgctggagcaactgacctttccatagacagcctcgttagctttccgagtccaagcttgatgcccttcttgaaattccgctgctcctcctcaaacgtgagcttcgtcactttagccactcggttgaccgtatggaagaactgcgaggcatcctcgtatagggtgtcttgttctgacggagcgacgatcgtttggtgaagttgacgggtgtgagatcttgcaacggggatgaggtccaagagttcaaacacacgcttcgacggaggccttgtgatcagtgtgctttgacgattcatagtagccgaggcggagcgctataccgagtaaaggaaacaaaatcaatacttcctcctgatacacgcctctcgagacgatttcaagccaaagatacagcacgcaagagagaataaaaaaagaccacgaaccacagcccagtctaaatcctcctctagtaatccccacacgttagaggccaactcgaccgcctgttccatcatcaccagcaacccctcgtcgaccacgtcgcccactttgttcgcgagtccacccatgtagggcaacggtctgttatcccttccatatgccgaactcgatgaaaacgaagacgaagacgaggaaggcatagccatcatcatcatcgacggtggtaccaatggtggagaaagcgaaccaaggctacctatcgagctgacagaagactgagttgaatgagacctaaatacagcgtgtccattcctatggccgatatcccccccagtttgaccagcaaacgtaggtttaggaatctctgctaaaaacaaagctgctgaaccatcaggtaaagatttagcgccggcttgcggggtagatgccgagtctaaggacgttcccagggtcgatgaagactggtcaatgagtgaagagctggcctcgttgtagaagacgtcaactacctgcgtttgtggggatgcgtctccaagcgtgttttgcaaagtagcctgagagattgttggggatgaagcagccgtagaagggttggtattggagaacgagcttctcagtgctgatcgaagtggataatgaggtgagtcgagagtcaaggctgacttggaagatcgtccattcatatccggcagagtatggttcaaggagacgggagatgtcgtaacggataacagcttagattcttcctcgccatctttgagagcgatgggacccgcgatctgtctccgaggttttccgcctcgaagaggaacctgaccggacggaactggaccgataaccactgtggttgatgccaaaggcgatgaaatcgatactggcgatagcgtcaaggagctgaacgactgttgagcagatgccgatctagatagtacaggtgattcgaaccgactcgaagaaggcgaatgagattcggctcgttcaggaatcggagagataggcgtcctagtcgttgattgagagacagagggtttatgtttccggaaatgagtggctcctgctccagctgttcctcctcctgaacctgatccggtgccaccgactggcccgttgaaagaacctccagagatagccgctgatgctcctatctcgcttttcactgtacccgctactgagcctaccgtctcttgaagatatggcttaacctcctccaatattggcaagatagccttccatgcggccgaaatctctgctagtgatccgtagagcatcaacagcaacgtcctcgtgaacctaagatcctcaaaagtacctcctggatgatggcttccgttgtgcgacaccgtttttgagcttgccacttgaagttggatctccaacacggctatcacctttccaaacgagctaaccgatcgccagcaggcttcaataaccccccgaatgaccctcgccggaggaataggggaccgtctggacatcgaatcaaatctgtccaacgcgttgatgatattgttgatcccttctgcagcaggaacaagtaccctagccaacacattggaaaatcgatcgtcgatggcagcaagagcgtgttgacggagcgaagactggatttgagtgagcgcaaagagaataccccgagcagaatccactagaaccagaagtgaaacaggaatcgtcttgggaagcgtcgaggccggtaaggttgataatcttcggaaataggacgctctagaattttcgatcacggccgaaggtgagtcatcctctgaccttcgtagaccagagtaaggatgattcattgatgaagacgtcgttgttactggtgaacccaagccttttcccgctctgatccctgcggacgctgagctcagattcagatgctcaggcaactttctcagcgttccatccgaaagcttcctctgaagaccatttctcgctgtagccatcgcgccaaatgctccggtctccatctctgaaccagtctttccacctccgatcgacttgactgaatcggttccgtctccgacacaagcctgcctctcgctgatgattaacgcgtggttgagtcgcaagtcaggtaaactcttctttggacccaatagctggctgagcctttgagattgagtactgaacgatccgttccttagatgggttcgctgattagaatatgctgtacgactcggtcgaggggtagccattgaggaagaccctagagaagtcgatgatggtgagggcgccattgaggatccagatgcaggtggtgtagaagaaaaagacggcggattgtaagacggagatgagggggacgtgttggttccttcggatggagacgacatcggcatcacaggaaccgatgaagaagaagacgaagagagcgaagccgccatgaacgacggtgggattggtaaagacgtgccaggcggtggagtgactcctctcatagacgacgaggccgaggcattagaacaattcctagagtgggtaggtcgggaaaaggaggaagagtttaaaggttgttttgtaggatgagtgattgatatcgaagtggctgtactcgtttgcctagaatgtcctgtccgattagttgagtcgctcgtccgactggacgtagaaagtgaaggtgaatgagtgtttctccgctgaggatatgttggaggtagaagcgccgagggagagacatgctgagaatggttgaaaccagaagaactaggtggaacccaatgggtagaagatgacgacgacaagccagacggagcgaacacaggggacgatgatacggacgagaaatccccactgcccttcgacgcctgccttcgatggtaaccgccgacattgtcaccattgttattaccaccactactactgctactaccaatcgtaccgactccgccgtcccttgatagcatcgtgttttcgattggtgaggtcgagctcgaagcccagccagcgtttggtgagccagaactctgatatgtcggccaagtagggaggattgttcctgtagatgaatttgatgaaatcgagttgtgtgaattcaaagaacccatcaaacttggtctagattgaaaatggtgtgtctggtcgtgcgcgtgagaggcttcagaaaaattctgagaggtagtcgataagaatcctggtctcatctgacttggttcccccatcccagggaatctatctgcacctctctcttccattgccgctgggtcgtcgtctgaatttctcaaaaaattccgtatgttctcgacccaagctttctcgtttgcgtcccctcttccttcctcagtgatcgtctttcgttcaagaatctccggagggggccactcgatgggattatggtcgattttgaaaaccttgagctcggtgaaggtcgatatgtattttggaagagcgcgaatcttgttttgagacaaagacaacaccttgaagtaatatgccccggacagatgaatggttagaactctcaagcaagcgattcctaaccggcatcaaagacgcgttcgaactcaccctcagagaagacagccggccaggaggagtgtccgggaacttccggattttattcctcgatagatccagaatctctaatgattgaagggatccaagctatgtgtcacataggaagaacgagagagttcagcgctacgacgaacacagacaagatcagagtaatacacaagaaagacgtacgactgctgggatttctcgaaggtcgtttcctttcagattcaaatatcgcagtcgggtgaggatgatgaaggagctcggtagggatgtcaacgaattgtgtgatagggcaagcctataaaattcatatcaaatagtcagtcgtttggtcgtcaaaaagaacagtgaagacagacagagtcaacgagtgatatccaagtcgacggtgtgtcctaaaagtgagaatggatggcagagcaacggttcctctctatctggtctgctcctcctattctctctcgtactgaagcaaacctgcccgaactccgtccgacgcacactcaaacaaagactagaagccaagctgaccaagagagaagatcggagggaatcccagcaacaacaacaacacatacagaaagaagaagggaaaaaaacccgacgtacctcctcaaaggtctaccggtccctaaaccagccaacaattcgactccctcatcactgacttcatctagattcagtctaccaagatctaaagtttcaccatgatctttcgatgcttgaacggctgtctggatgacttggtttgagaggccagagattgacggcgacgagacaggcgagatcgatgaggtcgaggctactgggaatgatgtggatgatccgccgctcggagggggcgggttcatctctttgtctgtcgttcgttcgttcgttctttcgtttccttatctcgtcgaatggtctaccgtgattccagatcaaagggtcagaccagcaggatgaaggaagctatagatatcaagacgtgtccgttcggaacaaatagatggagccgaggatgagagaaggatgaacgggtgggtggaaagactcactgtctctttgaggggaggaggaggaactttgtttaccttcccgagctttaaccggccaccatccaaattcacactttctttctcactttctttctcactttctttcctctcttgtcttttcttttcgtttctctctgctttcgttctacgagaggagctgtgcatgtgctttgtagttcatcgcgcttctctggattacactttcattgacaataataaattcaagagggacagagataacatgtgtgtctaccaaaaaggcgaagatcataagaacgtttagaatcatccgaatcatatttagccatcaaggagaaaacacagctctgcttaatcttgcttaggtcgggcccaaggcgagtagtttagataccagtctattgttttttttgtttttgtttttttgacaacaaaaggaagaagagtgagatgcaagtagaatggaactttggatctgagatgatgtgaaactcacagccggcattgagataagttgcatacgtcagccaagcacctgatggaaagagttcgcacaaggtttatcagtacatgatgcaatccgactcagtgttttaaagcgccgacaaagtagggtaaaaaaaacgcacaataaggcgcaaagagcaacgcaggcgtgattcccgcaggagcaggactggaaagtttactcgagacgttctggttttttcaagaaccagggtaccaaccgatcagaccgtcaagctttggcagacgttgttaggcttgaacttacggtgagggcgtatactgtgccggtgagtgctacgatatctaacagagcaagtccggtctgcacgaccccatttcgttcatccaaagcgagtcagagataattcgactaccgaaaagggatagaaggagcgatcagattcgaaagagacttgcctgcttcagctggaagaaaagaggagtccacagatagtttcccgccagctgagcccagtaaagcgtcagagccagctgggcgagttgtctagagggagaccgcgccagaagtataccgtttagatctctacgcccttctgtacaacaagatgtcagagataacgatcgaacgtacctggtggaagggtcaaacgaattatcaaacgtcttgacgatcaaatgactagcgtaacccatctaccatcgcccatcgaaatgataaagatcagcccaaaacttcaaagttcggacggtgagccacgccgaacgtcgagctggaaaacgctcactgatgcgtagagaataggccaaacgattccgaacgctctgttcggaggtctagccggtggtgggttcagattctgaggaaagttcacacatcaaacggttgagtcttccgtgatctgttccaacgcaaccaaacgagcgactgctctgagcgaagaatcgtccgatctaccttgtaccaaggccctctaacgacagacgctgttgccctacaagaacgttggtcaaagggtaaacctcggatgactgatcagcttgagtctcatgcttatcagagaatgaaagggtaagaaaccttaccatccggataacgagccgaagacaagagggaagccgactgataggaactcaacagaagatcctcaactttatctcagcctcctggactgtatcctaacctattcgatctaattcgcggcctgtaagaagctaacagagaaaaagggagacactgacctgcgacgacagaatttctggggatctcaaggaaaggattaagcatgtttgttgatgttgaagaaaagtgatggttctggctaggcgtgatgcgtctttaagtaggggggaaagatcaggaagccggctatgacgcggacggagttttgtgatcatccggccgctcgtcacgcttagtatgcttctttccgatagaccttcctttctggatatcttggtattgcaatgctcagagaggaggagagaagtgttcagcatggtaagtttccacgttggctgcacattgttttcgacatctcaaactcatctttagagcacacgtattttgcacagagttaaatagaacaacgtagaattcaacaagagggcaagagttcaatggggaacgatacaaaatagaatacctagacaacaagtagaggtgaggaagaagaacacaagaggagagaagaaggaaactacaacagagctggatagaagatcggacgaaagcgtctagtaaaccttgggggcaccgaggaaagtggtggactgaatgagacctgttgttcaaaagtgaaggagagcgcaagagatgaacatgcgaaacggtctatcaggcttggaaaagagtagaaacaaagaacgaaccagtcttgccgtagttttcggaagagatacccgagatggggttggcgttgagggaccctgggtggaaagcgagatggatgagagtcaatcaaggaagcagataggttggtaccgtctgtccgacaaaggaggaagcaaacaaggaacgcactcaagtattcgttggactttctctgccactcgatatccatagtcttgggaggaggaggtgctgtatgatcgcataccggatagccatgaagcaacgaccagattcagacaacgtatcgcagcagagcccatgttgtcgagttccacgcgaccaaagcagagagagcacacaataagcttcagtcgattttctattgttttctattgttgttaggaatcgaagagtagaagagtaaaaatcggactgaccgatcattcgcaatccgacccaaaggccgatcgcggtgataaacccgcccgagatgtagaggatgatatcccaaccctcgccgtgggcaagttggggagcacgcttaccccacggtccgtagttgatataccatactgtgagataggagaaggaaagaatcgaaagggatgtgtgtatcagcttgggttctggttgaacgtggctgagaaataagtgatggttgataggccagaaaagcaaggctgttggttgatcgatgggagatggaaaagcatgtcgactcgaagaccgttcggagagaaactctttatggggcttcgacatcacattttacaggcagctcgccgatagagtatgaaagaggatcttggttgtaggtcacagaatgatacaactgtccatctctcgatatggatacccaaagctggcctcgctccaaactggaccgagtctaccgtagaacggaatctccagagcgagtgaccactgacaaaaacacacacaaaacgatgcaaacatcgcgagatataacacttacaggcctttttctcgaccatgctcaagtctttccaatcaccctgactcctctccatcagatgagcggtaatcctgtctttagtgtcctggtcgattttatcccagagatactcgatactccagagatcaggaacctttccatctacaaaatgggaactctcagtgatatccacgttccagagaggaacaggtgtagccgcctgattgaccgcagacagggcatcataaggagaaaagtgtttttggccggccttgggaagcaaggatggatcggtagtgatgtttggctcggcgaacacggttggtttcgtggacgaggccggagaagaactagctggctgagctgcggcagaggaagctgctcggatcaagctgatcctgggtctgatagctcttgccagtgagctggatgatctaaacatggctgggtgtttctttgggtatgatggatagaacggatcaagacttgtaggtcgggcaaacagagacgagagggagagaatgaagaccagagatgagactaggagggaagatgttctggttacagtggctgctacagccggttcgagacggttcatggaggttgctggcggttggctgcggaagtaactggttggttccggttcaccctggttcatgctggttcatgttggtttactctggttaaatcaggttcacataggtttgcaccggttcactacctgtgcaaatctcgtgaccctccaccaacacccctattgccagcgcacagaccgcctcgctcccggaccatcacacctttcccatcctgcccggcttataaacaatctgctctttttttcttctcctcttccatcaaccatcactctttccttcctttctttcttttcttttctctcgccttcatcatgaagctttcttcctctttggggctcttagctcttgccgcagctgctactgcttcggctgcttccgacgttcttgatctcaccgctgctacgttcgataccgagatcactgactttgaaggcttgtgagtgctcttgtttgttttcgtagctctctgtacctagcatcagaagcatacttggttcatggcctggctcatccgtctgacatactggctcttttgctgttctttttcgtacagggctctcgctgagttcttcgctccctggtggtaggtctctagccgtcttctttctgtcagcggctgagatgatcattaaactctatttgttcctctctctttctctctctctctctctttctgtatctcggtttctgtctgtgctcgtttaatcgcgtctcacagtggacactgcaaagcgtaagaccaatctagatcacccgtctctccttgctcgcactgttgtctcgtcgctgactatcatcagcacccaccttctcttctcactcgttcacgctccatcagtctcgccccccactacgaggaggccgcgaccgagctcaagtcgaaaaacatcaagcttgccaagattgactgcaccgtcgaggctgacctctgccaggagttcggtatccagggataccctaccttgaaggtcttcaacaacggacaggagagcgactacaccggaccccgaaaggccgatggtatcgtgtcttatatgatcaagcaatctctcccggccatcactgaggtcactgctagcaaccacgacgagttcaagggttccgacaagatcgtcgttatctcttacggatctgatgcggctcccaaagagtttgcctccttcgccaacgccaaccgagacgctttcctcttcggtcactcgtccgacctttccctcgcctcgctctctgagccttccatcatcctctacaagacgttcgacgagcccaagctcgtcctctcctcggccgagttcgagtccctccgcgttgaatctcttggagcgtgggtcaagtccaactctgttcctctcttgggcgaaattgctccggagaactttgcctcctacgccgaggccggtttgcccatcgcgtatgtattcgttaatcccgaggccgccaaggagaacgctgcgcttgtcaagaccctcgagcctgtggccaaggagtacaagggaaagctctcattcgtcaccatcgacgccgtcaagttcatcgatcacgcaaagtccctcaaccttgatgttgacaacattcccggatttgtcattcaggacctccagggtcaaaccaagttccctctcaaattgagttccggagagaagctcgaggccaaggttgtcgaagactttgttgcccgacagcagagtggagatatcaagccggatgtcaagagcgcgcccatccctgccgagcaggtcggaaacgtctacgaacttgtgtctgatgagtacgaggaggtcgtctggaagaagggagccgacaaggacgtctttatcgagctctttgccccctggtgtggacactgcaagaagctcaagcccatctgggacaccttggctgacaagtacgccgaggtccccaccgtgttgatcgccgcgttcgatgccaccgagaacgacttgcctccctcggagcccttcaagcttaccggattccctactctcaagttcaagcctgccggctcgtccgagtatgtcgactaccagggtgaccgatcgctcgagtccttgattgagtttgtccaggagcactctcagtctgatttgaccgccaaggtcggaggaagcaagaacgagacgccgttggcccaggaggccgaggacgtcgtcttggacaagacgaccggagaggatagatctgttcacgatgagctttaagacgggcggttctagagaatgtaaattcaagagtaaagtgtagtttcaaccgagcaggggatatgaagattttgtttgatatgtttctgggttgagatttgtgatttctatatgtttgttatctcaccttgccatcgatcccgttcgttcatggaagaaagtgaaagagaacgaaagaaactaagaacgagagacagagaattctcatccatcggcagatcgtacagcccaagcatcaaccaactcaacgttctcgcatatctttcgaatagactccaagtcgggagcttgctcaatgtctttcagaaagggaagataaaatctagagcgggatctgttgcatacggacaccacaaaatagtatgggcaaggtcagcattcatagtctccgtctcattatttctttttttaaggcaaagaagaaaaagagaaaagacctacgcctgtagattcgtacgcgtgaaatccttgacgtgccgctttacgctgaacaagggtacggcagtcgagtaaagatcgacgatgtctaggtattgggtcgtcaactctagagggttacatggaggtttgtttggagtgaagaacctgtttttatcgatcagatcaaccatggtccgtcagcgatgacaagtaaggtgggacggatgaaagtcgagatcgttccgagacgagagggtctacctgaaatcagcacttagttcttcgcctaccatccacccatcaactccttccctcctcgttagttcccctacatcattccacgttctgacccctccgtttcctacgactcctactcctccgaatccagcttcgaccaacgttcttttcacctcgcctacggcacccgtcctcaaatgtttgagatctcttcgtttagtcgatgatcctacggggcgagcatgaagtgtgatggttgaggagcctgcttgagcaaggtggagagcataggcagcaggtgttaatggggatggaggtatccgggttttcgtgagaagagggataggaagagtcgacaaatttgatactaggtgggtaggttgatttggtcaacagaggcgctcggtcagcgcacagtctatgctgtcctctctctttctttctctcccagagacagcatagatctgaaaaagtaaggggactgacctagctcggtgacaagaggtaggtcagtcttgttgacgaggtagcctccgtagtgaccttcgagcgcacgttgttgagggcagcctgggatccgtccgaacgtcaagaagggttgagaagaggcacttgttttccgagaaggtgtctccgatgggctgaggagacaacgtgagtggacttgcctagattgagctctttatgagaaacccccaagatcggatttcagcccgagtttacgatctagtaaggaggattctgatgttgcgaaagagaaaaactaaccaatcccatcaactagactcatcaccacttttcctgcttgcataagttcctctgtttgattccctgctagctgagcaacgaccaatggatctctactcgaccctccgttcgaaccaagattatgcctaatggcgcggccgaattcgaggtcgagaagggtttgttgttggaattcaagagacgtgagcagatgaggagcgacgagcatttgagtgtctttataatgatgagataaagaatgtgcacgagtccgagtttataaaaatgatcagaaagatcagtccacagtgttcatgtggaaaggaaagagcatgtgtacttgcaggtcaatgtgcaaccccaatgagcgaccaaaagacggaacggaagatccgatatgcctacctgaagattgatccaaacccaaggcgccttatcttaagttttaccgatagacctacaccaagcaagcacacgagcaaaaagaagcataccataggcgcctgaacatatttaagacagtctaccggaagagacgggttggccgaacccataatcaataaggaaaagctcaatgcgctgaatggaagtattcatggtcatgcgccaattattagttatccaacgtcagcactacacacatctcatctgtcagtagcagtctctggttagtctggatgaacgaacggacggacggatggatggttgtggttgctatgtctggcttatttcttgtccgctgcggttgttcggaaaaagggaagaaaaggccaatgggaagatccgcgttcatttcttgaccgacagccaaccaagactttcattcttttcctctccttctacttttcttttccttctccatcctcatccttcgtcgagactctatcaaaatggccaagaacatcttcactcctcagccccgagtggcctacttcacgtgcgtttcttgtttctcttcttttcgcctttattgatttttcttcttttttttcacgttcgaacgggaccgttcaaagagtgggtaaagaaaaaaagaagaatcttaggctaaccgttctctttttgacaatctcgatcgggatctcgcttcacacagtgccgagtacgtattcgtctttgatcagctcttttgtttgcatctaaattcttgttggcattctaacatggcgttcgatccggtttataggaagatcatgcgattcgttccctctttgggtgtttggggtgtcggagccggtggtctcatcaccttgcttctctcgtcgactcctatcttccaggtttgttcttgtttgatcggctgtgtcggctggagtttatgaagaggaagagaaatccttgcggctttttctgcactccttcctcgatgagcattgcagagactgatgtgagattcactttttccaccttggtccggtaacgatcttcttcgatctgctggggactacctcgatacaaacacttccgggttatgtagcaggatgtccttgtcaaggttcctgtcgtacgtcactatattctctggaatgcctctatgtgtttatctgtttcttgctcaggtttaccacatgcattaacgttactctgtcgtctttattgtttgctcttattatctttcccttggcacttttacagctcaccgagtactacactgacaacactcccgcttcggacaagcctttctaaagtagccgactcgaaacatatattctttttagggagcgatcagaatgaggagtggatgggacagagttgggtcgtcgatttgacacacatacatgaatttgatatttttgccgttcatcccttatttgtttctttctatccttctctctgacgtatcgcaagagtcaaatgagatacatttaaagactgtacacaagctttggagagaggaagagcaagaggagtacacttgaaggcaaaagaggacgttcagcggcacggccgtcgggtagtcgtcacctgggccgattggtttcacgcgagaaccgtcagtgttacctccccctcaaccaccatcccttcctagccatcaaccatctatcttgaccgtctcttctttcgatacacttaaccaacgtgagtcattagtttctttgtatgtgcgagaacagacagattgctgctgttcttcttctcttgatccaacaccggctaccaaacaaagtttcagaaacacatcaaggagagataagagccagtggcgatgagtgtctcttgctctccgtctctcctcttctttccatcatcacccttcttccatgtcgagataatagagaaaggttgctctgcttccacctgagatgaagctgttagcctcatagagagacaagaaacagatgtgacagtaggaagaaagggtgtcgcctccaaagagaacgtatgctgatctggcccgtttgttatgttttccttgccctttctttttccttcttgttcctttcctcctccggctcgtttcgatcttccacttctgatctcgccatcgtgacccatcctttccactgtccttgttgtggttcggctatctgttcccgtgatatctactcggtctcctgttctggccttcccttcggcgttcttttttttccttctcgtgctggactcgtccgaccggtccatctacacgttctcctttgtcatcctctccttcgaccgtcattcatatctgctttccttttctatttgacaacgaaacgttgaccgaaccaaaaacaagacaatgtctactcccgaatacgattacttgttcaaactccttcttattggagactcgggtgtcggaaagtcttgtctattgctacgatttgccgatgacacctacacagagagttatatctctaccatcggagtgagtgtccattcctgctatcttcaattcctttcggctactctagtgtgcgacgaaatgggctgccggacctggatagaggaaagggtagagtcagttgttgagtgatgacatggtcggacaaaggaatatttggagaaacaaggctatgttcgggtcgcccttttatcagcgcatgtcaaacaactccatcatcctcagataggttctagaaatgaactacgatcggataaactgacatgtctgcgtacctctctgttctctccgcttgtcttgaccgacgaacaggttgacttcaagatcagaacgatcgagcttgagggaaagacggtgaagcttcagattgtaagtttttatttttatgctttgatttgttgatgtaggaaggaaggagatgtggtatgaatgggttgaaggaggcatatagaacgacattcgtatcgatcattgaagtgagattggtgtgttgacgtttggctctgtttatccaaatcctcctgatgacagtgggatactgccggttcgtgtcattttcttctctaccacatcatgcgtttcaacacagacctgacgtcttttttttcattacaaatggtacatccttaccgaatcatgtgtgtgtggggtggtggtgatcggtctggcttcatgtgtgtttatgtgtgtttatgtgtgttgttgaggggtgtaggacaagagcgattccgaactatcacttcgtcgtactaccgaggagcccacggaattattgtcgtttacgatgtcaccgacaacggtttgtctgtctcagattgatccttttgagtgttcacgttgctgacttttggttgctgtgttacactgcacatgtgccctatcgctcactgccaacctattggtcttttgcagagaccttcaccaacgttaagcagtggctccaggaaattgaccgatacgccattgagggtgtcaacaagcttcttgtcggaaacaagaacgatttggtttcaaagaaggcagtcgagtacggagcggccaaggttcgttgtcatctctttctgattgaatctggtttctttgcaaacgcaagtactgttcaagtggtagagcagtcagagaactgatacgattatattccttctctcttctctctattctcaggaatttgccgactcgctttctattcctttcctcgagacctcagcaaaggaggccacgaacgtcgaacaggctttcttgacgatggccaagcagatcaaggaccggttcgttttccttctggcgtttctctttttcaccctctttcgtctctttcgcacgtgcggatggaagaagccggtgctgactctgaagatttatcttgtattgttgggaaaccatagcatgggatccacctcgatgcctacaggtgctggaggcaaggccaacttgaaggtcgctcagggtcaatccgttcagcaggctggaggagcgtgctgctagacgctttctctctttccttttattcgtccatgtcgtcgcccctttctgttttctctctttcttccctagtcttccacgcccctttctgtccagcttgatcgcttgaccatctctacgtcctctctctatctatcttttttctcctcgcgcgagcgtttgttctttcttctctgccgatcgatgtttgttgtaggtagctcggtcgattttctttcctctctccttgttttgtgttttacctctccccgtacattcgtgatcttgacgaacttttctctctctctcgctcacgctcacgtactccctctcccttcaagtctgtttgcaagttgatacaccagagcgagacaaactagagcgcagggtgatgggcgataagagtgacagtagctacgtgacacgatggttatgcgtaaccatcttactgcgcatgatacccttccctcatcatcagtccgctttcggttctccacatcgaaagcggccaaacccagcatacaaccaacacccatcgttcgacatctgaggctgtcctcctcatcgagtcgtgtagatactcatcaacaagagagagtgtcgtactaataaactattaaccaagagagagccaaactattatcagaaggttggatctatatcaatcagtcaatcactcatccatggcacctgctctatccttatcggcctacgcctcgaatttcctcaagaatccgatcaacacgaccggaccttatgacaaagatgtcgacgaagctgatgctgatcctgtgagagctctgttattctttttgtttcgacttatcctatgatatacgtcgtcctttcttctggcagtcgaagatcaacagcgggtatcaggacgaggactgtaccgtgtgagctatagtaagcaagggccgtagggacgggtatatgcggatgatccaccttggtcgagatgtgaaataatcatcaatatgaaagaacaagagttcttgtcttcgtcttggatgctgtgggaacatattgatttagctcctgggcgcctctgaaaggtcgctcttgtggtctgaactggagctcggtttatcattctctatcgacatgcagtttcattcccctttgccgcgaaaggctttcaagcgcattcggtcgtccagagaaactttcggctgatactctctctctccctttttcctcttctctcttacaaacagctcttctactcaactcatcgcccaacccctttgtcgagaacgaaaccacttcagacactagctagttcttccacactatcccttccacatgtcttcaactcgactgactcgtttgccgggcccgacgagggctcggcaggagaaccatctcgtgtgatctttgacagtcggttcgaagagggagagagatccggtcgggatatggatcattcccgtggtggttacaacgataccaatgacgatgatgatgatgacgatgatggtggggaatatctacatcgagtcgagagggaggaaagagaacagcgtgggttactagctcagagctcgaaatgtacgtccatctatttccagtttcatcagtcgtaagacgacaaatcctcaagggcactcgactgaactatatgcgccttgtgtgatgaacggttctctcagcgtctctgtctgtcaatcaaccgctgccaccaccaccaccaccaccgccacagctacccacagcaggtccatcaaggaaaggctggcttgctcatcaatcccatcacccccataaccgctcccgttcatcctccacttcgtcttctacgtccagtacgatctcatcctcgacgacttcatccttgtctgaccctcctatcccttcagaatatctggatgaatcccgaaactcgattcatggtctgccaccgccaagagggattgtcttgcccagaagcgaggaggttagaggaagcgaggtgctgagggaacgcttactgcccagtggtgacggtatcaggagggtggaaagactcatggctttgggaagtgaaggcagaggtttttgggaaggcagaggcgactggagaaagttcagaggttcgtccatggcctttttcaattgagctcagaataatcttgctgtactccttgactttcagcaagggcgcaagggcgctctcgtctgctcgagtgtacatatgacttcatagagcatccaacctaacagtcttccatatacgttcgtgcttctcagattacccattcctcgcgctctacctcttatctgtcacagccctcttcgtgtttcttccgtttacattgttcttccgcccttcgactccgagccctacaaaccctcctgccgtgcctctgccaagtcctctgtcgactccattccgaacgcttcttcatacgttaccgctgttatctctcttgttgtttgtctctacgatgattccgccactgatattgctcgctatgcggcgaggggttagagtcgtcttagtcgctgtcgctgtgggcgtacccttgggtttggccggtgtaggctggtgggcttttgtaggtagtttcgaggcaggggaagaaagaggttggtggggcggtacggggtaggtctactctttcttttcttctctttccttccgtttcgcaaggaacatcacgcgtgacatttgtttgatatctcattcttgggtcgctacatatacagcttacggattctatccatcatccccctcttgttctctggactggcgtcccgtttgttgtggacccggcgagctaaactgtctcgtacagtttccgtcgtagaggtcagtatagtgttattctcttatcgcatcttctggctctcgttttttctcttgctaatggtctctttgaatgatttttcttcgatatcttcagttggctagcgatgtcttgctgaagcatcctccgcttctggcactcacgccggcgttgttggtcgctttcacggtgatcagtattccgtttatcacagtgctccttcggctgttcctcttagggtactttgaatatccgtgagtccggcttgagcaaagatgcgcttcaatgtctgggttctaactggttcttccatctctctgaaaaataaacagagccgaaggcacatatacttatcatcttcaaccgaaagctgattggctcatcatcttggtcatcggtctatgggtttggacatggggcgtttttcgagggatcggtagggtgacaatcagtggagtcgttggagagtggtattttcatcggttgcgtctccttctttttgtctccggtttttcactccgtgctcaatttactagcgctcacttggttatcgtgtctttttccattctttatggcagaaacgaccccattgcgctgacgtcacaaagagagttggatccatttgggcttggattcgagatcgagacgacaaagatagctttccagcgggcgaccggacccagcttgggtacgatctgtctgagtgcgctagccatgacgacggtccgagctattcgttatctcgcttaccggacaaagaaggtgaatcctcgtgtctctgtgcaatccctctatcaggtttggcttttgtgctgactttatataccttgggctcctatcagtttacctcaccgacgtacctatcgtccctgcccagttttctccatcctctgaacattctgtgtatgccatgtgagatcctcaccgcttggctcgatcaattgaactcgttcgtgcttgtctatgtgggtgtgactggtgagggctttgtgacctcggcaaaaggcgtggcggctctggttgggcgaaggagtcggacgggagggcgaaaggtcctagattgtgagtg

SEQ ID NO: 559 - DNA, 1682 bp, Xanthophyllomyces dendrorhous
attcacgtctgtctgagtagacatttggagagtaagggaactgagaattatggtgattcaattttatgtgtgtgtacatgaaagacacgttgatctccctcttattaaacctggcctcggtatccatctctgcgttcaccgctgcgatcggctacttgtttgcccttcatgcgctcaacgcgcctggccatgcacctctcgccggattactctgtggaggggccgtgtttttagctgtgcgattctcgttggatggacttatgaatgcgttcgtccgttcttgttcaagggtgtgtataggtctgttgtttgggaggaggttgtttctgacgaaggttgaatgtatcaataggtccgacgcgttattcatctgccatgcggtcgacgctgagcatggagggacacattgtcctgaagcaggagaggctgttagttttctcttttgttcctcttctataaattttctaaaaactgattctgacttgagctgattcttgggtctgcaactgtgtcgaaaaaaccagtttggaggatcgaagcctcgtcggggagcggaagcagcctgaacgaaacttttcaacgcaatttcttctttccatccatgtctatcttttcttctctctccccttctgtttgcctagtcatccccttttttttctgtttctacccattgcatcgcgcttccttggtgcacctcttcctgttctttcctgtccctttcttttcacgtgtttattgtagttgacgttttcatgactggttgtattcgttcatttctctcctttctggggtggtcaatttattcacgtcctctaaggttcgttctgataaatcctccggcatattctctttctgtccttctttttctccctcatacaaatactcctctctgtttacttcctttggcgcgagtaacccaagatgtgagaaacctcctcatcttccttgtcttttatcttttcctcttccttgtccttctggatatcgggaaatcacccccttattcttctgtcactctactgttctgagttgattttcttttcttagtcatttttctaatctcggttttttggttctcccttcttcttccctccttcacttggttagtcctaaaacgattgatcgattttattctgtttttattttatcctattttatctcgccgctctctctttcgctctcattctatctctggtatgtgatttatcacgccttcgctcaggtgtcacagcggtcatcccgaaagataagagatgagaataaatgaagaaaggacgaatcgctagatggaaattagatggataacgatagatcaatagtgcgcgacggattatgaacgatctacgacgaatgatgatctatgacggatatatgacgtctcgcgcacgacaagctcctagccttagtcctagtcctaatccttatcgagtcttaatcgatgtgttagtccggtcgtgaatcccggttgtacatagtctgattgaacactgggcgtcataaaccaaacgaggagcaggcggagcaggaggagcatagtccggtggataaacatagcaacggggccggccaaccgaccggcggctatgaacggggctatgagtaagtaccacggccagattacgtgacatcacgcgtcccccctcctctcacgaccctgttttttaaattacataatattagtt

SEQ ID NO: 560 - DNA, 26019 bp, Xanthophyllomyces dendrorhous
taatattagtttgccccaacgcgacgcggacacgcgttcagacgcgacgcgacgcgacatgatgtgatgtgatggttgggggctttcttctcaaagttctcctttcttgacacctagacaccgttctgttattattttcattttcagatcgttctatctcgaatagatcaaaggaaagaagaagaagaagagaaaggaagaacgtatatatgctgtttaatatagctatgtaggattgaaagtgatgtagagtgaaggaaatgtgggtgggaggagctccgcgataaagaataaatggatggatggatggatggacgaacgaatggttgagaagaacaaggaagacataataaaagctggaagaatggaagaaaataatgtgcaactcgggggatgctcagagtagatagcaaaaaggaagaagagagaagttgaatatatgggaaacaaccagaaggttcaagaagacagcccaaagaagaatatttgtttgtagaatggatgaatgtgtatgtgtgtgcgcgcgcaaggaattgactagacagctctgaatctagagggtcatcggttcaagtctcgattgatagcatctaagcaaatgtggaagatcctccctggaccctccatactcgctccccaggggaagcgtagaatggttcgccttggtgtctggattcttttgtcggtgtcgactgcccagacgacgaaggggtcaatgaggtggtcgagggcagccagctgtagtgtgagcttggggaggacgatgggctcgacggggacgctcggtggaactaatcatgattatagaaaagaacagataacttgtcaggaggaaagtcgaagaaagcagggaatcgagacaaacaagattgagcaacttacaagagactcgaggtcatggagaagaccggcgtgggaagtggatgagatagaaagaagcatggtagtgtgtttttgtgtgtttgtgagatgtcttcaagtggacacagagcagagaatgagtggtaatgagaaggaagaaagaaggatgatgaaaagaaggaaagatagaggccttatataatccagggaaaggccgaatgacggatttagaaggaggagggagagaatgaggagcgcttagaaggaatcgaacgagggaagatacagtcatcgagggaaagcgtgagagtgagcaggaatcatcgggaaaacacgaccaatggcgagattcggggggaggcgacagccggcggtgaaatgctcgaaagatctaatctgattaacaacaaacatccttttcccttggcgtcccagccgcggtctctctagtgccttgccgtgccttaccgtgccttgccctgattgcttccccttaggttgaacttgctctcactcaccgtatggtcttatctgtgtggatgtactctctacatatcatgttgcctcagtgccacgatgtcacagtgccacagttgcgaactcctccggctcaatagcacgcctgtcgggctttttctctgtgcgcgtgtgttaatcccactcctcccgtcctcctcctcctcctcctcatcttctgatttgctcctcctcctcctcctctcttactcgctcgttcactcctcagtatagttctcgcccgctccaccagcaatcgaacgacttatttcttactttctcatctctggttacgtacgtgttttagtcttttgccttttccgacagctgggccgtatgccatgacgacttttcccgcctagggtggtcctaatgagttgcaccccaaatgaacccccaagtgtaccccagaagcaccactaacttacccacattcactctcagctgacgtaatctcatacatgcttaaccctaacctcaaccctttcccttctcttctcaatcacactgaattctgcacacagtgaaaaagagaaaagcacaagagaacagacccatcactcaagcagacatgtgagtgtccaaagtatcccgttgtcttctggctaacagaggatatgcttgctcactcacgtttaatacaggggaaaacgtaaatcagcaaaaaaacctcagaccgggaaacgaggcccgggtcctctaggttcgtttgaccgttcactcttcaatcttcctgtttgcagcccaggatacagacatagatatcagaagatgaagaaagatagaagaacccaatgctaaacccgatccggtctctgttattatcctaactcagaatccgtgtttacgtgtgtgttctgcaacaatccacaggcaatcaccgtcaagatggatcagaagctaggcacgggtttcctcgcgtgtaaagtatgtggccaaaagtttgcctctgatatcaatggtgagttgttctcgcttcctttcttctttccttgtccttgtccttttacttctcctttatgctttgctttctccgtctctgcttgatcgtcgatctgatgacttcttcaattcattgtttgaatacatgtagtcctatctgcaccgatagacgtctagttcgttcattctccagtcctctttctcttccttctcctcgtgtatttttcttaccgattcatctctatgccttctctactagcaccgactggttggacaaatgtcacgagatcaacgaagcccgccaacgcgagattcccgctcccgcatcccgcagagataccaacgccaattctgaccgacatggctcatcctcccctgcccctccttcggcccgaaagagaagagatcgctcggaccgctctgacgatgaggaagatcgacagcctgtgtttgatagagacgaggaagacaggccgaggaaaagctcgagtggaaagaagaggaaggtcgaaaagaaaaagtcgaagcatacgacgtattcagactttagtgacgaggaggatttctaaccgatgtccatctagagacccgatagtgtacatttgtagttctatatagcattcaatatcttcctctttcttatcctgaatgagtaaaaaaataaagatcgtcttggataaatggatggatgatccagacgcgtcaggtttttacgtagcatattcttaacgttttggtcacctttcctaaccgttctccttcatatcttgatcacctctctcccttttcttcttcccttcttcttttgttccttccttatcccagtcgataatctctgagggtatctcctccagtgaatcatgtccgactcgatatctacacccacacccacatctacgcccgtattaccttcatccgttcctcctccagctcacctactcaaaccggctcacctgcaatccctgtccactcattttcacactgaattagacctcctagatagaatcgtgtataagaaccaatcccagtttcgactcaatatcttctggagaaaggttacagaaattagaaggttgggcaggaaggtcagagataattgggaagaaatccggggtaaaggtctcttggagtccgtcggagaggagacaaaggcaaacagagaatcccttaaacgattcgccgtcctcgtggaaaaagtttgttctcatctatacatctgttcatcttctctgtgtgtagcatatatttgctcacgaacgaacgatctgtctctcttttcttcattcatttgtattttgataatgacaaaaagcttcacctggcacttccaaaattacacaacgcactcaccctgacgatcgaactcactcatttcttacctaccgtcgtcgtcctcctcgggataacctccagactgtgggccacatctttcattctttatgaccatctggtttgcctttgggacaaatcgtttggcaagggaaccgacggaaaacggaaaggactcagaaagttaccagagtggagccgctcagggtctgaagctgtctgtaaggatacaaccggacttgcgagaatgtctgtgggagcaaccgataaggatacaggaccaatcatctcggttccatccctgtcctcgacgatgacaaattcgagcctaccggtggattctccgcagagtgaattaggtcaagtcatcgaacgtataccgagtaaaacggcccatccttccgtctatccccctggccccatcacgtcccaccctggttcatctgaggctggagatgaggacgatacaggagtttatatcgatggaattggcgaggcaggcgagaagatttccagggattatttttcacttcctatcaaccgctcatcgtcaacgtcactgtcactgtcaccgtcaccatcaccatcaccatcaccgttcgttcctgtccgcgcctcgaatgatagccttgacgccaaggtcaatgtcgatttcaacccagagtccagtttgaaagatcaaaagaagttgacagatagacggaaggtcctcaaaaacgattcttctgtccctctggtttcctcacccttatcccgatcgactgtattttcacctcctcttcctcttcctgcccctttgcagtcgtcatcgtctcttcaggacccatctggtccgagtgtatcgtcttcatctacaaatcccacaaatccaaagcccgtcaaacgctccaaagtgcttggcgaaccggttcatggtacatcaaagatcaaatctcaagctcaagattcgtcatccgcttcatccacttctaattcgcctagcatctctatcacatccaccaagtctgtcaagtccatcaatccttccactactactgctgccgtcgccgttgcgcgcactgtaccaaccaaacgcaaaatcgaccttccgctagacaactcctctgacgcgccaggtggaaaagagataaagaagaaaaagaagaagaagaagggggatgagatcgatgatatctttggctagaggtcggttatcagtcgtcagtcatcaggtaggatatctggaaggctcagtatgcctagatagtatgagtcaatgtaagatagacagagctgggggcatatatgttgttttccctaataatcaactagatgtttcttcttctttggatctggttgtcctcatttctcgtttctcaaggaaaaggaaacctctccgtgaagagtgtggcaaatctcattcgataagagtaagatcacaggaggaaaattcatgaagagagagagatatctggccatgccagagtatatcagaggggctgattgaatcacaaccgagtttcaagaaatggggaagaaaaggagagcaaaaagaggttatcagtttctgcgcccttgaacgcaagcaagaaagcgaacaatgaagaaacaaggaaaaaaaagaagaacgagaaacgagatcttaccccccaagtatctgaggaaccagtctctccaggtcttgaactttgtttcttcccagttctgaaggagcttgggtcagaggctggagtatcgtcgtaacctcccaacattgctcccttttagtcagttacatggtaacgtttaggatcaaaaaggtaaacgatggtgacggaggaatatgatatgatacgttgaagtgagcattctaccctcttgagaagatgagaagaaaacgaggagagaacagaagacagaacggaccatagagctaggtcctccaggaccatgcctaactcttctagttggcttccagccccccctagaatcacccacatttactggatcatctacacttccactgaccgaaccaatattagcggtggtggtgatagcggcagaggccatgttggaatgaggggtaggggtagcggctggtttgatagatgctgggtcgtgagtgtaatgcgggtgggaaggagtaggaggaaccgcttgagaacgagggggcgcatgaactgatgcatcaactaagtagaaacagagggttcgagcaaaccgtcaatgcttcattttgatttatggaacctaggaaaacgaaccaatcaagcaactgacttaccttcgtcatcgtctccaaaccgaaaagtctgctttccttccggcggatcacgaacccgtctggtaggtcgcatgtcactagtagcgaatacagaaccaacagccggttcggttggttcttcactcttgaaagcggccggatttggcttggcaaggtctacttccatgtcagtcggtgatggagatgaaggtataggtcctgtcgatgcaggaggaacagagagacggccaaacgtagcatgttctgatagagtaaagtagagaaccaggtttggtgttcgtacgtgggttgatgagatcgatagagaacaacgaagttaaacatactaggaagcttattgacctcggtaaagttggtgccaaccttgatatatataatgggagaacatccagggtgagattgagtgtctcaatagcagatgaaaggagcaacaagatcgtaacgacatacactgattcccacgttcctgatatagacaaaaattgattcttcagcattcttgagcactcctaaacaaggatagactgatgcagagaatgaaaacttaccgaaggaagttgatcaagtttcttttggtgaagcagatctgagtggtgtctgaggcaaggagggatcgcattcagcaaccaagaaaaaacctatggaagcacatcaaacgtttctcaccccagtccatcatagcaatctcactggcccaggagcgagggtcgtccatgttgaatgtattaacaggagtgaagctatatgatcccccaaggtgcatctcgagcgtcaggaactgctcgtcgtacggtgcaaggagcaagaaagcagaataaagaaccaacagttgtggagcagacatgatgccgaataaatgagtgcaatgagagctagagagccagttggagagcgcaagggttcaagaattcaagatcaaaagagctgagagagtcgaaagagtcgaagatggtgatggaaagaagtggcctagaaagaaatcaacatcgaacgcgttcaaaaaggcgcgtcaagtttttaacacagaatgagatataatatataagtgcgtggaatcgtatagcatttcaccgtgtatcgcattcctcttttctacactcgcttcctctaacctccttctccttctatagccattcgggcgaacacacattcatacatccactcgatcagggaggatatgagcaaaccaatatctatgtaagcatcctcctctgttaaattctcctgacgattcgttatgtaggactttgttcttaaacagagttgtggctcatccatccgtcgcgtccaaacgatcctcagtgatatccgttcaccagccaacagaggttttgttcaaggttaattagattgcagtctgtaagatacacacgggctgtaccaggctcatcatggttctgtacgttgtccctttcatatggactacaggatatccgggaataccagtctcgtccagaacggagccacggcggcctccgtgtacggtttctggggtaagcgtttatgtctttatattttgtcttgacgtctttcacatacatcatgtatatgtatatatacatatccaatacacactcaacctatatacatcaggactgatcacaaactttacccaaacaacagacggtcgaagtacaaggtggcaaaggactgaaagcggtctctctgaagatttcattagtcaaaagggaaacgttgcctagtgatggtccgtctttacttctcaaagtcaaagattgtgtgcccgttttattcttgtgctagtattcacacatcatggatgcacacactattgaatacagttggagtaacctcgttctgtgaggatgtgtcaccagctatcaccctctggtcctgcccaccgagcgaggatcacggcattctcgattctgttgttcgtcccggagctcgccaaatcaatcttctcctctggtctacatatagagtttcatttgcgctgatagaaagctgtgtccgtttctgcctgttcgaaaccagaaagtctttccgttctccattggtctgcctccgttcttgccacccacagtcgacctagtccctcagcccaggaccagggcgcctaatggccgtccgatgagtttcgacgtgtctcaaggtaacggacgaccgcctgggataggttactatttggaagtgactctactagaaagatcaaagaagaagggacttttgcgcaaggagacccaagggacagaaaaggttgttcagccgatcgaaatctggcctcatgatttacactccgactggccaatttacaacgtgccgtgagtgggtctctatccgataaagataaagatagatctcaatcgaaaccatctttcgagagctaattcataatctgtatgcggatgggagagtagaaagactgtgagcgctcaagggtcccaggtttacatggctctcacattaccccaaacatctttctctccttcttcaacattatctttacccttcgtactacatccgttacacactcagacccaaccgatcgctctgaagcacatcacattgacattgttggaaaccgtgacgttccgaactcctttgacaggctcttttcctagttctggatcgagcaagcctgaggcgatgtcagggatgttgtctgggaaaaagagcttgagccgaccaacgagctctcctcaggtcaccgttgttgcacagtccaggatggaaattccggatgattttctctttcccgaggacaagaacggaaaagtttggaatctgatgctcaagcttcccccgtccgcttcggccgatgctgacgctagcctgcctggaggagggggaagctcgtcaagaggccagattggctcgaatggaattcgatggacggttcgaaacggaagacatgtggaggttaaattttacatagggattgaggtctggggaatcaagggttaccagacccagctgttgggctcgatcaaagacgtagaggtcgtgatggactgggaggaggccggagaggcgaaacaacggatagcagagattggatatgttgagtcgttgtgtggccgcaaccgtaatcttccaacaacggcatcggcatcgacatcgacattaatacctccttcgagatcctttgagcctccagtcttagtatcacccacaccaccatcagccgacgggttctttccgcccggtctagcatcccaacctatttctctatcacctcgttcttcccctgttaaaactccctctcagattccttactcgactggttctccacaaccaacccctgtactatcacgccaatctctgtctcagagcggcaagaaccaaatgtctgccatcgtgaactctgtcggttcgccgtgggaggcagcggcagtaaaaaggaattcgacagaacaaggtaccatcaccggtctgaccgccgttagcagagatgggcttctcgaatcaaacaactcttcttcatcttcgtccaccaatcagagagtttcgttgatgaatggttcatcaagagctgtctctggaccgttagcggctgaccgaatgagagatcagagtcaagggacaaggcgatctgcttctatgtcaatagggcggccacctgacttttcctcttcatcttcgttgccagtaaattcgccattatcatcaccatcgatatcggcgacgacaaaaacggtaacgacattaggcacagatttggatagaacaggctctccaggcccaagacctccgatgttcaacgaagaagacggcatccaaccaacgtatcaaactgccgaacaggaaaaagcattgctcttccaacgagctcagttggcagcttccagttcgagtgcgaacccagcttcctcctcgactctagtctcagccatccctccgttttctccccagctcccgcctccttctcctggtccgtcatcgagccaacctcagccgcgagttcggggccagtccggcctaattagtggccgacagaactcaccacagattttcgaaagtgctgaacaagaaaaacgaagactgtttcttgaagctcagcgaagagtgaccaaaactcatgccagtgctgctgttgctcatccttcggcaactgctcctaatggtcattcttcacgggagactggatcaatctcaaacgttagcgggtctgagccgggaccatctcgacagaaatgggagacagccgaacaggagaaggcgagactgtttcaggaggcaagaaatcgagtggctgctacccaggccggaggagagaacgacctggtgatcgcttcttcttcttctccctcatctttcccacttcaagtacctctgtctcctatttctactcctggtggcagagttcaggttgtccctcatcggttctcgagcattttacctattgtatctcacgtcccattgaacgaatcgcatcgtttgtcgtcttacgttgggtctacatcacagccgggctctataccggataacatgagctcgatcaaagccgggatggaaagcgtagggagagaaccggccggtctgacggacgcttcggaggaagggagagggagagatgaactgatgagctatgagagtttatttgggaagcagaatgagaacgaggcagagggatcgggcgaaggtgggtctaaaagtaggaatacaggtgatcggatgagcacctcgaaggtgactagcgagaaagttcggccttcctttcctctttccctcctatcttgtctttgtttcaccgtgcatggtttggcgcgcttgcttactttgcacttgctcctaaaaatacgaaccgaacgaacatatggataactaaacaggaccgattaaaactgtttcacgcagcccaggaagctgtggccatccgacagtctcaagctactgcttctgccgctactgcctcctcctcctcctcctcctcttccttttacccgacagcatatgatataccctccagtcctgcaggccatatctctacacccgtacatacgcctgcacctctagcgacgacgaacaaggcgactccggtagcccaaaagactatacccccggtgttgcctgtacgtccgccggctgaatatgcggccaaatacatcgacccggcgcttatgggaaccgtaggcaagtagagggtctatcatttaaatccgaccgaagtggaagaaggggttatatcaacaaatcgatgtgatcatttccatcatctccactgttgatcgatgagtctcaatcttgccaagtattacggggtctatttaaaaatacaggaacgaaaaaagagagaaaaaagggggtgcttggcttaccttggtgacagacaagaaagcggatccggccggggaagcgtaaccatgaactgtaaccgagtgcaagactcaatcgctcgaccgccgtctctcctatccctgctcttttgaacataccgaaggagtttctatctttgattcaatacggtaccaacaagaagaccaacacaaaatgcgattccatcaacctgagaaagactttcgactacaacaggtactgacagaaaccgagagatgaacacaagtggtgaccgagcagcacgccgaagacaagatattaagatcacggtgacaatgtgtagccaccgcgcagatcatctgcttacctaagctaatttgtcgatcaaggttcactcaactctgcccttctgctgattttcttttcttctttttccctccttcttgttggtgcagctcgttctctttcctatctccctctcccaccaggtcgtcaggagtaggctcatctcatccagctcacaaagcacacccgtacacacacacataccctttctttgggaacttgccacatacactcctttctctcgccttccttcccacacactctctcttacagccggtctctgttttttctttttcttatcctcttccctgaagtggcgcgtcgctcgttatagcctagagagaggaaaaaaaaaacaagggacctacatcaatcatgaagttctctacatgttcactattctcgctcgcctcactccttctctcctcggtcacttcggcttatccgtatacggaggagtatgtcaaatggaacatcaacatcaacaaagctgccggctcggacgtgctctcctatgcttctgaacgtggagccggtaggaacacgtcatatttccatagcccttccaactggcgagcccttccgttctacaacattcttctggacaagtttgctgtaagtcctatactcttagatctttctttagataaacatatgcggctagcttcgtggatttgaatcactcgataatcgacctttggaagggacagcagtggcaacagtcaggcctattggcgtaaactctaaagacatctcgtggcgattagatattgttcgagcccacaacacatatgttctccttgcgcatacaactcatcaactcattctttctcgttcatccggccgtcgacgtatgctcatcttatctctcttgttcctcctttatttcttctcggtccacttctccaacatcaggacggagacccaacaaataacgatttcttcaagtcccagtacgaacacgatcttcacgaggtcaattaccggtatggaggagacgtcaaaggacttaagaaacggttggactatattcaaggagctggatacaaagcgatctatatcgccggaacgatcttcgtcagtcctccccatttctcattcttgcttacccttcgttctttcgtcatctctggccggagagaaacctgaaaagctcatcacaaaactgtctcatcagatcaacatgccttggcaagccgactcctactcgcccatcgatttctcattgattgatccccattggggagtcttggacgactggagagaccttgttgacgagatgcatctcagaggaatgtacctcatgttggatttcactgtcggcacgatgaatgattatatcggctttgatgggtgagtctgaacaagtttgcttccgagaacttgtcgagataatagttgacgtccatttatcactcaacaattgtcgtatcgatggctggtagctatatgaatgtgtccactccgttctctacgaatgagtatgagatgaagtggaagcacccagtccgaacgccttgggatattcagcaatatgtcgacttcactgtgagtttttcaaattggtccatcagaaaccctcatcgtatcttttaaacttacaatgcaacctttttgattacttcactcgttctcttcacctttagtacaccaataaatacaacgattcgtgcacgctccctgaattctttggagacgacggatatcctgtcgatgcccagcatcaagggtgttacgcctcagagtttgaccagtacggagatatggaagcctttggagttcagtacgtctagatatctatccgcaacgaacactcagtatagattttgattttatcgtcctctttgccctgtttattttttcagtcccgattggcagcgacagctttcaaaattcgcctccgtacaggaccgtcttcgagaatgggagcccagggttatggacaagatcactacgttctcctgtctcgcaatcaaagcacttgatatcgatggtatcagaatcgacaaggctactcaattgactgttagtgggttggcatcctggacatccaagacacgagcgtgtgcagttgacctgggcaaagataacttcttcatcactggagaggtcaccggaggaaacacattcggtgctctctatcagttcgtatctcatttctcttcttaagcccttagataaaaacgtttccttgcctgaacacccctgattgatttgaccttcctttctatcttctatccaaaccaaactcacgtcttgatttcataggggccgaggacgaatgcctaaccagacctcggactcgttcgatttgggaaccacgatcaaagcaaacgacaccgcattcttccttcgaccagaaggcgactatgggctggacggaactgcgttccattactctgtctatcgagcgcttactagatttttaggaatggatggtaatttggccgttgcatacgataccgacatcaactttgtctcggcttataacaccatggtcgttacgaacgatttccttaacccacacacgggcgagttcgatatcagacacatgtatggatctggtaacttcgatgtcttccgttggggagcactcgagtctggacaagagcgatcgattttgggttcatttattactaccatgttgcttcccggagtgccgcttcactactacggggatgagcaaggtttctatctgttcgataacggagcgtccaactacttgttcggtcgacagcccatggctgcctcagccgcctggcaacgacacggttgctaccatctgggagccgatcagtactacaacatgccactcgagaaagcgctcatcggatgcgaagactcttggaactcacttgatcatttcgacccaaccgcccaaatccgacggatacttcgtcagtttaaccatctccgtacattctaccccgctatccaggacggagtatctgttgttcaacttggaaattggactcgggaggagtatttcccaggttcaaatggaacggcaacagagtttggactctggtctgtccagagaggaaacgctgcgggcgtcggcgacaagttctttgacaatgcgactaatccgtctcaagtttggatgttgtacacaaacgagaaccagacgaagacctacaaatttccgtgtacttcagatcagtggatctctactccatttacaggaggccagaccctccaaaacatcatctacccagttagtttggtttctcctcttgttcttactgcgcttgttgtgtttccctcttttctgatcaaccttccgttcgatctttaacatagtatgacaacgtcacacttgaaaactcgcaaaaatactatgacggcaaacatgagccttatacaggctgtttggccgaacttagcatggatgcctacgggttcaagatctatgttcttcaaaaagaatggactcctcctgcgcccgctttgaccaagtttactcccggccatgatgccagaattcttgctacctctcgcgagcccagtgacgtggacatcacgctggaatacaacgtccctatgaacattgacgacgtgttgaaagcgatttcgtttacctacggaaacaacacaaatccaaacatcaaaattaccaatacgaaatctgaaattattgacggatcaagagacggtcttctgtttgccgtggacaattctcaatggaggttcaccgccacattgacgaacgttcccaatgggatcatcgatatgcaaatcggcatcgtcactgcttcagacgctacgtttggctcgacgatcgcggtcgatcatctgatgattcgaaaaggacttgccaataatatcctcgttttccccgatcaagattacgacaactccatcttctacaccaccgacaccgggtacgccgttaaccatactgctgttggagcagacttgatccgatacaccgcaaactatggtgcgaactggacggactggttcgtctgggaggacacgacggtgattgagaagagcaagttcgacggtaacagttgggcaggccaacacatcattctcgaatatttctctgagacggccgccgcctcgcccctccaggtccacgcggatattggctatgaacaccagcgtcgagttcctgcgttccttgctagagggccgtacaacaactggggttatgattccggagttacaaacaaatttacccaatctgcggacgattctcaggagtggtctattcaaatttccgctagttggccaactatcattcagctctgcgtgtttggctatgacgattatttctacggcgatgttgacggagacggtgtgattgatcgactgcctccgaactcggtcgccccgaactatctaaacatgtctgcccctccctcgccttacgttgcctggaagatcatcgtggacgacgttaccggcgcttggcgcatggaacctcaaggaaacgcagcggtgtcggctgtgatgtttgctttgctcatagtgatccctgtattgacggctgtcctggcctgtttattcttcaagtacaagttttacggaatccacactaatgaatggggagtcaaggctgagaagacttcgtacgtacccattattggtgctctcatgggcaagggcaaggaccaagtcaatggagagaagaaagaatttggagctgctggagaggtcatcccgaccaaaagcggagttgtcatcggttggccagaggatccggcgaagcctcgacggaagatgcttatcgcctcgcttgagtacgagatcctcgattggaaactcaaggtcaaaattggaggacttggtgtgatgtcgacgttgatgggtaaagccatgaccgatgtcgatctgatctgggttatccccaaagtaaaagatttggagtacccgaccggagactatgccgatccaattgaggtgaccatctttggagagctttacttgatcgagtacgtcctttcaggattctttgtttttctctttttgtgtaaaatctatcactgtggatcttgagactgatcagaggcgtttatcattcctaaagggtcgagtctcacgtagttgataacatcaaatactacattcttgacagtcctgtgttccgtgctcagacaaaatccgatccttgtaagccgcatttgcttgatagtgtattcttggtttgttttgaaagagcttgaactgaaaatagtttcttttcaactcaactcatctctcgttagaccctgcccgaatggacgatttgtcgtccgccatcttctactctgcttggaatcaggctattgcggagacaattcgtcgacaccctgtgattgatatttaccacatcaacgattatcacggcgcacttgctccgctttatctgctccctaagatcattcctgtctgcctgtctttgcacaacgccgaattccaaggtctctggcctctgaggaccaaggaggaaatgaaggaagtctgtgcggcattcaacatctccaaggaagtttgcaccaaagtacatctcatctctttcctttcttcaactcgctttgtatagatctggtgctgaccttgaacttttgtagtatgttcaattcggaaacacgttcaacttgcttcatgctggagctgctttcatcagcgtacaccaaaactcggtcggtgtggctggtgtatctgataagtacggaaaacgatcctgggcccggtaccccgctttgtggacgcttcgaacgatcgattcgctgcccaatccggatccgactgatatcgctgcgcttgacgaggaacccatcgctgtggacaaggttgtgattgatgaagtcgctgaaaagcttcgaccggagaacaagaggctttgccaagaatgggctggcctcaagcaggatcccaaatcagatctctttgttttcgttggtcgatggtccaagcagaagggagttgacttgattgcggacgttatgccttcattgctggacaagaagccttcgatccaattgatctgtgttggaccagtgattgatctctatggacgattcgcggctgagaaactggccaggttgatggagatgtacccggatagggttttctccaagcccgagttcaccgctttgcccccatacattttcagtggagccgattttgcattgattccttcaagagacgagcctttcggtctggttgccgtcgagttcggaaggaagggtgccctaggagtcggagctagattaggaggtcttggtcttatgcctggatgggtacgaccttttgttctcttcgtcttctctttcttcgtttccattaaaagctcaaacacactaactgattgttttgtatatatcaaaattaaattacctagtggttccctgtggagtctgatacaacaaagcatatgctttctcaattgaccaagacaattaaacttgcgctcaagtcgaccgaggaacaccgagcaatccttcgtgcccgatccggagtccaacgattccctgttatcgaatggcgtcaacgaaccgaggacttccacaagcgatcgattcgaatcagtcgagatatggcgaaatcaatggcctggtctgctgtggattccgagaaccatggttctacttacaactacgccgagatgtatccccatgctcctgaacttgagaatgcagagcatggattggctcgttatcaaaactctggacgccgggactcagttacttcgatcgcgactagtgcaggcgcctatgaagacaacggaagcatctatgctggttacgaagacatcactccgattgaacctgctagccctcacggcgagatccaaacttacgatgacttcttggcccgggctaacaggcagattgctaaggataccaagggatcccgggatccatttgtcgaaggcggtgatcggaccccagaaaggcccttcaccatcaactctagggtttccagtgtagacagtatttcctctatcatggacgacaaggcctccagttcgcctctgaataaggctatcgtcgatgtgagttttctattgttggtgtctttaaatgcatcttactaattctcatgacaatctttttctttcttcagttcacggactcaaatggagaggttgctcaggacttcgtccaaaagcttcagctcctcaacgcaggcaactcgaagggtgatctctgcatcgaacaattcttgatcaagagcgagcgaaagtacttcgcgaccgtgaagaaagataagatcaacgccagtactgccagttataagggatcctctatcaagggatcttcacgagactccatgttcggaaccccatctccgtctcttcactacagttacggcgaggatggtgagcacggcgagcttgaccggtcccccgatatgggactctttggttccgaaggtcacgatagcaacagcgagccggcccattacccagagaaaccgatgactcgactgcagatcactatgcaacgtcagatcggcaagtggccggtgtactgtgtcattctcgctgctggtcaaatgctttctgccacgtcctatcagatgacgctactgtctggatcaaattaccagaaggacgctgcgctctacacgctctccggtatcttcctcggcttctcgttcgtctggtacggcctgttcagaatgaagccctcggttttcgtgctctctattccctggatcttcttcgccatctcattcttcatgatcggcatacccgctctcgttgatttgtctgtcgataccaactcttgggtcagtaacggagccagttggtcttatgccatcgcctccgccgctgggttcctcttcttcggatgcaactttggagaggaggccggagcgcccactgaggtttgggccatgcgagcttgcatagttcaaggcttgcaacagctttggacgactgcactctggtactggggtaacaagctgagcggaaatgctcccggagttcagcagccttggtggattacgcttattgtctggcctcttgccgtcttgtgcttgctcttctttgtttgtctctactggggacttcctgattactacaaccaggtgcctcctaaggttcccaacttcttccgcacgctctctcgaagaaagcttgttctttggttcttattctcggagattttgcagagttactggctttctggaccgtatggacgaaattggacattcttgtggagcgacacaagtgttcctgcttggggcattctcatcatggtattggtcttcttcatcggtgtttggggcctcgttcttagcatccttatcaagcttagcaagacacattcctggatcctctgcgtgtttgccgtcggtcttggttgcccgagatggtgtcagatgctctggggtacgtcaagtttggcgttgtacctcccctggggtggatccgttggtccgtacctcggtgtcggtctctggttgtggcttggagtgcttgatgcaatccaaggaattggactcggaatgattttgctccagacgctatcccgtttgcatgtgtgtgcgaccctggcgctcgcccagatcatcggaagtatagcagtgatggtggccagagcgacctctcccaatcgaatcggtcctggctcggtattcccggatgcttctttctggtcgttcgaagatggcatcaagggttcgcccatggccagcggggctttctgggctggattgctatgccagatcctcatcgttgttggttacttctggttctaccgacgggagaccttgtctagaccatagatgcttttctttctttcctttttttttcttcccttcactctcttattttcatttttcaatctcatcatcaatttccatgtttttagtgttcttccttatactcccctccttttcattcagaaagatgatttactttcttgcctcgtgtcttctttttgcattcatcataagtcttatcatcaattttgttcgacgtttgtccaatcgcctcctttcgttttccaatttcacatctctatcttttctctccctctcaaatggacatatcctttacgtcgctctttctctttttgaacgccctattttacgatgatcagactcaagaaacacatattacttgtagatattcacttcccttccatttctcctttctattggtaattgctggattttcttaaaggggtttgaatttctgtgttcgtgtcttgtgcctgcgcctctattttctgtggctcgtttctctgtcttcttacaattatcaaatgaaattcctcttctttttcgttacctcaatcagaaatgcgttcatctggagactggatatgaggttggttcctgatttgtatatcgcaagagatatctatgcaaaagctctttgattccttccctctgaggcatatgaaatatattgcgagacgatgagaggggagttcttctcccttattaactagtctcaatcatatcgacgctctgcctctcgatcccttgagattcttcctcgagggatttgtcaagagcagagacgacttggcgaacatcttcaaacgtgttgtacaaaggaattggtctgtttcagaaagcggaaagggaattattagaaggaaataacgaacagatggacgaggataaagtcaaataagaagaagaaaaaagagtttcgaaagaaaggacgaacgagattcggataacttcaggttctctctcatctcctacgacacctcttctgactaaaccttcgaacactctcttcatccctcctccttctctcccacctcgaccgacgatcttcagacttaattgtgctcccctctcttgttcgttctcaggtgtcagtatagcgaatccaatcttaacctctcgacctttgtcttctttggcgttctccgcaaggaagaatttggatgaccgaaggagaaggagaagatatcctgtcaacaaagtcgaccgaattctgacagctgggagaccacccgctttattaagtgtctcgagagaagcaataagaggaataagagagagtaaaggtgggttcgagtgttggtatccttgtgcaccggcgataggtttaaaagtggaaggcatagtgaatcgggtagtcttatcgtgaccccaccaaccagagaggcttgtttcgaaacgaggcgagaagagaagacccagaagaagtgaagtcagaagaagagtcagcaatctgacttgtatctttctgtaagagaggtgtgaatcgacttaccgaggaagtttcgcttcatcccacttggagtgaacaaacattccgccaaccgcacctggcccagaattcagatacttgtaagaacaccagaccgcgaagtctgttgaatgaagatttgagaaagaacaccaggaacttgagaattcgttttatgggaacagacaaaaagaaggatgatataaaaaagagacagaggaatggcgcataccgacgttccaatcatggagcttcaagggaacgtttccgacggcatgcgcgagatcgaatcctacaatgcagttctgttgccagtgatgatgattgaggaagagaatatacaaagaaacaagatgagttgaccaatgttctggcgctgggtgaacatttgtgcctgtgcccaaggatacaaacaaacctttgtcttgccggcctttgcgatagattccatatcaaacacctgcccggtatagtactgcacacctgataaccagaccaaagcaatctacacatgagaattcacatgcgcacgcatggtatcgtaagcctgcagtaccatcaatcaaggaggaatgaacagagaggaatgatccaacctcgtctccttgttcttcgatcacggacagaatgtcctctgtccgaaggttaccttccccttcacgcggaaagagctcgatcaaggataacgagtcaaggctgtgaagatcaagctgagattgaacggcatactattcgagtgttcggtcgaaaagcagcagagacagtatgatcagttttctctttgaaagaattcagagcgcgtgagcgcccatggaagtgtcgcaacgaatcagacatgatggcaccgacctgatcactaggaaaagccttgccttcaaccaagatcttagttcgctttccttcaggtcggaagaacgtgacgaacaaattgtgtaggttagatgttaacgtgctagtgcacgctacttctgactctgtcgaggcgccgacgaccgccttgagggccgggacgactttatcgtcgattgatttccaagggcgatcgtgaggatgatcgaaatggccaagaacagctctgagagagggggcgggtagcaatcaatcgcataagactgaagttcagtttctttcctcctatcaaactcgagtcggaagggcatcagcgaacggatacgctcactttgaactccatacatccatttcctgttgaataagttccctggcgagggtaggttgaaggcccaatgagtttccggccatgtagacacatggttcgtctgcaaaacaacaagagatcaggttagttagtgagtctcctaatctgaaagacaacaaggtcaaagacctaccgaggtcgcccaaggaagctcccatgtcttttttcttaggaagctggaaggcttctcgggcatggccggtcggaccggcccgctcagctagaagagctgcaaactgtggagagttcaactcatgggacgatttgcttaacagatcttgtaccaggtccatctagatatgtgtcgagtgagtgaggataggtgaatgagtgagtgaggtgagcacgagaacgatgatgatgatggtgatggtgatggtgatggtgatgataagtttgtcaaacatcttgactgcttttaaaatttccccatccgaacgttcactcgcttcgagttccaacatacatccctcgtctccaccctcatagtgatcttgtagatcagaccaagcgcatcgcttgtcttgcaccagatagagctcagcatagttcgggatatcaagaagaccaggaagcaagcatctgcacgccaggactttatcctcgggacgagacacgcagtcccagctgccatctcttccgttgaccatcacccaccatctcttctttcgtctctttctctttcttttgtgtggttgaagaatggaggtcgatcatccgctcatccaagagcttgtcactctaaggcaggctctcctaaagtatcaagtaagcgttctccatagtctggaagaagcatacgcgtatcctggttgaaccgaaatccttctgatgccttcctatccaggaagcagcccatcagtcagggctcaatctccaagggagccggttagatgctaccattctctcaggtatgtttagaccaaagactctgcttgtcagcagggttgtttcctgtatgaaccgttgatctgtctggctgtgcagacatatgaagtcctgaacctttgtcctccttgcttctcaccccacagacgaactcaaatccatacgttatacctattcgcttctgaaaaccgaggttgaaacccttcgagccaacccatctccctcgattccttcaaacgaatcgcttactctcaggcagctctctcttgcccatcggaagctatcccttctcttagacgagaccgaggaacgactgcgagagcgaaccgacgaatgggtgaacgagcgagcgtaccgtggccgggctgaaggcctgctggatgacttccgaaggagagaacgaaaaagaatgggccaggagattggtctaatcgtcgacaagaaaccagacgaagaggaaagcgagaactatgaggtcgaggatcttcgaaaggaactcgaccgagagcgagccagaggggatgaggagagatctcagaggtccgaattagagattgagttagacagacgcaaacgggaggaccgctcggccagcgctgtagtcgaacgatacatggcgttctctcaatcgtcctccctatcacttcattcgagtctggagaagctccgaacccggcacacagcaaccgtcacgacacttcaggcagagaatgagaagctagcgtacgatctatccatcgaacgcgaacgcaaccgaagccttttacgaagtttgggcgacgccgggaaagaggccggtagggaagcagagggccgacggagggagatcggattgtacgtccgaacgttctctcttgaaatacatctagactattctgaacaaatcgctcaactcttctttgccgtattctgacatcgcagacgactaaatgcattagctcgggaggagcgcatcctcgaactcatccgccggtggtcctccaaggctagattagcactctctcgactagatcagccgtcttctgccaatgaaacttcttcgttccctccgaacgcagtcgtctccgaactcttacaagaagcttctcaaattctaccaccttctcctgctcgacccacatcgacatcgttttttccctcaattttaggcatcgctcccagagtatcactcgaactcaaggctgacgcagtatcaccggaagcagcaaaggtatttttggcagaagaccttgttggtggactgataaaagaacttggcgaagaacgggaaaagcgaatcatgttggaacgaagagaatgggagctctttgggtgtgaaggtctggatgagggttacgactctggttcgaaagcagatcttgtcgagccattaaaaccagatgtcgagccagacagaatggagggatcgggcggtttgagtttgaaaaaggagaagaaggaggaagaaaagaccgaatcagtcatcgaagattctgcttttgagccaggttctctcaacacgctcgacctcaacagatcctcatcgatgtccagcatctcgactttggcatccgtcccttcttttggtgctccacttcccaccactaccatcaccaccaccaccaccactactaccgagcccactttgcctgtcccctcacttgaaacaaacctaccttctgatgtacatcctctgattcctcttcttgactcctctccagtacagtatcaagccatccaacactcctttcttcttatctccggttctatccgaactcagattcaatcgctatctactcagttaaaccaaacatcaaatgctggtgatggtgacgaccgccaagaacgactgatacctcaagaagtgttgagatccgcgctggaaagactggaagatataacagaagacgccagagtcgaactggagatctggggagacgatcggaagagaattgctgaaggctataaggttggcttaggtcttggcttggatagtatcgggccggagaaaaggaagggcaagcaaagcggtggtaacagttcattagagaaagaagtgcaagcgttcttggaaggtaaagggaagcgaggattagacgtatttcaaaggaggttggaggatttagaatgggatctggcagctgtacgttaaagtgttcttccttctgtatcgctcgaaacacaatgtctttaccgaaactcattccttgtatctgttatcctcttcgcttcacgcttgatagatcaaatcagcgatcaacaacccaacattcatcctttcaccctcatctactccctccc

SEQ ID NO: 561 - DNA, 17035 bp, Xanthophyllomyces dendrorhous
  misc_feature (6563)..(6572): n is a, c, g, or t
actcccctcctattctctcatcaagtttacaacaacaaccacgccgtgtcgaatccatcttctttgactcaccctctttcgagtttgaaccttcgcaacatcatgccttctgcgttcccctccacatcatcaccgccactgtcagcgctgtcatcatccttgtcgtcacctatgcctcatcatcccttatcggcatattcttccaattccaacggttcttctcctgcctcttttttccccaccttccctacctccgccacgatgaactcgagtgcgatacagatccataacggcgcccgcggcccatcgaggtcgtccgcagttggacttgcccgatcatccttctcaaatctaggaagaatgttccgagatccaggatcacacgtcacctcggtgccaaacacgatgaggtccgtctctgtaggagagaccagaggaggtggcgaagggaaaaggatggccagagtactcagtaggactcgagcaggtgaagacttaggaggttctgcagaggaagaggaagagactgagaagacgcttgaagaaaacagaagtgttgacgatggtagtagtgggggtagcggcaacagtgatgaagactctggatcagagaaagaagtcgagtgatcgagttaacggttcaagaccattcccctccctatacacccaatacgctgccattgttacccctgcctcctcttgcatttgcttcattttgttttccttccggtcttcttttttcaatcttttttctgttttatatctttggccttggctttttcgcgcttacgttgttgtatcatctcgaacggaaagctacattcacgtttattcttcctatcactttgtgatcaactctaatggatttcttacatgcatatctcatcccactctacctgcccgtacatacattttcttcatcaaagatgatatcaaaagacattactttgttgttgtgcttacgctgcctcaaatatgtaggaaacctggtggtctaacccttgtgatgtccgcgcatgatcgagggcaatctgaaacgaaccagatgatattgccattcccactcggagtacagacagcacatctatatctaaacctgagcgctgatttcccccctcggacagaagattatttctctattctgttcctagcgccctccaagaacgccccggctccttctctgagaccacctctgatacctctctccgccgtcaatccaacccgttccccttgctctctgacgtttgggtccttacttccccaagctgcgtcttctgctaagcgttcgcctacgtggacgagttttgatcgaagcacaggttgacgaacgacagccagacgagatgtctcgatcagcttcaggtgagatagaagagcttctagttgaggagctactcgggggagcgcgacaagaggagaggtctgagatggtggagccggaggaggggagagcaaaggaagaaggaagggaaggataatgaatatgatgtgcctgatcgtttctagtttgaccgagagctgtttgagagttgagcagagtgagagagtgagagagtgagaactttcggtcagcatgttggcacgtccgacaaagatcaacagagaaacaagggaggaaaggacatgatggagaccgacctgctcgccgtctcctcgagtggtttcgattcccttaagaccagccgtggcaatctctagaacgaaccccaaaccgatggcccagcccaacaccactctccaccttcctctccctatcaaccctgcgagccaggccaaggcgatgccttcgcctagataatctagcccgatgctggtagctctgtaggcccaccaatctgtgaactcgacaggtgaacaccaagtacatcctcgaagagtgtcatgtccaaatcgtgcgtagattgctcgagtgtcatacgacgtcaacttgcccaatacgtattgcagatgcgacggaagagtaggcttgctggcgagtcctgttcgatcagacataagctcagggtaggtcgaccgaataagttcctctctgatccgacgaatcgaagaggagaacaatgggaggccagtttgagtgaagatgttcaacggtgggcgaaacaaccggtaaacatggtagacactatgggaaccaaggagagcaagaacagatggagatgatattaaaggacggagaagtttagatgaggatagggacctggtgtatgctatcaaccgaggcactcgagggaggacgaatggtaggataaggatcacaaaggtgatataagaagagagtgagttgatgagtcccagcatcttgcgcgtgtaaatgtagatgcgtgagtgttccgttcttcttcggtcaagacgatagatgggaagaagaagagcgtgaacttccgggagaccgatgtttgtcctgctttcgaacagagaaggatctcagacgaaaactctttgtcgtcggacggtcgctcgatcgaacggttgatgttgttgatggaagaacgagaagacacgaccaaaagaaagaatactcttcgatcctcatcattccatccatcccatcatcatcatcatcatcatcatcatcatcatcatcatcatcctcgtccatactagcagccgatgccatcttccatgcctctgccgacgacaacaacaacagcaatgacaacgacgaaaaaggcatcgcccttgaccgatacaactgacaagccagatggaaaactatcaaccgcagagggcgtcagctcacctgcagagttgatgaactttgtgcgttctcgtttctttccatgtctctctactgtgttatccaaagtcaaacgatccatcgggcttactgtcgagtgttgtatcgaacaaacgaatgaaccaaccgagaaactcagattgattcaatgatggctcaattagaagacaagtacaacgaaacatcgacagaagtcctgtgagccttccttctgtcccgtttccatctatgacggactacctctctctgtttggttggtcagtgagctgacgatgtccgagatgatcatcgaacgatcctgttaactctctccgcatactcagagagaaacgtgagtcttgtttccgagtttcgatgctttgtagagccttgtcgcttacttcgagaaacaccaaaacgggtattccaaacataaagtcaacaagatgtcgacacgtatagattcgttggagatctcgatttcagagatcctcagtacaccaattgccccatcatcgacatcaaccccgtctttgtcggcaggtcctacatcggctacgtctacttcttccggtctggcttccgctcctgccgatggttctgcgccatgactagtttgggttcatacctttgtacagaaccttgaaaagatgaaggaaccatgtgccctcatgctatcccgatgaccttctgtcttgtcttcattagggctttcttagtcttgtagttaaaatatcatgttccgaacgatggcgagttgttttgtaaaagtttctttacgtgtatctaggcataggatagaccaggctagatacgatatgatgcacttctttatacagtattccaacagacgctcaggccattagaatttatttaggaaaagaggatttagagctttcattttcctttttttttctttttttcttttgactacactggtacacaagagccaagccggttcatagccaaaaggcgcgaggagagagaaggaacatcatgcctggtcaggatgaatgaggtgaccacgaccatgacggacaaaggtacactcactatatcaccctcctatcgagcagaaaacgagcttggttgaagaggacagacaacccagatgtcctaaacttcttccatatcctcgtcatcttcatcgtccgaggcggatgcgctccctgtcagaccatcttgtccttgtccgagatcagcgtttgaacctgacggttggctatccgagtgcgccgtggtggtactgctggcggcggccaacctcttgctctcttcctcttcctccttccttcttctttccttcccggcttgcttgtatacatccatcaacgtccaatatccagtgtacggcccagactttacggccaccgctatatccatcatgacctccttgaggtagatctctggttgagcggttttttcccgaagtcctttgagccgccagtactcgtgcttgtcgaaatgagaaaacaacaagtccaacagttcgttccgaggtagtcgggtcgccttgtccaacgactttttcgacggcggttgctgtagtcaaatcgagcaaaaactatctttagaaaggaaaatagaggaaatagagaaaagggaagaagaaggataacactaggaattcggcagaaagagagagagagagagagggcaagaactaaagaaatactcacgaaaccaccaaacttgccctttgttcgatcggctccggtagccgctccaccttgaacgaacccactggccatcatggccatctttcctgcgccttctttctcttcgtccagcaactttaacgtccgctttggcttgtccgctctcgcctgacggtctctcatcattgcgctgtatgctggtccggatctgggacggagggaggcttcgtgatggattttcgagtagatctttgggtatactgaaagaggacagcgacaaaagttagtgaaacaagagcgagagctaacaaggaaaggcaagaagggcaaggagaggaccaagaagagacacctaccccgtcggtggtcatccttgggagtctctttaaagatgaaacccaaacgcttcgggtcgccgtcatccgtggtggctggtgtcaacgagagttcatactctgtgaccagtttcgaggtgtcgtaccctggttccggtggaagaagaagcgagatctttggctgagtctctcccggttgtctgtgtgaaggaaacaagaagaaatgtgatgagcggttgtccgattccggatgagtgtttggatagaaaaaactgagctggacgagaagaaagagcaagagaatgaaagacaagaggtacatacacatcgtataccctcatggttgccaggtgaagtccggcttcctggacctgtgcccatcgttcctgtagaaactttgggacctaaggagagacaaggagaacataggcttcacatgtccgatctttcctagcaagaagcgaatgcacaacgaactaaccttgaccaaccagatctttctaccgtcgtaaccgttctcgagttcgagaaactcttcgacctggccatcgttctcaaccgagccgtcctcggcgccttccttgtccatatccatgacaaatccgtcgttctcgtccgccatttgtgtgtatatatgagctctgagctagatgtatgagtgaaggtgtgagtatgctgtaggatgagctgtgtgaagggcgagatgaccaggtcgataaagagagggagagagagagctagagagctagagatctgggaagaaagggtttcgattcgttgagactagcaggtgttggccggtgcaccgctttgtggcaagacacctcagagggagcccttgaggtcagagacagagacattgaccacagagagtcaacgacggtagtgtagagacttcagagaagcaagcaagaggtcgttcaaacagatggctatggcagctcgatagaaagagacgacagagaagacatcagaggaaggcagtatcggaggactacagggtgaacacactatagaaggtattagggcaaggaatagagacagagagaatacaaagccagaaaatactacagaaaacactacagttcttggtagaaaacgtattagggtgagactacaaactcttactaaagacaccacgcccaacaacagggtacagatcagagagtaattaaggaaaggtgccgaaggaaccgcagcattgacacagcctgagcgcagcgtcttttggccaaagcgggcaggcgatcaggtccgatcgatagaattaaccacgccgccctggcgggctggatccttaatctgccctgccgttcgtcacaagccaccggatcataggccgatctaaatgaaaaacaccgacaatcacgtgacccttttgtctaccgaaccctcaccctccatccatccacccattgtctcgctctcgctaacactcccgttggtcccactgggacagtcactcactcggccttcgttcaggatatcacacccacccacatacatacacacacacacatagagatacacacgctcaaagagcctgagcgatcatgcccactcatcttttttcaagagcaggtgtgggtgctccataccaaggagacgatccagccaagatccagctctgccaatcataccaaccgggctttggttagtgttttgtgggctcgcgttcggtgtgcttgcgtgttattgaccatttgtcgttctctttctgtttctttcatcaatcgacgcttcctaaagtcgtactcagtgtgctcattgctatcgttggctcggcgtcgaccattgaactcttgttgcgcaggttggctctccgggggtttcctcctctctctctctctctcnnnnnnnnnnctcactccattcgttcgtagtactaaccatccgcatcatctcaaatttatcttacagaacggccaaccgaggtgcatggaacattggtctcctcataggtgctggagtttctttcggagcagtatcaacatttgccatgtatgtcccttcctctgtctgtgtttttctaaccgtccagactagatattcattacgttcagtttttcttcctgccttccttgtttcccttctctccatcttccgtcccctcccccttgtcttttgacttcaacttgatgctatatccctgtcacaggcactacattggcaacaattcaatcactctgttaatcccggcatccgattttcgagtttatggaatccaccggatcagattatcgtattctcccggttacaccgtcctcagtcttatcgtcagcgtcgtcagcatgtgtgccgcgtttgccgtgaacggactcgatgtcgagggtctcctcaccgaatggagagagacgcggaaaaagaagaagaaacagcatctgccgttcgcctcagagatggtacagacggcacaggctccaagagtaaatcagctagggaaagaacaaaatgaaaactcgacgataaagagtggagtgttttctcagtcgatacctatgaaacctacgcttcatcattctctctcttctctctctcagcctcagcctccgccttcgcctctagtttcttcttcttcttcttcttcttcttcttcctcctctgttcatccttcgcatactcttggcgacccttttccttcaaatgaatacccaacttcaaacccaagcaataccccagtcaccatcatcgaaaataacaacaacaacaacaacaacaacagcaaggtcgatgaaaacgactctccccttagccgaactcctgtccagactcgaaatccatattcttcatatctctccgttacatcgatcccgttgtcgggtcgacggatgagctttgaagagtttgcagactctgctgtgggcggagggatgctcaatcgaattccctcacaggatgttgtacctgtactctcaaattttcaatcagggaagtacaacagagggattttctccgcgctgttcgaagaagaaaaagggatgggattcaaaccgatcagcgaagagaagccgagttatgttgaagaagaaatcatgaaggacgggaatcaagttcgaatagaatcggtagaggcatcatggtccgagccgcacaaaccgctgagcaaaaaacaaggcgacgacgatggatcggaaatctctgaacctgaccaaaaactcgaccatgatcatggtcaaaaggaacggatcaatcacgagtaccaatccaccgaatggacaaatcacatagatctttccaaaagatctcggtcgtctataggaggatcaacgacagatagcacaacagatcaagagattggcacgaaaggcagaggcaaaattgtgaattggtggattagggaactcggcctgagggacgtcacaaggttcgaggtttggaaggtcgtcatcgccggtacaatctgtggattcggagtcgccgggatgcgtaagtctgtgctcctctttcctcttcctttctttcaacatctttctggccagactgacgcctctaggattcctcttcctcttgcgcacaacagactacctcggccaaagatcaatcaactcaataccctatgtcgcctattctccatttctagtcgtgctctccgtcttgattgcctgtggagcggtcaccgtcgggctgtgggtgttgtttttagtgttgagaccaaagttgaagcactctctgttgaaacgcttagctacaagctgcatccttggaggagcgaccagtttgatgcactggaccgcggtgctgggaacttcttatgctgtcaatgccgatctagtcggtatgtgttaattcctccaaatctgatctatcacaagcccactttctccccttctttcatccaataacgccgaattcttcgtctcttttccttctgttttctctcgggatcacagacattccgtccaaaacgacacaagggaccgctagacggctaatttccggacttgtcgccggtttggccgtcgtcgcgtgtgtggtgaccgtcgcgtctgttagcctggcccaccgaaggatgattgcccacaaggcccgtcgacgaggtgtcgtcctcgctgccgctatattcgacgaaaagggacatgtcctcgtcacgccggatggtgtccttccgttgtacagtcttggaaatttagatcaactacagaccgttcatcaacacccaaacgctcacaaacgatcaagttggaaatctcacatgcctcatcgattctctggtactaggtttgatgaggagagtttggattcatcgagcgtacaggatttcgatctgacaaatagccatccggcattcgtcgcctctcttcggtccacatggagttggaaacaacccgggtcttatcctactttatcatcgtcctacaacagtagcaacaacaacaaggcctcaagccgacgtcaatctactatgtctctcgatatagaggctgataattcacccaccggtcggtcgatgttggaagaaagcggagatgtcacatcgtttgtctctgccttctcaccaaacatcgctcgatcgttcggctcgatgagctcaacaacacccagaccgttaaaagctagcgcgaggaggtttgtatcaaagttcacagaggcagccgccactttggcggtcgaattgacgggtagtgcaaagaatgctcggatgctgggtgtcctgtatgatcgaatctttactaccggctttgtctcgttctcctctaccccagaaacgcatgaaccgtcaggtgcagtcaacacagtttccagaggacaacttcttctcttggcagggcgttgtgagaaccacaccgaccgggcgctctacaacagacgagggtacacctttgtagagtcttcggcgatgtgcagaatcatgtccaccgtgctctctgttcccctagccgacatgttaccgttcgttcaatctatggagattttcactaggctgaagccgacggtcccgaaggcgcaagggagagtctatgtcggcgcgctagccgtacagccattaccgtttgaagggttgaagattcttctgggagaggttgacaggacgaatatcccgatgaaggagtttggagtgactctggccgatggatcgatcgcgtcctctcaggcttccactcataaagatatcaaacgatcccacttggctctgtcgatcaacgaacttggagaggcaattgctaagatggacggatcgactttagaacagatgcttcatgaagcatcatcctcgttcaacaacactgagcctgatcaactacagatcgtactgattgattcgatcctgtcgatgctcagaagactaccacaggatgttctcaagatcctcgtcaagagcttcgttatctgtccatcaatcatcactctttcacccccctcatcgactaccaataccactactaccacacgaggattcgtccatgtgcagggaaaagaaccttcgtatatggttgtgttcagagcaatcttgccaccaacgatagacgtcagctccgttggtgggtcattcacatgggagcctttcaggctgtttagaaccaagaacgaatgtgtccttcaagaagctcgtctgagtgctggtggggatgcccatacgttaggcgcaggatcagatgatccgagactcggtggacaggctccatcgagaagaccctcaaaagttcaatggggcgaaattcgttctccccaaggtcctatccctgccaacgatacaaccagtattaacggtcaccgatggacaaagaaccagacacaaacacagccaggctcgatgttttccgaatcgttctcactctgtccttcagcgacagccacgccgatcacgccggtgacgacttaccggccgccccacattcttgttcgctcaccgacaggcgaccccacagagggagaaggaggtgagaccgatgtgaaagacggtttggatagaatcagtgagaatgaagatgagaaggagaaggagaaggagaaggagaaggagaaggagaaggagaaggagaaggagaaggagaaggagaaggagaaagagggcgaggtcagagcgtatagcgatacgtggttaagtcaacttcttctcgtaagaggggtgaacgtttgatgcttgatcctccgcccgtctcggctccttctctttcgaccccctcccttgcgatcctttctttctttttgtttctttttgttttgtttttgttttttcctttggagaaatgttgtcttctttagtcatcctttgtcaatgttgtgcattccacagtttctttccttttgctctatgttttgatttttttttcttcgcttcaaatctatctcgggcttcatctttttttcttcgcactctgtacttctcgctctgcttcctgtcttttcgtttctttgatttctgtgccaacttatccgacaagaaatcaaggttaccgtcccacctctcatgtctttgacctaaaccaaagttgtatttctgctccttgcaatacgttgatcgctccaatctctggagtctccctttcctcccttcctccctccctcatttatctctttctatagagaagaatcctcctctctgccttcccaaaaaagatctcccttcgaatcttgaacgaaatctgatcctctatatacttgcatgtatacgtatctacttttatttatttattctgccccctttcttttcccatattctttcattcttgattctttatttattcgaatctgtgcttccatctagaaggatagaaagatatctgtatgattactcgagttaaccaagggaaacgtgtgctctttaatttttgtttgtcttctaatttgtctcaaagagaaaaaggaaaactgggacatctctggtgttccccgacgggatcaatcatgatttctttattaaggtgatggtctgctgattgttcggtctgcggacaaagaaccaacgatgatctcatttattcgtccatcggttcactcacaaacaaaccgacgtatcaattcatacgtataaccaaaaggaagcaccaagacaaatacacgctacacactacacgctacacacacacacatgtcaactctacctttcctaggtaaacaaacttagaaaagaaggtcatctctcctgggcgcaggcgtatccgcactatacccatctgatcccagatcaaatgcgctcagaccggcatacgcatcccctccgttgagagtcgagcctgatcgttgtctctgctgttgttggtgctgatggtgatcgggatcttgttcgggatcgtcttcgtcgatcatgctagtcgacgtgttcgtccgaacaggcaacggcggtggtctcggatgctgctgtccttgttgaagacctcctcgttgaccgttgacatcgtctgaagccgagtttgatgggatagaagggagtgatgacgaattcgatggaagaggaaggacggctgagaatccgttggctgattgaagatgttttcgagttcttgttttatccatttgtttagttgagagagagaccccaggcgcgagggatgatatgtcaaaaaggatgagtgagtcctcacgcgcggtgtataggcaaggcaacgtagaaaagaaggacacgcacgtcgggttcatcgcaggggaatcagagagatattttgccttggccgtccgaataaatgtttgcgggctctaaatgtaagaagtaaggcacaaagaagcgatatcagaacacaaccgaacacaaggaatctgatctcttgaactttctgaacgagaggaacgagaacaaaccttgtggtagatactcgagagtgttccggtgtgcatcaatagttgatccagtaaacctctgtccattcgatcggtctctgtcgagattggtggcttttctgccaagacgatatccctcgcgcccgtcgggtcggtcgacagcagacgccagtagaagaaaccctttgatggagagcaagcaagcacgcaaaggtgatatgttcaactctgcattcagacaaagccatgccaaagagttcaaactcactcgatctcggaggtcaggattctcagcctcctcggtggccaacttgaggaccttgggcaacaattcttgaccggcaacaggtcgacggatgaacaacttgacagtcgctgtcagcagagcgagttggacctgcaagtcgatatattcatagacgtatcagtacacattcccaagacgcctcaagagaggacggacaaataatagaggggaaaagaaggaaagaaacgagagtgaactcgaacggacctcggccggctcctctacaaaggtgaacacccaatcttccaatagctcatcagaattctcgatccgatcggcatactgtcctacgatccagatcattgccgcctttgcctctggttcgtccaacacgtccagattctcacaaagcgtgccgatgatactctcatactgattcgggtatcttctgaagatgtctttgatcactactacagcctcctgggtgacatacgaaatctttgtctcgatgaggagcaggagaccagaaatgcacttgtcggctgcgctaggaattttgattgccagacgaccaatcgatcgaacagcttttctcacaaagtcaacatcaacctccgaggcgtatcttttttccgtcaacgaagtgagcagagaaggatgttaaaagattagtcacggagaggggaattttcgagaggattgaagaaagaaaaactgactctttcaattcttccagaacctcatgagcgttctgctctctggcgagtctatacatgatctcgagctttgcgagcttgacatagattgggtcattatacttgcagaagaataccttgacttcgttttgcaagatccctgggcgacgctgaatgatcagcagaatgtttcgtagcgcaacatactgaacctcggggccagatgacagtaatgtcactgttacaattcaagaaaagaaaacacgattaagagaacgcaataaggaaaaacacacagacagaagagggcacacatgcgggtcagtattatcgatcggacatttgccttctctatcatatacaggtacatcaggaacagagcgcacgaacctaagggtggtcccatctttttttcgagactgcggattgtgtctttatcgtccatatagttcatcagatagagcatgatcttgatcgtggtgagcacgaccgcagaatttgcatgttgaagcctaaccgaaattcgttctgctaaggtctcggcgtccaacgagtttgtaggcgtgtaggcaagaagcgagtcaagaatgtaaatctgtccccatctgttgaagatcagacgatcaccggacgagttgtaagataagaagtgcattagagtcgagaatctgttaagaacaaaggctcactctgaacactcgcccaacgcagctaccagtttaccggcaacagtaacattcagcctgagcgcaatctcgtcgcttctttctgaaatttcaaccagcgatgccaccgcgttggcgaccaccgttggatttgagtctgccagcaggtctcgtaatgaagagatgaacgcgggcgatcggtcgagtgcctgtcttccgataggggtcgagtatagtttggcgacgctaagaatgcatggagatacgttgacaaatatacatcatcaggaatgaaaactcgccgtgcgggctgaacattcaaaatacagaggccacgtacgaaagcgctgctgtctttctaacatatggatcggcgtctttgaggccgtgtctcaacggatcaatcaccgcggataccatagcgggcagcggaattgaggtcattgtacgaagtgcgagcgcccgaatcaatgggttccggtcttcacaatcggcgaggaagcaaggaatagcggctgaggtatcatctggcttaaatctgccataattgatcaggaagaggtagaccactgaacgcgtagaacaagtaggttgtgaaaataatggccggttgatgactgaaatcaggacgcgagtgactgttcttgggagagaagacatataaggaagagaaacaaggacgcactctttttgatctcaaggacctggataggcatcgattgaatcacatccggaaacaaaggggacactgtacatgacgtaggagtgaataataagtaaaacgaaacgcatatatcgatcccttactattctctcaatcgcgctcgagagattcaaagatggaaagaacaaggcttactatcgttgcccatggtcatctgcgaaggagaggaaggtgaatgttgaccgaaggagagacaaggttatcaatacttgccgttatcgttccgatctatatgttccttgataggttggtctatactgaactcacgttggccacgacctttttcaacacaatctttctctttaaccatgccttgtccttttttgtgctcccgctgtcgccagactgttggagctccatccggagctcttggatcttcccccgagctaattgagagagatgacggatgagagtggagcaatgatggttgacggagaattattagataattgtgtttgaggtcgagagtgcgtaaaggagagagggaaagaagcaaataggattagttgacaggtttcggagaaagcccgaggactatacaagacagacggagacgatgggagaagacttactgaagaattttgcatctgatccggaagtggatgctgacatgaaaggattaacacaaaagggtgagagaagaggaagacgatgaaagagactaagagagaggaaagagagaaggagagaaggagagagatagaacgagagagagatggcaaagtaagcaggcagatggtgttgtgtgtgggtgtgaatgggagggcgcgaggaagagaaaaacactacagattggcactatagcttgtactacgaaagcctcaaaattcctaatactcctctaaccctaccagtctatgcaagtctgtgttgacccactctgatcgtcaggctatcaccatatcgcatgttcgccgagtaagtagcgacaatgtctcatgagccagctagcgcacacacatgtcgaccgcatgctcatccaattgtctccggtagtcttcaagggaggttcataaaggcaagcaccacagggaccttgcaagtgtaggtcacagtggtacaacggatggctcggttagtcacttcacttaacacagccctcccacgggcttgtgaacgctacctaagccaatcatgtattctattccccagcgacttcgtcccttgtctccatgccctgcccggtcttttccttcattttgcgtctttttttcttttaatattttttctctccttttccttctctacaaactcgtctaaacttcttccctctcagcctttcaactctttccccctttccttcttctccttcctccttctcccttcccctcccttcttcttctccttcttctccttctcctcttccttcccttcctcctcttccttcctctccctctctcacatagccatgtccgcttctggtgagttttgttcgttgatgattcagttctagtggcttcgttcctctttcctgcctaggttcaacctagtcccttgaaagctgtcaagggactcgatcaggttccatcgttccatctacaactagaccacataaaaagtacaaaccgagatcaatgctgatccgttgtgtcattgtctgttctccttcgtccttgttaaaactttccgttcaacagctaccgaatccgcccccaccgaccccgtccagggagagaactctccggtttccccttccactgaggtcaagtcgaccggtgaggatcgctcgaacgaggacggagaacagagtcagagtaatctcactctccgagccttggtatccactaaggaggccggtgtcatcatcggtcagttgtcactctcgtttcagtctttcaacgcatccagcgcaggaacagacccattgggctttgcatgcctgaaaagccagggcgagaggtcgatccatcgttgtatgcgctcttactgacttgaagattactgttcggccaaatctttccatcttttcttatttaggcaaagccggaaagaacgttgccgatcttcgagacgctaccggtgtcaaggctggtgtctccaaggttgtccacggtgtcaacgaccgtgtcttgagcatcagtggatccgtcgaggctgtcgctcacgtacgtcttgaaatattctctgtcatgatatctgttgtcattgggtagcaagctgtctaatcttcagacaaacataatgaataaatgctcatatctcacttgttctgttaacccttcgccaatgcctcccttaggcctactccgagatttctcgacagcttctcgagactcctc

SEQ ID NO: 562 - DNA, 19805 bp, Xanthophyllomyces dendrorhous
ttcacctcagttcgactgttgatctcgcacaacttgatgggcacaatcatcggtcgatccggacttaagatcaaggccattcaggacacctcgggagcccgaatggttgcctcaaaggagatgcttccccagtcgaccgagcgagtcgtcgaggtccagggaacgaccgaggccatcaaggtcgccgttctcgagatcggacgatgcttgttggaagactgggagcgaggacaaggaaccgttctctaccaccctggagccggaggagacgccggtgtgctcgctggtggaggagctagcgctcctggagccgttgttggtcgacgaccttccgctggattctctaccggtcctatggccggtgggttcgttgccacctctgctcctactcctcgaagagcgagcaatgttggaaacagcgattaccaaaagcccgctccttcggccgcccagagcgccaccgccaacgcccctgagggttcattgaggacccagaacatctctatcccttccgacatggtgggttgcatcatgtaagtcgttcaaaattccttgaactcttctgttcttctcttgattgtactgcagagatatcagtaaacctgacaaatcgcctttcttcagcggccgggccggttccaagatcaccgaaatccgacgactctctgggtccaagatctccatcgccaaggttcctcacgacgagactggcgagcgaatgtttaccattgtcggtacctccgagtccaatgagaaggctcttttcctcctctacaaccagcttgagtctgagaagactcgacgagtcgagggtgccgagcagggtgagggagatgagtaaacctgcggttcggcaatgaaggagagatgttcggatgatcgggcttcgactcaaaggggaagcgcgtgcaggtgaataggttgggttggaaggtcaaagagccacgtcaggtcctctttactgatggtatctgactgctgtatcttggctttggcaactcatctctttgcttccgcaagaaagtatcttcaacaccaaaagatttaactgcacacaattcttcctttcgactcgcctgcctccggtctcatctctttctatctctcctcttttgtttacctttttcattttaaaaaatctctccccccctctctgccttccccaatcacatgttctcttgtattggtactgctttcgtcttagtatattcatttctagcctgtatggcatgatgctttttttttcttggtttaagggtgtttttgaccaactgaacatgttcatcatatcttttgagactcgttcgggcgccatcttgtctagtcaatgactatcgaagacaaacgaaacgagacttctttaacgaactgaaactacgtatcacgtgatccaattcgccacaactgacaagacaacatggctgttttcgccggtccatcaggaatgtgatcgcatcatcaacaatcctagaagaacacatatacacacactcaaacatacatcaacatcatcaagctctgaatatctctgtgtatctgggatcttgatatcggattgatccggttttgttcgagtcgaattctctgcttgagcctgtggactattcaaggataaacagacggaacgtgtgtgtgcgtgcgtgtgtgtgtcctgggtgtcgagttggacgccgactgtacctcgtctgagtttgtcaatcgggaagactttgaacgcactcaagactcatcaccctattgtctcaagatatagagcgagatcatctgatacaacaaaatccccatacggatatatcggggtcctcactctaatcaggcgctctcaatacaatggagcaaccaacacatccgcatcagcatcatcggcacccttccgtaaggtcaatctcacctccaagaatctcggaggtctccccatttcaggacgaagaagatggtgcaggcacagctgtcaaacagatggttagtaagctgatgggacatgtcaaaaagacgttctcatcgccggtggtctcggccacgccatcgatggaggatgaccgaagcttctctcaaggagatatgacaagaggtggaaggaatagatcgattgaccaagatattaagaaggaagatatcatgactggaaaggccagggaaggctcaggagaggtctcagccttgggactgatgccagctatcgtccttcatccttccgcgaatggaccgtcctcaccttcgtcctctggttcacatccaagcttgactacgaccaggctcaattccatatcaccgagaccgaggcctaatcttttgacaggtccggtcaaagtatcgagttctgatgctcattcgaatcggtcatcgatacgatctccaccaatgccgttacagactagatctgggtcagaagacgtttcatcagcgttcaagttgagaccgacgtcggctacgtccttgacctttgcatcctcctcatccgccaataacacttcctcttctacctcaacttctaacaacgcacaacttaaaacacacccgacattggtcacttcgctgtcaccatccttgaagcccggtctctctcgaccaacctcggctcttcaacggcaatcatcgtcagggtctgccacgtctaaattatcgtcctcgcttgcgagcggtttcagcgacgggacttcaggcgttccttcattctcaacaaggttgatgggcccatcatcagccgcgcctgtgacgagtgtagatttggcgagaggacggtccgtgtcggcatctcatccattgaaaccctactctcacggccaaacacaggaagatatccatccaaccacaaactcggttccacagcaatcaagtggcatggattcaggtgtaggaggagcacagatggttgaaacggaagcgggagacaaactggttgaaagctcttctgaatcagcagcgactaccgctcgaacgaatagtttcaaatcgatgtttgcctccaagttctccctctcatcatcaaatcacctggcgtcaccaccgcctgcacccggtccttcgagacctcgaaagatcaaccagatgtatctctctcattcggttcatccctctctggactcggcattgggtctatctccctctttcaccaacggaagccttggttcatcgttcggcggaggcgggtttaatggtgggggaggatacgacgtcggattcaccagtatacctggttatccactagctcctgagggagaaggagactcgaggagtatcaggacattgaacagttcagtcggagcaggcagaaggagaagtgtaggcagagtaattagaaagttgacacagggcgaggttctgagtaaggattactggatggcggacgagacggcgactgccgtatgtgctctattctcttattttttccgcttttttttccttctcattcaaacttctggtcattctatgttctaacaaactgttcctttctaacgatgcgcatatatcaattcgctcgtgccaacagtgctacgactgtactagagtgtttaccacttttactcggaaacatcactgtcgaatatgcggtcagatcttttgcgcaagatgcgcgtccaatatattaagagccaaccgattcggttcagaaggaaccgttagggtttgtaatttatgcatgaaaatcatggaggatagtacgtattcgtttagtctctttcgtttcaatattcgatttttgttttggcattgaagtgatgttttttgtctcactacctcttgctgtctccattttttcaatcaataaaaagccgattcggatgacgacgacgatcaccatagtgtaggatcctatactcatcctcatcgatcacctctaccaccaacactcgagtttgatctcccaccagaaggttccttctcccactctcacagccatgctcatctgccctatacccttctctctcgacctttagaatctccattgttgtcagacttaatatacaccactccattcatacataagaatacctctcccgacagttctcatccggacgagccgctctccccggaaaaacactttcagcttttcatgaattccggctacggatccccacagcaatactatgacgagcattccaagagctggggaattcatatcggtctcaatcaactttcgacgggtaagaccgagccagcgcctttcaggagaacgattggggacgaagagatggaggaacaaggtcaatcgagtgtcaagatgaactcattggatgacaaggacgagggtgggttaagccaaggaccatcagccgctctcaaagcgacgtcctctctggcgacaacggcaatgtccacgacagtagccacagcaggaggaggaacattaacgacgatgcgaaactcagaagaacccagcgcttttgcagtcgcttccggagcgggtagagcggccgatatgaacctgtcgccctatgtaacgggaagtcgaccagaacttcatcgcctagttacttcatatctgtccttttctcccaccggtcaatctcctcaaacggccatggcaggacatgatcatctaagcgaacgagacgatgaatcgttaggcttacctgttttcccaagaatgctctcgaggttcgattcgagtactcggatcaggttcaattcttccacgcggtacgattcaaacccgccgttgccttcgcctggaatgaggacaatgctgtccgccagattcactcaatccggtgggctcatggatgatctactgggcgtcagtggagctaggaggtcaagatcttcgtcggttaggtaagcgtttagcgcattgtactcaagcgtctgggcctcattggtcatcctgattaaatctgatctttctactgcctgctttgggtatatttgtttgtttcttttagtcaaccatctcaaatcatctctggatcttctttggaacacttccgacgccttctcagagaatctatagaaagatctggaatcccaaacggtgcaaagtggcagtccactttagaaagccttcttcttcaagtgtcgacttctgtccaaccaaacatcaaggctggagacgatattgacgtccggacatacgtaaagatcaaacgtgttccaggcggacggatttctgaatcagaatatgttgacggagtcgtcattaccaagaacgtcgctcacaaaaagatgcccaggatatataaaaatccgaggatcatgattcttacattaccgctcgagtaccatcgggttgaaggtcagtatatggcactcggcccggtagtcgctcaagagaaggattacctgcggaatttggtccagcgaatcgcggccaaacgacctcatatcatcctcgccggcaacgcggtgtctagattggctctggaggggctactcgaggcaaacattgcggtagctagatcaatcaagccttcggcgttgaacgcgatcaccagaagcactcaagcggaagatatatcctcaatggatagattggcagttgaaccaaagttggggagatgcacagttctgagggttcagacttttgatcacgaattgatccccggtaggaggaagaccttgatgaggttcgaaggttgtcataaggagtttggatgcacgttggtcttgcggggtggagacatggatacgttgaagaaggtcaaggaaatcacggactttatggtctacgcaatatatcagtcagtttcgcttttgtgtccagctggtttttcatcccgagtcgtctacttcttgatctggtcattctcaatactctcctctatctgtgttcatttcgtagcctgagactagaaatgttcctctggcacgatcaattcgggattcccccgcccccatcacctacgattgtcgttccagagatgcctatgttcgacgccggagaagttcaaacacatgagtcgagtgtctcgacacctactctcagtcatcccttgcctcccacgtcgtctcgacgagttcaacaggaagaacaagttctttcgagacggatctacgactcccttgttccctatcacgaagtgagcttgtcgatctcgactagtgttcggttcccgcctccgttcccgattctcaagatgagcaagctcgacctcagtcttcatctacttcgtcatgctcgggatgaagaggaagcattgcagattctgaaagatgaacaagaggtgttagttgaaaagaggggattgggtctttcggattcggaacctgggtctttctctgaaagatcatcgatatcagaaaagttaggtaataatagcgatctgaacatctcaaatggaccaagcttgccagcgagtgctcctgctacaccggctccagagcttgcttctgtgcccagtgtcatgcaggagaaacctttacttcgatccgctcgcaatcctggcagctccaccgttccatcgcttgaaagtatccttcatgctcccgaaagcgtcttacgaaacagcgcgctcgcccaggttcagcatgaacacgaggcccagcgccgaatttgggaatggtacagtggaaagttcaagcattcgttgcgtcctcaaaccaatcaaggactctattatttgacggctaccggttgtggtgaacatggagtaagttttcgcgatatctggttgtctctaaatcaacgcttcaaatgttgaatcaggaacttctctcatgtcgtgtttctctttttagcattgtgttgctcctcatttagacaaggtagtttactatcagcaaaactataatcccggtgatgttactcttggtcagtggcttaacaagaaggcggacacggcgctcgacccatgtccggacaagaactgcaatcgtccacttgtcgatcactatgaattactctctcacggagagactcgattacaagttgccatggaacgttcgttgattccagtggaggaaggaaaaattgtttgtgttacttctcaagcttctccgttcaatctcgagtgattttctctttgaatttggttcaatgactgatagcaggtttgcttatcatcatttctagatgacttggacttactgcatgctctgcgagtgtatctatgggaaagcttggctctcagagcattcctggaaactctcctgggggaaattcctcgaaatcaatttctatccagatcctgatcgatctcctctgcctggatgcccacatgactatgttcgaagtcatatccggtactttcttcgccgaaacgtcactattcgtatccacaatgaagctatcgagaactttgagatagtcttacctagcataaagtcatacggacgagcagagacgaatcttttgttgaaaaattcagaggctacctgggtctatgttcaagccggtgttttctgggactcggtcgagcatcgtttgaagacctttgaggtcgacgtggtcgaaccttctaaaatcatggatttgaggctcgcgctagccgaaaaactcgatcaagttcaagctgatcgactggcgttcatctcaaccctgtcgatagctgtttcagaggtttgttcttcttccggtattgtgtagtctttccgtatgttgatcttccttggtcttgtcttggattcatcagtcatcttcaaccgatgttctagcagtaaacccggtcttggtcgatcttcaaggacgggtggtgcaatgggacgagatttttgcagagtgagtttaggcaaatacctgtgactgttgactccatagcaatgtgtttacattccgagttcttatatatcagacttgagaagactttccttccttcagacaaggatcttcgtcgtctgactgagaagcggatccgtcgactatttgccaaccaagagattcttggatcagagcgaggcgcaacatcattgaccggctcgaccgtttccgaagtggacgaacaggatgaacactcgtattccgataaagctttcaacttgaccgactctgcagatggccgaagcgacatgtcttcccctgaccaaagaaatacacctgccatgtccaacctacttcgagaacctatccaagacggaatgaacatcttgactccagaatcatattccagcccggatttaacgtttgagaacggcgatactcctcatcactcaaactccctggtcatgtcaggcatatccgtcgagtcgtattttccatctatggcaacccccatcgctccagaaacatcgtcgttcggattttcgatgactgcagttccttcatcctcccatgatcctaatgacagtgattcgactatatctgccgttcccactagcttgcgcccgctttcacgtttgacggtggacgcgtcttgccgatccaatctcccaaccgatgtcgtttcggcccccaaagtatttgcttcccgaatacctcgaaagatccctcgtaaacctcgtcctccattaaatgttgttgcaggtttggtaaagaaattcgaaccagagagagacactgaggatgaggaggaatccacttcacttgggcgaacctctcctttcatctctcatcgatctgctcgagcctccgatgtatcctcagagagtgaagttgaatcggatttgtatctccggccaaaagttcgtcgagggaagacagacagcagcttagttgtgcgtaggagccagttgtcactgggctcattctccgatggagagctcgatgttagggaagaacaccacacccctcccctcttgatcccagcctcgtcttctcctatcaagagagttcggcaacttgcgtcgaatgattcatctcgtcgaacaagcccatccttatcaacctctcccaagagaattagtttcactcggtcttctacgtcaccaaaaacatctaataaaccacggtggacgagttcatctcccaatatggatgttgggaagataagaaactacttgtcttccgctcctattgctagtggtctacccagttcttttgccaaacgaccaagcgcgtcaggaggaacaggagctcgagtaagcacaatcacaaggcacttcgtaagtctatcatcgtgctttgttacctcttgtcatttagatacaatttctccaaagtcagtgtttcagctactcatcagttctgatggcattcttgttctcttaaaggatcggctctcaagagaggctgagcgggacagacagaagcgattgactctagctcgcggaaagagggcaaggcctgtgaccgtgaccaaagctatcgtcaagtccatggatcttcgagaggcagtcaaagacgagtcagacagtggctcatcagaggcagatgatgaggacgatagtggagatgagtccaaggagacccacaatcgacggagagctcaagaccgagggctgaggaaaccatctccgtcccaagaccgagaccgtctcttggtaccggacttcaacgaacaatcttcggtctctagtcccattgagacactgctatccttggcagaagagggactcaatggatccaacgttcctccttttggccttggtatctcgactccttctttgatgctccaggcctccgaaacaaaagctgtttctcctacactccgagaaaccgctcaacttgatttagctccgtttgacacaatcgcacccgtagcaagtctgcctcctactcctcttcagccgaaagagccgttccctggagcttcatcgactggccctgtggctatatctgaaagcgagcttagttatggaggaggcactgaacgcagtaccttgatgaagacgctgtctggtttgtgggcctttcgtaccggagattttgcgcctctatcatacccaatgcaagttctcttctttccccttatactttatcccccgatgatctcatcatgctgactggagtatctttgatgtcatagaccttctggaacccatctgttcaatgattcccgaattgtcattcgagagtgtgaacctacttctatcattgcgttcactttgaggtaagaagattcaactcaggcatatcttgttgagatagctaacagttatgtcatcctctgcacattcagctcaaagaattatggtgattcattgaggaccaaacaaccatttgtaccagatatgcgatccgaaagatccagcactgtacacagtgacgaaggggctgactggagtttcgttgggcatcacgaggctcgagaatatgaagaagctcttaatgtggctaaagacgttcatcttcaatacggttagtcaaatacctcgaacgtatatccacaaggtgccgtccaaggttgtctgattaacttgtttgtgatctcagatttcgagtcaaacggaacatccatattctgcagagtgttctttattgagcaatttgattctctccgccgacgatgtggattggcttatgaagaagggtttatcgagtctctggctaggtgcatcaactgggagtcaagtggaggaaaatctcgttcgtctttcctcaagaccaaaggtaagttgatttgatttaaaattatatgcgagcgtgtatatctcaaattgtagcttaatacatgtgtttgtcttcagatgaccgattcataatcaaagagatgtctaggcaggaaatggatgactttaccagattcgctcctgcgtacttccgttatatgactggtaggtgatctcatattgattggctgtgtagtcgatgtactatattttgttgatcgttgattcgcttttgtcgggctggccgttactcaagattcgcttgacaatgaggtatgttgcattcggctcttttacgatcataagaatatattactgactgatagagtattcttacggactatgatcataacaaagcgccccactgcgcttgcgaagatctttggtgtatacaaaattggctatagaacgcctactcgtggaaatatgagaatgaatgtgatggttatggagaacctcttcttcgagcgtcggttccaggtggtaagtgaagagtatttttacaagcgtagcctgttgttcattccgttgacaacttcatcttccggacaaaaacagatatatgacttgaaaggaaatacccgtaaccggttcgtcgatccatctgggaagctaggcgaagtgctactagacgccaacttagaaggatgtacgtatcttcataccgagcctgtcagactttccgagcttctcaagctgatgttttgaccttattgatatgtcatctcagccctttggaaacaccctctctatcttcgagactactcgaagaagattatgcggacagcgcttttaaatgactgtatgtagatgctccatgtactatatctttctccggtgtgttgctaattttgtcaggactgtttgaacacctttagccaaattccttgccgtatgtaccgtcagatgatacgggacttttctttgtctatgctgatggcctatctactctcgtacaggatctcaacatcatggactactccctcgttgttggcgtggattacaacagtaggttttgacttgtccgccgagtatgcttctctgtgtatctgatggtaaccacatgttgtatttcttcaatgactagcttccgaactagtcattggcataattgatttcattcgaacgtatacctgggacaagaagcttgagagttgggtcaaggagaatgcattctttcccggtggaaaaagtggaggagagcctagtaagttcttcgtttctctttttcagctcccgttctgactctcaatgccgtgggccgactgttttcgtgtgcttgggaaacaaaaagctattgtgggccctaaacagtacaaaatgcgcttccgggcttctatggacaactactttactctcgtcagtcttttctttttttccgaaacaatcaaacttttgggtagcaccagcaccggatttggttggttgttctgtcatctcattctcttctgggcacatcctttcccatcatgcgttctgtctttctagatccctgatatgtggatggactacgattcgatcgaccccccggcggacacttatgttccatcaggagccgggaacgccaaaggcaaaactgtgatcgaggaatccatggtcgaactttaacaaacagaccaaacaaaacaaaacaaaacaaaacaaaacaaaacaaaatgaacttgaaggacggctaccactatcgttctccttctctcctctttcttgcttttagaggatgtcttctcctttactttcttcgtgctgctcttttttccttcttctctcgtttttttttccttgctggacgggtttttcgtacttttcttctcaactatatttcatctaacgaaagttgtacattacgcttgtacgttttctttcctttccgatcataccgagatgtttgcatggccgtctgctgctctcgattcaatgtatctttcagataaagagttcggtcgtatgcgtgtgagagaaaccgagagaaattccatccatctagttggtctacaatctgagctttccaaaggggagaggaagatagagaagaaaaatagggaaggatacaaagaaatctcttcttaacccaagagatgataggaaacagacagagacgaatgatgagtagagagagcacaatgttgagagaaagatgaaacaatgcattgaggaatacagttaaggatctctctttcttttctttgtatataatatatatatatataatatttgagaccaaggagagaagtaaagatgagggggtaatggagaaagaaaaagaaagaaaagtgaacaggagaagagaacaacacgggaaaccaaggagagtacaacggaacaaagtcggatcgttcatctctttagacatccaaaagaccagcggcctccaagagaaggacgattccgtggacgacctcgggcacactctggactgcaaggtcgacacggaggtcggcatcggtaggctcctcgtagggatcgtcgattccggtgaaccccttgatctcaccggccctggctcgggcgtagacacctcttcggtcggtcttctcacagtgagcgagaggggtggcgacgtgaacgaggaagaacgttccaccggaagctccaccggtcgactcgacgatctctcgagcggcctttcgggaacgagcgtaaggcgcggtcggcgaagcgatcacggccgcaccggctcgactcaactcggcggcgacgaaggagattcgctgcaagttcttgtgcctatcctcagcagagaatccgagctcggcagacagttccgacctgacggtatctcccaaaagaagggagacacttcggccaccggtctggttcatcactacctggagagccttggcgatcgtgtccttgccagagttgtgaagaccggtgaggaggatggtgaaaccctgcttgtttcgaggggggtaagactctcggaggaccttgacgacctctgggtaactgaaccaggaagggatgtgtcctccggtcttgagtcgtcttcggagctcggttccagagatatcggccgtgggggttccctcggggacttggtccctgggcatgtactcgtcggtatcaggaaggtaagacatctgctggaagggaaccatctcgatatgaagctcgtccttgtacttgatgacgagctcctgggcgtcgtaaggtccgtaaaagtccttgccggcagagttctttcctggtccggcgtgatctcgaccgacgataaagtgggtggctccgaagttctttcggatgatggcgtgccagacggcctccctgggtccggccattcgcatagccaggggaagaagcgcgaggtgggccattccgttggggctgggggaggagcgaggcgaggacgagacggccatcagtgtctagcttgaggaagcatttgtcgatctacagaacaaacgaaaagcacgtactacttagccatcaaagcagagtaagctcggactcgagtgtggtgatcgacatctccctgtttttttgtgtcgtgcgcacaagtcagccaaggcggacatgaaaaggaaggacgacaatagaagcagactaacgggcttggtgagtccgacgacagggtggatgagcacgttggtctgtcgctctcgagcggctcggacggtaagctctcggtgagctcggtgcatcgggtttcgagtctaacattcggatcacacgtcgaaaaagacaataagcgtctcgtactggtcgcgcaatgaccgaggaaacacagtcgtcggacttacctggaaggcgacaacctttcgccaagccaacttggtgaagtgggccctcaactcggaaggagtgaatcgaagcgcaacgtagtcgaggtgaagcgcgggctggacggcctgaatctttccaccgacgtagagctccttggtcttctctcgaagatatcggacggcagggtgagcaatgtcgtctgctccgtagaccttttcggactcgagcgacttgtcgtaagagtagatgtcatcgatggtgagaatggcaagcacgttatcgtctcggggatctcgaaggttgattcgacctccgggtgcgagggacagtcggtcgacgtccgcttgggagacgtcaagcgtgatgggcatggggaagagggcgccggtggtcaatcggagagagtctcggacgctcttgtagtccttctcgttcatgaaaccctcgagaggagagaatcctccgttcatgatgagctcgagatcacaaagatgtcgctatggtgtgtatgtgcgtattcgtatcaagagaaggattgagagagagagaagaaaaaaaaaagccaagagtaagctggtgaggatggcgcaacatcaaaaaaaaagaaaaagactgaacgaacctcagtcaaggtaagatccttgaggccgagggcctcctccttgagctgctttcgcaaaggaagatcccgagcgataaggtcctgtaggataagatggaatagaacgaaacagaataccagtcaagcagagacccggtcagtcagatgtcatgctgtttaccacgctctctccgacatgatcagccccagaccagagcgaaagaatgaacacgagagacagagcgatagatgacgttggccgaaatgcaagagcctggcgcgagactgtagtgtgtgttctcctccaaaagaaaacgcaccttaagttctcctccgtgtggtgagtttgccatgattggtagtgagtgtatatgtgagcggaggaatgtgtatgggcgatggaagataggatgttttgaatgaatcccggagaagctcacgagaaaaagaaaaaaaaaatggcgtaaggcgcaataatggtgaagtctgattacgtggattaattccagatagccagacgggtagcctcgcttaggtaagcgggcatagtggcagacagccggcagcacactcccacacgcacatacacacgcatacatacacatagacacacagacaagccaggagcgctttgtggagaaggagagaagaataagaaaaaagagaacagagacgtgtattgaggtgtagagagagaggagggttaagtgaatgtaggtgggtgggtaagcaggcaggcaagctatctttcgtagttcgcctagtaagactacaaaatattctagtcactcggtctgtattcacaatgacactcatccacaacgtccacacgcattcatcctgtctgtattcgatgttaccactcaggtagttcttgctgtaaaccggctctcgctctctagttcaaaggaaaagcgaaacatatatcgggatggaggggattaagacctttgctgtaaggcaaggcatatagtgtacaatgtaaaatgaaagggcctaattctacaccaaaagagaggaccagccaagaggaaggaagaagctgcagaaggtcaaagagatgtctaaacctcctgggaagcggcggccttcttgggctttccagacttggcagggagcaactcgggctggatggaaggaagcacaccaccctgggagatggtaacgtgtccgagaagcttgttaagctcctcatcgtttcggatggcgagctgcaagtgtcgggggatgattctggacttcttgttgtctcgggcggcgttaccagccaactcgaggatctcggcagagaggtactcaagcacggcggcaaggtacacgggggcaccggctccgactcgctgagcgtagttacccttcttgaggtctaaagatggtgatcaatcgttgaggaaacaagatgagcttttggtacgaccagagatggaagattccagtgcaaaaagaaagaaagaaagatgaacgcacgtcggtggattcgaccaacagggaactgaagtccggccttggcagatcgggaaagggtcttcttatcggtctcgactcctccggcctttcctccagactttcctccagcagattttccagacctaagtaggacaagtagaagatgtcatctttagaatcacggtcaaacaagatagcggtcatagagacacaacatacattttgattaaaaggtgattgagggggttgttttgagggtgagcgtgagtgcgtgtgtgtgagtagatgaagggagcgaacgactgatgaaggaagagaaacaggatgtctcgaaatggaacaagttggtgttatatacttggaaaagaaacgcgtcaaaggagataccgcgagaagacaaggcgaaaggccacgtcgccaaattgaatatccagacgcgtcgaagtcgcgtgtgaaacgcgttaaatgtgtcgcgtggcattttgacgcgtcgacgacaggcagaatatggcgggacgaaatgacgtcgcgtccacacgcgtctacgtgttttatatccgacgcgcgacgtcgccctgatcttcccttccgtccgctcgacgcgtcgaccgcgtggcatcttcccttgacgcgtcattctcgccgctttataagagactctgtccgttccaacagtattgcctctttctccactctcctccattcatccatcacacttcaccactctcactcactctctctctcacccatcaaaccaacacctttttaattgacaataatggccggacccgcttctaccgcttccaaagctcgtaagtgtcgcttttgctagtgtattccgtagagacgaccagtcttaacacctcatcttggatctctcagccgcttccaaggctcctgcctctaaggcccctgcctctaaggcccctgcctccaaggctcctgcttccaaggctcccgccaagaagtctaccacttccaaggctcccaaggccgacggtgacaagaagaagaagaacaagaaggtatgtcgagttaaagtcctcgtgaccgttgtgttcgctcgttgaccctttctctttctcaaactgttcacagagaatcgagacctactcgtcttacatttacaaggtcctcaagcaggtccaccccgacactggtatctccaacaaggccatgtctatccttaactctttcgtcaacgatatcttcgagcgagtcgccggcgaggccagcaagttggcttcgtacaacaagaagtccacgatttcttctcgagagatccagaccgccgtccgattgatcctacccggagagctttccaagcacgctatctcggagggtaccaagtcagttaccaagttctcttcctccaagtagagcaacacccttctgccatgaccataccgctggtttcgggggtttccgctcttaccttcttctcgggactggagtcttttctcttgtcctaccctttttgtctaatttgttgtttgatacacacccttcggttttgacttttacctcttgctttctatcgaatgtatgattatgtactttttctctgactcttttataataatgagagttatatagtggcgtggtttgaacgaagaaagatctgtctcggcggggatgagcgacgatattccgtaagataagggatttcacatcatccggcttgttcatgatcgtctctacatcctttttccatcagctccgtccattctaccgacatccacaccagcacaaccaattattttcaacagagaagatcatgaccaagaccgtgctcacttcctcccatgttctcttcccagattcggatctccagccaggaacgatagagttctctgcccagactcaacagatcctcgcgatctataaaggtgaaaagaggactcgggcacagtatgaagctgaagaggagactatcgaatggttagatgtaggcgatttactggtgttgccaggtctggtcgagtgagtctggtcgaaaagttctgtctcttggtgtggaaagagaggaatgcgtgatggctgattgaaacaaaaacggttcccagctgccacgttcatctgaacgaaccaggttcgcactttcttcgttcaaacatctactcaattgatggaggtagtcctgacgaatttcttcctccggtttcatcttgacgtgcttaggacgaaccgactgggaaggcttctctaccggaaccagggcggccttgtccggaggagtgaccactgtaatcgacgtatgctccgattatctttcgtagacctctagtcttcttgtattttcaaggatactgaacgagttctctttatattccattcaatctcggtgatggatggatgcgttgattgggacgagatgtagatgccgttaaactctataccgcctacgaccactttggacggtttaggtgcgcgtgatttatcatgatgtcgtctagagttgtctaatattcaaatcgagttcatttggacaatgcttcttttcccttcttctagctgccaagaagaatgccacagggaaccagctttcaacggatgtcggattctggggaggcgtcatacctggtaaccaggtttgtctttgttcttgtggccttcactaatagaccccattcctgatcaactgatcaatctcacatctggtaggatgacctggtccctctgatcaaagctggtgtcaaagggttcaagtgctttttgatcgagagtggagtggaagaatttccctgtgtggatgagaacgatctgaggaaggcgatgaccaaactatcggtcagtttaattctggccatttctttctttttttttccctgacaatccctcctcttgcgagttgacttgggacaaacacttgctgacttttccccccaaaataatacagggtcatggtgttcctctcctgtttcatgccgaactggataccctcgttcaaacgagcgcgccttcatcgtcttgcgcatcttccacgaccgacccgacactttactctacattccttgaatcccgaccggattcgtttgaaacaaccgctatcgacttgatcatctcactcgctaaagagttcccagaagtaccggtccatatcgtccacctgagtagtgccaaagcgttgccatccatcaggaaggccaaagccgaaggagtggacttgacggtagagacatgttaccactatctttggtaggtctgacatctcctctcgcgttctttcagacgcagtatttgacaggtggtttgtttccctccctgcgctgtctttcttctttccaagcctggaagcagagacaatcccagctcgtcagacccagttcaaatgctgcccgcctattcgtggagcgcaaaaccgagcttctctttgggatgccttgttggacgggacgatcgactatgtcgtttccgatcattctccctgcgtgaaagaactcaagaacttgtgttccggagatttcatgactgcttggggaggaatcggaagtcttggcttgggagtcagtcttctgtggaccgagggagcgagcaaagggttcggaatcagagagatcgtgaagtggacgtcggagaggacggcaaagagagtgggggagggacacaggaaggg

SEQ ID NO: 563 - DNA, 1862 bp, Xanthophyllomyces dendrorhous
ctttgagggtgggcaggctgattttgccagtaagtctctttttgattttttctgttttgtttggttcggttcctctttgctctctcctccctcgctcgcgatgttgaccaggacgcggatctttttataacagtttttgaccctgaagcagttcaacatatcgaatccgtaagcttcttataacccctctaacctatttcattcagttcgatatgtgcgtgacactcactcctcactcttctatctgcttttcaggagtcgttgattttcaaaaacaaattgaccccgttcactggtcaagaccttcgaggtcgaattgtgtatgtgttttctcttctgcctctctgcttcgctcttgactcgatttttgttcccgaaattcatattgaatgtgcgctacttttgaatttaggaaaacgatccttcgaggcaaagttgtgtacgataccgaacaaggagggtttgtaggcgagccttttggtcagatgttgttgtaagaacaaaccaccaccgaggggcttctgcgggtatcggtaggacagacaggatagatcagaatgggcacttgtaagggaaatacaagggaattttctttttcttggctttgtctttgttattttcggtcgagtacaaaggttgtatagaatgaaacccgtttcacgatgaatcgtgagtacccttgtctttgagctcggaacattgtgtagttcgttttaaaaaaaagcgcaaatttccctctcccaaagacgggtgatcgtttctacaatggcacttggtagatgtatcattcgaaggcgtttgatctgtcattaatagagtattatgttgtgtctctcgtggtttacacctggagagattttcttcgaccccttgggtcgatgatcgagtagcaaacgagaatgtgcaggaagcaaacaaaaccaggagagagtactatatctttttatcgccctcttccggcccaggtatcaactccggcttttcctcgatctcacccagcaacccatagtctgcagaagacgccggcgctggtagatccatcgagagtttcccacttctcttcaaccaatcgatctccctttctccaggtctcggtccgtccgccttgagcctctttgccaaagtagaggcaggagctcggcgttctcttatatcttcatacttgatgttttcgtaagacggtctcgagggatcgttcacgtagttgaattccgtcgggacctctccgtattctccgtccagatctgaatcagagtaaggctcggaaggaccttcaaggtaggcggtgtgtgatcgacggggatgacgaaggtagaacccgggttctggttcaggaataggtttaggaggtcgatcgaacgagcctgccggtctttgcttcatgatctgtttgacaaaaggcaagcccagttcgatttagcttgttgcgcagggccttggaaatataggaataaatttagaaattgaaatataggtgtgctgacttcgacactgatagggatctgatggttcgttcagcaagattgatagattagctagctacaacaatatcggaaacgcatgagttagatgaaacgaacctcgtcaatctccatttgatccaacatagagaccctgttgatatctctctccttcatgagcgacacccagccgtaccctctactgacgtacctcccgtccgtcctcggatagaccatcagccgaacgtccttgactgggactcctttggcttctatctcttctttcaggcgctcattcgtcacatgagagggaacatatcgaacctattctccagagcaaggaaccagaagcgtgagcgagttcagagagaaagagagagagagagagagagagagagagag

SEQ ID NO: 564 - DNA, 1983 bp, Xanthophyllomyces dendrorhous
agagagagagagagagagaggggctaataatgtgaagagacatacgaatatgtggtcttttgagaacttttccagtttcgtttttttcttcttcttctttttcttttcagctggtggtgcgtacggatctctttgggttacctaaagcagaacgcgtcgtgttattccatatcaacttctgagagtgtgttgaagctgcacatcttctaaggacctaccaatgcatttgttgtagcagcactcttttcctttgagctgacacccagcaagccgagcctgcggagttcttctgacctaatgagctttttctcggacttgttcaacttgggagccggtgcttcgtactgatccatttcatcgtaatctccatcaaattgttcgtcggcgtacacggtggtagtggtggctgcaggagaggctttcaggccagaagagctgggtagagctctgggaaatcggaccaaaggcgtaaacgagagaagacgagaatgagaggcagtcaaactgactgctctgcgcatgctcatgggccgtatgaagaaagtcatctggaacgaatcaaggcaggctatggatgttcgagtttcactctgcagcctggctatgatttggacgacggtcgaccgtccgaacgatagagtggtttcaaggctgtgccccatgaggcgctgcactgcttttcaacacgtgactccggggaaccgcgcgtgttcccaccaagtgacgtaccttcatgacgtaagcaatcccatccgagttgacgtttcgtcgtccgtcgaaagttcttacttgacaacattttttcttcctcgttcttggctctcgttcatccggatatcaccatctagaatctccttagcgcacactgacaccctagttctcacaccctgctctctctcttatcaccatgcctgtcatttggggtctcgacttgaaggaaatccatccgcggaagttcaaacagttcgtttttcattgttccggtctctctcgcttccgtctgttttgatagcttcttcatatgccatgtagtgaacgaaggctcaacgctctaacaaattcgtgacttatcgctcctcatgcatcactgcattacaatcgttcacttcgaaaacagttcctacatgtttgctaagacgtaccaccttcaaaggatcaaattcatcatctaccaggcggccatgatcctctgtgttgtcggagagtacgtccgccctctgacgagtgaaatgtgccccgcattggaatttttggcgcaactaacacgaacgattttcctcccggctttttatgggtcactagatcattaatcacctcgtccattgatggttcgtcttattttcatcgcgagttgtcaacatgcatcagctcactgtgcgtgtcgattctatatacagattacatcaagcaggaacgcgccgttcgaggaatcgacaagcaaattcagtatcataacaacgacatcgttggtatcggttcatacacaatcttttgcggagtggccgttgctaccgtgtttggagcaggtgagaccggtcatcaatgcattctttcgtcatgtccggtcatggaagaaacttcacgtgaacatgcctaatcccgacaaacttcttattaacttcctcgctggtcatctcagggttcttctttgatctcttctggccggagcggcacgagtccaagcttgtcaagcttgcttggaggtactctgctgtgtttgtgactgtggcattgctggccgattgccttgcgcaaaccgttggttcctgttcctatctctctttcctttctcaaccaaggacacaatttgacgtctgattctcttgtcctttttccccgtataggttatcgtcgctcggggatccgtccatgtaactggagtggacgaggctaccaagcaactcgctctcgccgcctaccctacccctcctctccgttcgtccctattctctctctctctctctctctctctctctctctctc

SEQ ID NO: 565 - DNA, 10009 bp, Xanthophyllomyces dendrorhous
gtgtgtgtgtgtgtgtgtgttctcttcaaagcgagtggactgtgcaaagatttgaggcgacattcatttgatttaatacttttcctgttgacctcgtcggcctgcttctgtggatgagtgtgggcgatcggactgatccaagtctcgatctgcatctggatcgtcatcggcgaatctacctccttcctcggcagcttcaaactctccatgcgcgaacccattcgacgctctgtttgtttctcggtctccgagttcatgctcatggtcctgctcgtgctcgtggtccagaggactcagcaaatccaccaggtctctctcttcttcatccatctcaatctcccacatcgttagtcccttccggtccttcaggccttgaccttcctcgcctccaggtcctcgtacccaaaattctgggaactccttctcgatcacagccctgatccgggattttgtgagatctccaaactgatcctgccagtccatcaagatcctgacggtctcccaggtcgggctaggcgcttttggtgaacccaagttccgtttcatctcgatcgtcagctcgtccaacgcttgttctggccagccggttcggagcagggatgtcaggtaagaatgatagttagagagtgtgagtgggaacgagccggatcggagccatttgaatagatgatgagcggcgaaggcggtggagtgaagtcctatactatcaaacatctgatgggttgacaaacagatgaatgtaaggtcagtttcaaagctcaacataaggatgtggagaagagagaaaatacaaaggacaagacacgagctgagaaagaggatacggacgatcgagacagaagcgttattggcggccaaattcggatcctcagtctccgaaatctctaaccacatcgagtaggtttctttgagaccacctgttcggcaggtcgcattcatcatcgagtttactaacaaggtgtccatctgatgatgagaattcgagacacatagaaagagagtttgcagttgtcagatcgagagccgggtgtttcataagacaaaggagaaatcacgaacaggaatgaacggatcgagtcgacaccaagcaattaacatgtccacatgataccttatatccttcataattttctcgttgttttccctttgggaggacagacctccggagtaagctagtttggcatagtatgaaagcgcggtgacaacgatgggatgacttgcttcgatcccttgtcgtctcatgtcatgaatcatctcaaacagatatctcggactcggagttagacttttttcgtactgagagaacaaaaaggtctgaacgatcgtcaggtaagcttcctcgctcgctcccaaagctggtggatgaagcttgtaaaatcggtcgtacaccgaaaaagcatatttgtgtgtacgagagaacgacatgtaggtttggatgtgagcgagtgtggtcggcgtatcgaaatgaacatttcggatcttcatgtcttgcagtagcttccaagcgaaatcatgattctttattgtcggcgaccgagagattccaaggagaagagcatcgtacaactcgaccgacggtccatcacacgccggtgcctttgcgcgttcggtcacgacggatggttgagttgatcgctcgcgcttctcctccgctcgaaggaaatcaccataaaggtccatcgccatggggacgtctgggtcttgctccgggttgagacagtatgctttaatgagtggtagaactgtctcggccgtcggtagttctcctctgttcagtcctgcctgataatctgccaaagcgatctctctttcggccaccgtcaacgtctttatccttccgtctctgtatgtcttgttttcgtaagggttgatcattatcacatttgaatctcctgaacgaaaaagatccatcgcttggccaagcacatcctgagcattatgacgacggaacagctggttgaccgggtgagagagaggacggtctaactgattgggtttcgtcagccagatggacagtgaacggactgaacggctactgctgccggggacaaggtgcgaacgagagcgagagaatggttgagcgattcgctgagcaagagcggttggagatggtctcatagtgtataggtacagataatcaagagataggttgatcgttccttcggatcgaaatgatttaagaagaaagaccagaagttgtcaatatctaaatattgacgatcagccgattggatggcgtggatccaactcactgaggatgaaaccttgaagagtgaatattatttctacaagaccttcctgaggactcttttggttgatggcaactgagtgtttggatacaactgatacagaatgtacaaagcaaggtgatcgtgggggtgaatgagatggacgagacggacgagatggacgagatcgattagacggtgttgacttccgaccgatttctcactaatctagttacgaagaaattacaacgatggtcgtcttttttcttctcttatagtctccttcctctcgtccgtcagcctctcttgccgtaggatgatgagcgctttgtttcgtttgtcgtctgtatgtacactatgctcttgctatcgatgatgtgctgttcagaaaggaagcaaacgatgtgcagatatcgatagtcagactagggtcctagtcattttcaaatcttttgtagtactcgtgtagtcgacctacaacggattttcctaataaaacaccttactacactttcgtactacgacttcctaatgagcccattacgcaggtctctaatgaaacttgtccaatagaacgtcctagtacacttactacaaaccttctctaatcatttcagtgctcgtcttttcgtgggttccatccaacagacatccaacagatcaccatacacactcatcccatccactcactcactcgtttagacagaccaccttctttgatcgtcgtgtctcgtgctggcatataagtagcctcaaggacggctcagataacgctgttagtttcatatcttttttgttgttgtccatgttttcccttcatattcctgccgtcgttgtcgtcagtggccatcatctgtcgaaaggaacatgtactacagctcttccagctttttctcgtttcccttttggtttctttgctcttttgtgctcgttcctcacatcccttctgctcgctattgtccttcctatctgtgctacctgtcttagtccctggtcggcgaacccgttgatatctttctgatcgctttattcactttcgatacgcatactgctctccttttctagacaactctcatcagaccaccgcctgctccgcttcaatcgctccctcggacctcttcttcttcttgacaaaaggctgccatggccaaaaagaagaaaagtgcgttgcccgcagttaacagagggttcgccacgtcgtccgtacccaaaaaggtccttccacccgcaccggtcgagccaccggtcgagggtctctcgcagaccatcgataatcccaacggaacagaccaaaacgcaacatccgcaacccacaaggatggaaagattggaccggagggaaagcccaagggcgatggcgaggaagactgggaaaaggaggagagttacttgcaaagcttggtcgaaaagctacaggaaaaggtagagaaggaagtcgctagaaccattaaagtgagcgttctcttccaagcacatgccttcctccagtgtccgtgctgtcctcttctttctgatcactgaactttcttgtcgccgttcttgtcaaacagaccatagatttcgagaaacgtcaggcaaaatcctacccacaatttgtcattccagaatccattcaggaacgcgctctcgacttggcaaccaagatggaccaagccaaccagagtaagccttttgttgaaactggattggatttcgtttgtaccgagctgattttcagactgctcttcctaacctttccccaagatcaacaaacccttctggacgcgaccaccgatatagaaaagattctgctccgactggcgatcactcatggtgttctcacaaaaattgggtttcagcccgagagaatcgaagagtgcctcaaggcgctatcaaactgggatttagacgaagctttcgactgggtcagtagataccgttaatcctatgccttgtctacatgtccagaaggctgatcgtactttcgagttttctcttctctcttgttagctgtatctccattgcagcgaagacgagcttctacaagagggtgacttcgccccaaaagcttgtgcgttctatcgctttcctctatttgatagtctatgtgcccctttctttgaggctgactcaacctttggtaattttcactttgtagctgcctcaatgcccgcaactccattccagcttccttctcgaccagcttccccagttggtcataaatcggttggcccatctgtgcctctgacgcctgtttctgaaacgcttccgtcaactcccgccgaagaaatccctcctccactatctcaagtctctgtgccatcttcgactactgccattgctcctgctccggtagaacccaccaaatcactattcgcgccggcagatcaagagggcgatgatgatacgtctgaagaagacgaaagcgtcatgccgagtctagagtatgccaagcttcggatgaagctagatgagctcatcggcgtgcctgttgggactaaccttaagaatgggaagccagcaaagggaaacaaaaagggccagacaaagaacaaattagttgcaggaaagaacgaaccgccagaggctgtaagcgtgagaaagaagatggaggtcgtgaaggcaatgtatctttggaacaaagatgatgctggtaggtggccatatagtattacgtacccgcccgccgatctttgcttgctgacagatctggtttgcttgactttgcttgcggtttaatcatcagaaactgaatacaaacatcttcgaaccaaggctgacgccaaagcgctcgaagatcgtctcaaaggcaaggtctccagcccgaacgcaacgaccaatggggactcacattctgcggcgtctccgatttcttcagagaacgattcgaacgtgggcgcggctgtgactgaaggcagtaagaaggctggggatttattaaatggtcttggggacaaggcggatgatggaatgatcgatgggctgggtggagtaagcattgttttctctttcatcggctgagctggggatatgtgttgacttgtcctctctttctctttctattactctttccctttcaaattaattctagctttttgaacaaatggccgccgagccctcagcaacggttcctgccgctgatgccaacgtgatatctcgagcgatgcctcttcctaaacacttcacctctgccaccggtacgcccaagaccatcctacagactctagccgtcaaacttgaccggttctgtctcgtcgactatgctaccttgtccaattcgttccacgcttgtcgggcgtcgctcaagatccgttggaaatcgggacgagaacaacaatgggcgatgacggatgtcggttgccattccatacaggaagcagagaattttgtggcgacgatggcgttgttcgagttgacagtcgtcgagtccaaaggcgagaaaggattgtggaggacgttaccggccgcgtacaaggatttctgggatgaactcgacggaaagaggaaggaagaagttgatagagaacgaagagtgacatgggggatgttgagagccatattggattcgagactcgctccaccaatcagctcagagaccgaaaacgaagtcaaggtgcgtcatgtttttctctctcctcaagatcgatttatggaccacttactgatacttgtccttcacaaccgttaattcgacttaattcctctagcccaccaacaaatcatctgttgggcttattcccggcttcgagtttttaccacccccgccaccgctttcaaatttggcaaccggcgcattctattctggtcagatccaagcggactttcagcgaagagtcgatagtccgaattatcaacagatgcttgtaagtttttccttcttttcaaggcgttgagcgaaagaatacgccgagaggctgacgacattgtcggcgttatgattgaatatatctcagaaacaaagagcgaacctgccgatagcttcttttagagagactatcgtctccacactagaatcatctcaagtgcttgtcttgagtggtgaaaccggatggtacgatcatttatccgtctcttgcttgatcttcgtgacttcaactgaaaaagccatcatctcttcgccgctcttttcataaacaaaaagtggaaaatcaactcagttgccttcctttttattagaagatcaactctccagaggtcaaaattgtcgaatatttgtcaccgagcccagacgaatctctgccatttcgctcgctcagagagtatcgcaagaacttggagattttcctaatcaggtcgggttaatgtcgtcccttgttggttattctatccgtttggagagctgtacatcgaaaaatactgtgagacgttcaagttcatttgactttcaattcgtcgaattgcttctagttgactagacagagttgtcatcagactgaccatctttcttggtcttgtttgtgatcggatttgtggtttagcgtttgacattcgtgacgaacggaattgcgcttcgaatgttggagggcggaagcgctagcggaggtgggaagggaactgcgtttgatgagatcacggttagctttctcatcactgttcaggatttctttgatccgtaaagttgataaggaatgtcatttgcttttgttttcacaccgcgttctcttagcatatcatcgtagatgaggtccacgagaggtccatagaatgtaagaaatctcctcaactgatttccgtcctttcactttatttattgacttcgtggttttttttcctctatacgaactcatctttgtagccgactttctgctcattgttctcaagacacttcttgaacaacgtaaagatctcaaggtggttctgatgagtgccacagtggacgccgaaaagatttctgcattcttcggtggttgtccgacactttccgtaccgggaaggacgttcccggtgaccacgcaattcctggaagatgcgatccagtattcgaagtggttcattaatggagattccccttacgccagacgatgtatgtcctctcttgtttgccatctcttgactcgacaggctacacttcgcaccttcagactcaactgactgatcctacaatttgatctatgtgccagatggaaaataccaaaagggcagacctgtcaagttggattggaatgaagacgccatggtctctagagatgcggacgatgacgatgatgaccaacagaagaaggaggatgctgcgccagtcaaattggagaagaaatatgaggcaaaatgcgtgtcgacagtgaatatcttggatgatcggttgattccttacgatttggtaggtccatcttatcatgtttgaatcgtctaccaacaggcattttttgttttactgatagtgtgacgaatcgatgggtggcttagatcgttcgactattggagaaattatgtttcgaagacccggctagctttcagttctcggcttcgatattgattttcatgcccggactgtatgaatcttctttttgcatgtcttgtttttttctgtttgctcctatctgactgcttcaattacaaaatttttcgtggttgcttcatgcaaacaacagtaatgaaattcgtcggctcaatgacctcttacaggaacactcggcatttggaacacaagactttatgatcttccctctccattccaggttcgtaactctatcgaaatttcacacatctccttttcaaccgatgaatatttgttcattctctactcctttttgattcgcccttgtatagtgtgtcttctgaaggacaaagtgcggtgttcaactatccaccgcctggggttcgtaagattgtgatttctacgaacatcgccgaaacaggtgttaccatcccagatgtaagataaattgctccgctccgatgatacgttcctagaaccgtacgtttgctgatgcctttgtatccttcctttcgcatgaattatagtgtgtgtgtgtgattgattcgggcaaacaccgagagatgaggttcgacgagaagcggcagatatcaaaattagtcgagacttggatcgcgaagagtaatgcggctcaaagacgaggtcgagcaggtcgagtccagcctggactggctttccatctgttcacaaaattgaggcatgagactcaagtgggtattcgtccatgcagaaccttctcaggttttgttcccagcttactgagtgactaaagcgttttttttttcttggaaacagcttcaagatcatcctttacctgagatgctgcgtctttcgttgcaggatttagccctgcgaatcaagattcttaaaatcaaaatgggcaactcgattgaggaaggtacgttggcctatgcttaccagacatggtcggacctgtaggaagaaatctgggctgattgttgttggcgacattgttcttgttgaatatgtagttctgtcaaaggccttggacccgccgttaccactgaacattcagcggggtatgttaatcttcatgtagatatgaacttgcgatcgattctaatccctttatgctttggatcatgtggcgattgtatagctgtatcctcgcttgtcgaggtcaaaggtgggtcaactttgtcccgtccagtttgcgttgacaaatacctcaaaactgatcggttctcttttatgttatagcgctgactgtaaacgaggatatcacgcctatgggaagacttctttcaaaactacctgtaagctgctaatcgttcagttcatcttcattctttactgtgtgacgtacgccaatctgacacatgttatcctctcgcgcataaagatggatgttcatctaggttagtccagctcttcgttttgaattagacttgattgcctatcgatagctaacgaatggctttcgtctcttaactttgctttcacaggaaaattcctccttatagccgcgcttttcaagtgtttggatcccgccttgacgatcgcagccactctcaattcgaaaacgccttttgtcgctccgtttggcttggagcaagaggctgatagagctaaactgagtttcaaaacaggttcgttggccctttctcgaatgtatcgtcttgtaatttcgaagctgatgacctcgtctttgattcaatcaaacatagacaacagcgactttttgacacttcataacgctttcgacagctggcgtcgcgcatcagccaacccgaattttgtgcgacagttctgccggaagaactttttgtctcaccaaaatttacagcagattgaggaattacgtcaacagctcttcatgtaagtccttcgtttctattcaaaaggctttgttgcattccaaatcatcttattaatgtaacctactgctcttctgaactctctaggtatctcgttgatgctggatttgtcgaagtatccgatgagcaacgtacagcgatcagccggttggtcctgttttctctttccctcgtgatgaaccatcttgcactcagtttcttatctttcgattgttgttttctctacagagctcgatattcccgaagaggacctcgttttgtcaccgtgccaccagcattcgataccaactctgaagacactcatatcatcagcgccgctctcgccagtggacttttcccgaaaatcctgtcgatcgatccatcgagtggtcagctaagaacattcagtaataatcaaccggctagcattcacccttcgagtgtgaattttagaatcaagaccgccgactttggatctaatcatctggcgttctttactatcatgtaagtcctttttctcttttttttttcttttttttttttaaaaaaaa

SEQ ID NO: 566 - DNA, 37008 bp, Xanthophyllomyces dendrorhous
gaaagactctctgatcatatgggtctgaataacacatcgattggcacaggcactccaaaaagctctatgcttgggaaactggaccagtagatgaccgagccttaatcttgatgtgtggtgatactgaattcaaggtacgtgttcttcaaaccagcttcatacttccttgtcgcgcgactggggctgacgtttcttctggtttctttcgtattcttagctggcatcaaacctccttcaacttgacaagaagctcaaacttcagttacatccaaagaccatgttggctctcaagtttttgcgacaacaacttagttcgatcataagtgttcgaatgagagctagggagatgacggctgaacaagaatcagtctgggacttggctgtcgaactgttgggtaaagaaaaggatccagagggcgaaggggtcgttagtttgtaataggagctcgagaaatcgaatgtagtttttttgttcaaaattttctcctgagcatccttgcgagcatttctaccatcgtgcgcgcgatttatgggatgacaaacattgaagaacaagaatacagaaaacaaaggtctatagagacgagatctatcagacgaccaaagatctatgtggattgcgtttaaagatacttttgaatagtaggctccaagacgtccttcatggatggaaatgggtaatacgttcgcaaatagttgacaaaagatgaacacgggtttgtcatttggacgaacatgcaactttgataaggaagagacaacacatacggtagtggtagatcgatcaaagtactcgacgacgtttccctccttgtcgaccaagaacttatctacatgtaccaaagttgagatttcgagttaggtatcagctcagtataggcgcgaggtaagaggataagaaatagcagacgaaccgaagttccaagagatgttctcaacagccttcttctccttgagatacttgtagacgtcattagtctctggcccgttaacgttcgacttggagacgatggctacataagaattgatcatgttgatgagagtaaatcagccctaggttcaaacgatcgaaggggcatgagatggaaagaagatccgagagagtacatacggaacgagacgccgtagttgagctcactaaggtcagcaaatgataatgagacaagagttttggctaagcgtgttataatgatattgatttgtaggcgaatgcgacaagagaactgaccagaactgagcgatctcgtcgtccgttccaggctcttgctcctgtacaatcgtgatatatcaagcacgtcagactggcttactcaagcgtcatcaaagaagccatttttctgtgtgggtaaaagaaacgaagtgggtgcaacagaccttgaattggttggacgggaaaccgatgagctcgagtccttggtcgtgatactttgtgtaaagctcctggagaaccttgtactggggggtctttctgttgagcgtgaagaagaagatgtcggataaagccggtctctgttagcgatggggagtcaaagcagaacacatgtgaaactggaattctacatacccactacaaccatgaaaaagttcagaacgttcatcatggagtacacaccagtcagaaataaagaagagaagagtttattcagagatcgtctaatgatagacgcaccacttggaagcgacgttgacgatgaggatggtctttcccttgaattgatcgaacgagagcgcctttcccttccgaagagtggtctgtacacagtataagatacagaacagtcagaacggcgttcaccagtgtccatacaatccgccagatcttacggtgagagcgtagaaagaagacatgatgtaagaaatggatcagagttgctgatggtgattgtgatggttgaagattaacaaataaagatcaagcgacgagcgaaagacagccgtaaccctaaccacatggaatttgagaatcctcttcttacccgtacatcatcatcagcagtcgaccaagatacaaccatcaaacaaggcaaaggcagcaatgaacacgcttctctatcagtatgcagccctgcagccagtgtcccacttggtcctactaccgcctttggatcttgctagaagtcaggacgagttgattagactacttcttctgaatcagacgttgatcaagtatccgcccgctagaaactatagacgatcgttctggaagcgcttggttggagtcctggagagcgcggtcagcctaccagaagcagaagaggaagaactggttcgttatgattctgatcttgtataaaatcctgggaggaacctcactgacttatcggctgttgataggaagtcgacgaggcaatctatgacgcttacctgctggccatacagccagacgacagtgatcctatgcaagtttctgtttcttcaacttctttcagaaaactcaagtgtcgctcttctaactattgtgtttaatttggtgtcttgtaaaaaaccggccgccaccttcctctcacttcctgacctggattcagagcacagtcttctttttctccgcctggtcaatcctacaagactttctacttcccgtctccctcctcgcctggtttatccagcgcacctccgtcgacaaatcctagtatagtttcggacacatcaatcacactcaaagaagagcagaagactattcaagcaggaactaccggtctacgcacatggggtgcctctctccggctagctgagctcatcctgtcgaaacctgaactattacctgatacatcagacggtcgagcaacaggtgtgttggagcttggtgctggagttggctttttgggaatacttgtgggaatgttgatgaaatcaagaggagggaaagggaaggtcgcgctgacagatctcgatccgagagtcctacagtcccttgaagataacgtagcattaagtgaggactatatccgtctatgacaagtgatcagtgaggggcttcctgtcattgacccttgtttctatcatttcgttcctcaagatggactgagctcggagattgcggtcgagcgactagactgggacgatatcttgtcacccaacaagacagatagagacgatgtcacaagcctagtcgatagaatagaccccggacttgtcatcgctgccgacgttgttcgttctttcttctcttttcctatctctcttcctgaaggcaaaaccaccaaccatcttgatcttttccttttgagtgaaggtttacgacccgtccatcatccctcctctcatagctaccctaagccatctacttcaacctcgcagccattctcaacctcaaatgcaaacacgtatcaatgaaccgacgccagctccgccttttgagaagaaagtagcagctataattgcttccactgtacggaacgaaaacacattcgacctgttcatcaaagctgctcgttagtatatgtctcttttgtgttctttctctttcgttccaatcggttcacgactctccctttaacatttaattctctctttcttatgattcccgcacgacaatcaaacctacctggataccccccccaaaaaaaaaaccacgatatctaggagaagcaaatctccgtccaacatctatcgatatttcgtctctcagacctatcttctggggctgtggcgaaggtggaggatcgactgattcggctgacgttaggattgttcgttttgaatacgatccatgactgtgtctatgctaagactctctcttgttgtcttgagaagtatggaagggataccgttgaggaatgtataatgctgaagcatcatctacataacagcaacatgattgaaagtatacaaggaaacaaaggacgaagatagatagactgaaacaaaatagagccatacaacttgggggaaaaacttgtgaaggggtatgtagagagtatcttatatgtctaatcctctctccttcgccacagcaagtctttgtcaagattatacgaacccaactcagtcgtatactcaagggaccatcaacacgaaattgagaagactcacaactgttccaaccgatccgtcaatttaggaacttccaaaagtttttgttccaaagcttgtttctcatcttggagcgctagtcgagctcctgcatcaaggggcgcaaagacgtatcccccctgaccgtctttttttttaatttaaatacgatatttaatagcgacagcaaacttacgagtcaggaatccgtcttctcttgcttttcatctgaatgttctagagggaggaaaagaaaggtggttgatgtgcttaccatactgatgcatccatcatgtacacccatcccaacaaggagttagacaagccacacaaatcactttctatttacgtatcacgagttcgagctcacctgtagaattgtcgaatgatacttccataaagatggtcgatgggacacagctacccattccatccgataagatatcgtcaagtcacatcactgggatcgaaattgctaagcgatccgagaaaacttactgagcatggttattcccagtgcggttgcatgatcatatcttatagaaacattgatacacatgatatatgttagtccggagtactcatgctaggtgaatagtgtgtagaagaatattgatccaaatgaatatcagaaaagacgtacatcttcttctcgacatcgagggttacaccagaagtgcattcatccagaatagcatacttcacacacatcgtttgatttgtttgaatgagatctcatactcaatttgattaaattgcttgacagattgctgcagcatggcttacctttggtgagtgatagaacagtcgagcagcagcgatccgttgcttgtcgcctccacctagttagccgacaagcaaaagtagatcagtcagaaagaagactatctggaagcgttttgaatatataattgtagctcacttagagcattggcccagtctttctgtgtctcccacccgccttctcggtcgaccaaggtattcaagtcgacagcttgaagacaatcgcgaagatcatcatctgtcttccctcctgagagaatcaaaccccgtcaaaccacctattcagtctactgtttggcccacacaacctcttcttataagaggaaccatggaacatacgactagccattttttctagagtatcagggtaaatgatctgatcccgaagggtaccgagcgataggtaaggtctttgagggatgtatgtgaagtcccttcccggcggtttatgcaccgtcccacctgagatgtgatcgttgagttcaatcatcatttagataaggcccataactaaagttggttcaaagtacggaattgatacactcaccaagtacaggccctgagggattcaacaacagtagtgggacataacttagaaaacacaaaggagaatattaaatcgaagatcagaagagaactcacagagacctccaaggatccggaacatggatgattttccacaacctgaacgatatttcaagccaatgattagttcagaccccttgcgatccactcataacatggtgtgacttctgtcatggcgcttaccgttaggaccaacctattagaaaattcattgaggattacagagtagagatatatcagttcaaagaacacatgaccaagagagcagtccatcgattcgttgagacataactcacgatcaagagatgtttctttatgtatataaccaaatacgaggatagagttggtacaggcatcatgtaatcgatcaccgattcaacggagaggcgtgaagaagcatctcaaacttactcctcgcttgacgacaaagctcatctccttgaccaagatgtctccattaggcgatacgattgggaccttgtcgaactcaatttcttcactttcgatgacattaccaaccccttgaagcactgaggtcattgtgggcgcacatggtcaggttatatgcccagaaaatgaaggatcagcctagattgagctagttcgcggatgtacagataggacaatcaaacctttagcgtttctctcggtggatgcactgctgaccaacttcttctcatatttgccttgcgcgacatcctcgatggttgaaaacagatcagaaactcgagcggtatagcctgagagctcggccaattccttaaagatggtttgcggtagaagctgattagcggtggttccacaaatatttctgacctcgttagacaatgcgagactgaccttgtaagagtacatgacccggccgacagcatcacttgatgacagaagaagccgtcggtttgttacaaagctttcggtccgtgagcctatggaacgtagtcagagtgacaatcgatgatccaaagtgagaagagtaagttttcagctgaagcaagcggtcacgatatggtaagaccgaacgtctcacctaaatctgatgcagttataccaggaagaggaatgaagacaggaatcgcgctgttgattaccaggaatgattagatacccgaacaatacgtaacatacgaaagagataccaggtgacgctcaccagacgagtagctaaacggcagagcatcaaatcaaaagtgtacgagttaatttaattctcgcttcaagcggatggatattttcttactccaaaggaaccccaaagccatttcacaatcccctcctccaccatcaagtgtccgcccttaattcggacaacttcgttcatgtgtttgatcaacgcataatatgatcgctcgattgttgatttctcgatttcctctccttgaaggagcgcaatctcttcggcgtgagatatcaaacgagaatgagtgaagcgaagctcgcctgaaagttagatgatacataggtggtcagtccaagttcagtcagagcagagtttgaaagaagacaactgaccttctagccgcgctgtgagtgctgtaaactgcccaaacgcaggagtgattgctttgactatgataatcagaaatcgatgtacgtgtcaatttacgcagaagaactgtatttccgcgaattcaaaaggctgattgctttggatcacttacgaagggcaccgcttccttgaattagtagcgtaaggatcaccattccttctgccccgacgtttcttgataattggtagttaaacaggattacgtctaagatcggctttgctatgctcgaataaagtgaggcaaggtggtgcgagaagttctgaatgtcctgagtaatcaattgatcgggactgaaagaggaaacgttggtaaagtttgtgctttcgcgttcaatcaagatgtaagtaacgctgtacacactttctaattctgtcatccaagttggctgacagtaatagtaatcaggtgtcaatatcgtagcattagcctacttgatggtcaggagaagccttacatagtttgtaaaacacctgttcgtagcttccatcttcttccccaagatacatccctagcaccttctgggtcagcttcgtcctgtatgtaatctctagctttgattggagatattccttgaagaatgacggaacatgaacgctatgatgagtacctgatgttcctaaaagacaaaataagagagggacgaacaagcatggagttggcgtatgttgcaggtatggcaatcaagatccattttgccaagtttttcaaaaacaggccggactgagctcggactaaggagctcacgatcctgttattgtcatcaaatattgtgtgtcagcgagtattctcatagagacatgcgagtacgggagtgatatatagaaagggacgaaacaaaccttccatccagatcggctacatatagtgagagtagagtgcggaagaccagaaaggcagaatgtatcgctagaaggcccgcctctctggacttccaagacgggatgacgatgcgaagcagggttcttaacttggagtaaaacaatgcatcgacctatgatcgtataagaggatgaatcgtatggtatcaattgaccgatgggagattagcgagaaggacgatcggagctgtaaaggacgatagcagtaacagctggacgaacctctactctaggcttagatcccactttaccgtgggatctttccttctttccacctagtcgaacggttgaagacggtctgatggcagacttccagaaggaggaacatgcataaatgacgaaagatgcagtaagggccttttggatagtcggacgatgtctgtgaacgaacaggaagcatgccatcgatgaacacacagccagatcgtgttagagagcaaacggagagacggcgaaacaagagtgtaactgacgatatgtatgctttagagaaacgctgaatctccgtagctgtactcatagagtagagctgctgtgtatgtgtgagttagcgagatgaaggacccaacgataaagtgctagctgatgtcgtcgtgtaagagtcgagacgatagatcagagaatgcaagcgttgaacgcggcaggaagctggtccgggaaggatacagccgggttagcggacacagctttattgtttcacgtggatgattccgccacattactccgcacgtcatccatcaacttcgaccatcgacctcatcctcgacacccagtacgatctcattccatccatcatgccggtctattggttctgccacgctgtcggtattattcagttcatgtgtgtttgttatcagagctgatagagagtcgtgttttctatgataatcggtagtgtgaaaaccagattctccaaccaagaaactctgttcgtaggccatatgccagcttacccagatcgggtggtcatctgtcgttatgatctgaatctgatagcctgatcgttgcatcctcatcttgatcaagtctgatggcgttcaggaatgtccaaactgctcgagtgatttccttgaagccgtgcgtttcagctctcgaatgaatctcatctattcagatattcgatatacttactgacctttatggaccgaaacaggtcgaagcagaagatgaacatgaagatgagcctcaattgataccgatagaatctcaagagctcgacttgtccgtcttatccttcccttgtcttcctcattccttccgtctagatctaatatgacgatcattcacactacacagagacataccaggcgctttcccccagttgactccttcaccctccacctcttccgtacctagccgtacacgaacacctgacgacactcgaactctgatctctgctcttaccaatcccacctcagaattcaactcacagccttctacgaggcgtcgtagagaagcttcagggccaattttcaggattggtctcgggggaggaagtataacaattggtggagacggaggagcaggttcagccaactcgggtaggaggagtgggctcggtgcgcgtatagggactgacggattgaataccagttacacagagggtgtccccagtttggctgagtaagttctttcatgaattgtaatctctgcaatactcgcagctgatttcgatgacatttcgacaggttcctcaataatagatttagtcctacgcgggaaaggccatctcgaggatcttcttcggaccccttccttccttacgccaccaccagggctgttcacccaaatcatccttcgtcagctgcaaacaatccgcaaagcatctttgaggttgtaagtttcaatatcctcactattgctcgcgtcatctccgccggaaacatgaaaggtgtgaatttatcaaatttgttaatcatttgttgttctacagatgtcagatttattagatgcaataggagctcatccagatccagacggagcagagaatgacccctttcaacaaatcatgcgctcccgaggaggtttaggggctatcttcgggacgagctccggaggcatgtttggagactatgcaaccagccaagaaggttcgcatcagcgtcttccatcgttcgaacgtagtttcagtcaagtcgctcataacgacacacttgataaatctttattgaaacagctttcgatcgaatcatcactcaactggcttccagcgcggactccactcaccgacctatacccgcttcaaaatctcagatcaatgaccttcccgtcatcccaatttcttctatttacctgggtaggttttccggaaatcataatcactaactgtacttgaaaaagaaattttggctgatgcgcaaggttttattcatcgtcgtatacgtgcttttgatagatgggatggacgacaaaaattgcactatatgtatgagcgctttcgagcctggcgaagaaggcaagaagttgccttgtacacatctgtttcactcgaattgcatttctacatggctcgtacgtccgctttttgcatcctttatgatcctttatgaccggtaggatgtcgcgcttatattcttgtcacatccatcatcatatatttttctccttcgtttcccgacactctcctctctacttgtacgattaaaaaaccacaaaggaaactaatgggacgtgtccgatctgtcggtactccctaatctcttcttcgtcgtctggaacaacctcgcgtccacttcccaccccacgtttatcctctacagctcatgtacagaacgcaccattgaattcttctacaaatcacagttctgtttcttattcccaagcatcatcaccatctgaatgtctctcacagccatttccatcttcgaatatgtcgccttccggactatcgacttctatcgaattaagtcgaccggtgcaaccttcagggtcagatgcggtcattgtagttcagtctgaaggcaatgagaggaccagtgggagcaggagtgggttcagaaagagcggagcggcaagtgggacgtccgctgtcgaccgcgagagaggctgattacctgggcataggctcatatgagaaaagagtgagagtccttatttcaaacagttgtcttgagcttcatctgtatgccatcgatttgttcagatcatactacatcaagtatactttacatcagacaaaacactgatacaacagaactatatggcacggtataacttgacatagtcgagagatggttttatactaaaaagaggataccggaaaaactaacattaaatgaggatataaaaaagaggcaaacacataacaagataacacttgagagagaaaaaattgctaagcttaacatggggtttctagaaagaaaaactatctgttcctcgtctccgtccacctcccaaaagacctattaacgccgtcgacgagaacaacccaacgctttgtacacctcaaaccaaaattgtatcagtctcttggtgacaaggagactcaagaccgtaacagaagagaatagtaagaggttacgaacgtcataccgaccgcgatctggataatctggcctgcagcttcgaatgcatcggtgtaatactttgcggacgtccctgctgttgaatccctaacgtatgcaagcagacctccattggtcaatccagaagctgccaagggagggaatgtgatttgaaaagataataatgtcagattatagatcgaagagacaagaacatctgaggtttggcaagagagacttgcgtagttggaagaggacaccaacaacctacgatagcacgaatagcaagtaaatcatgaggtttaacaacgaaaatgagcgagagaaacaaggaaacgcatggaagggggttgactgaccatgagtacaaaagcggagtgcttcatcgttttgctcaagattccccctataattccacaggtaaaacttccgatagcctattgtctccaacgtcgtcaaaaatcatcagtcaagaggtccttatatgagaatttgagtggctgtaaaagagacacaaacagaggtgatgtccggtcggttgataaatgttttcccagagaagtatgaagccgcaaatccagagcaggcaacgaccaccatgtagattgtatcccattgaaacagaggctgtttatttcgaacgcacgcgcatactaggtatgagggcaccaacaaaaaatctggttggtatcaatacgggcaaaagatgttgagtcaacgcttttgcacatgttagatggaatacatataccaaaatcgagacactcacaaaaccaaggactctacagattcaacacagaactcatcaggaaggcagtcgaagaacaaaactttaggctttgactcacgatacttgctctccaccagggagcgttcgttcgcaacgctgtacattgatagtcactcgatcctcgaacagccagccccgtcaaacgaatgtagaactccataccgacactgtcagatatctctatcagcctttatataaatttgaagacaacgtgagatttagttgaaatactaacgctaggccaaaagaaaggaatatagcatagagcacggagaacaccaaacgaacagcgcccgaagtgattcttctatttgccagctctacaaaaaaagaaacaagaaaaaagtcgctgagtcaatacaacacaagatacttcaggaagggatccgcgcgcaccaagacttccacaactaagaatatataacccatagtttggatcagtgaaaagtttgaaggctgattttgcaacagatcttcatttgtccaaatgcttacaggacaaagtatccaggtagaatgaagacgatagagccagcaatcaccgaaggaaaacacacaacgccactagaactgatagcagccgctatgaaagagttgatacaggccatgataatcctgaacaaagacacgcatctaagtatttgctgtctgatgtatcaaaaggcagtataacgcggtataaagcagagactaactcgaatagactcatgtagatatcgtttttgctgattgacatctggaccagtaccagaagtactccgagaggaaaagcggccaggcaatcctataagatatcgtttcaggtagacaaacgcaatttcaggaatatagccaggcaaacatggatgtaatcatcgctaaaaacgcttacaatgagagatccataaaatccgataggttgtactatagcggagcacagcccacctatgagtagttgatgccaaagtttgtaaattggctcggaggtcatcaggctatcaatcaaagctgatgcttcttgaggtcccatcttatcatgaacaacctgaaaaccaaagtaagtatacgagtagcaacccaaattatagtcagcgtcgaaaaaagagagctggggtcaattagatgacatacctgccaataaatcttatgggtcagtgtcagatttcctaaatcaagtccgtgatcttgcttgagaaactgccttcgatatatcagcaatcataaaatcacctgagtatagaatttacactataaacttactctagtttcggatgtgcgtgttgttgaatcaaggaatgaaacaactatagttcccggaagatgaaatgtctggcattctatatctaacactctagccgttgcttgtatttgagcttccagtcgacttccaaaagaaagaaagagcgttcgccatcagtaaaactcacgctactgcaagctccttgtgaactacttactggctagccgaaccaaataacatgagcgctcgagcgagtttaagtataaactcttgacgagataatatatctgcaacatgctgggtgatctgtttattgacaaaaggagattcaatagatagtcccgaatgcaaaactgacgctgaacccatcgtcttgcaattgatagtgagagaagacacaaacaaaaatttcgcgcttcttcttcttttgccttgccttctctcgtcgcttttgttccctctgccagatccgatcttcccacacaagtctttctcgatcaggtgtagctttggaagaagtagtttgatagcttttgttgaaaattgaatccgatgaagagtatgcttcgtcgaaagaagtgcgcgcaagtcggtaaccaggctgagaagcatccggggcgatctgtaaagaacaagtctgactagtaagctaagatgtacgacaaggtcaggagcgtaagccgtattacttcaactgattttggagaggcaggggcagctaaatgggtcttgagaacacaaaattgtaccagatttgatagatcagtggtctatccgacaagatagaactatcgaactgatgagaacagacagatgtagtgacgagactgcccagtaccccggctgcattcctactgacatgttcaacatcggaactcccgactgtatcgattagatccgaaccgaatgagagtgtctttccccaggtttgctttgctgctctcatgacaatctccttcttttcatcgaggatcctgctccgcctcgatctcatcgaattcttgctcgaagtgagactagaggatctagacatagttcttcctctctcgttgagttccacatgatatggcctctcaactttcatactcttgaccgtttttgctctttttgtcctccttcgatcttctccgggcgattttaaccacattgctttcatgcggtgttccatcaagaatcgctctcttcgcgcaccctcctctctcgaaccagagctgcacgggctgcctatacttggagttgagtctcctgataaaggctgattctgtagcgacaaaagcaaagacaaaacacctgggttggatgggacataggataaggaagtcggaaaccctgaccgatggttcacggctggccgaggatatgttggtagtccatcaattgtgttatcgttgtcgcgataggctatgattcctgctttgatctgatggccaagcgaggacttcaattcagtatatggattcaaagttgaagtttggtccggccctttcagaatcagacttgatggaatcgttcttggtgagtacagatcaaggaacccggaagaatgggcctctacgagggtctcagcctgaacctcgagatgggattttctactcgtcaatttccctcctgatgggacaccagaaacgcaagatgggaccccgtctgtctcgaagacatcaatataattgtcgaccctgttcctgagactgaagaactgtccatttttcagatcgttcatcccaggagatgtatccaattgttctcgcgacaggatcgatagaggtttagagatgttactttccaaacttgctattttctccagagcaagcgaaagaacctctaaactagaggcatcgttcaaagacggagaaagaataggaatggagatgtgaggggtaccgacggcggacatagtcagtgcatcggatgtatgagacaggaacaaaggccggagtttgggcttctttgtcgatcggtcagatagtactgagctgctcatactggtgttcaagcgaggatggagaagatgaaagtgtacacctgaaaaaagaaaggtgaacgatgtcggtggcgaaagatctcgatttgagtgcgtcagatcctcagtagacagccaaatgaagtgagataattcttgcaagggccaacacgactcgaaaggtacagccaatatcagtttccagggcagacaatagatgtcaggagatacagattgccggtcccatcatcagctctatcgaaaatggcgaaggtacgagagtatacaaccgtctatacatagtagaagctgttcaaacaagtgtggttagtgtgttgtcaacgaagatagtactgagaagtccacaagaatatggaaggcatatgagcaattgatcaaaaccagcagaatgatggctgagcgccaacaggctgccaggttttcgatatgcagtctttctctcatctcggaccatgctcaaaagcctacattcaacattcaagatgtgctttatatcgctatgagatcagtaattgagcgcatcgctcttctttcagaggatcggatggacgtgtaactgaatcgatggacgctgatacaagcgggcctgggcgcatagtcgggccggtaaaacgtatcacgtggtctcggtcaaccgcttcgtccattcagtttctggaaagagagtatgtctttcttcacttctatctgtcttccagcttgtctattctctcttcaagttatcctttcaaaacaggtttatcctgaacttcaagtcgtctggctatacctatacgaaatcgatttgtccttcttgacacatcctttcgtttccttcgatagattcgattcgatccaatccattcagactttgtacacccatttgtctctatgacgtctccgtcttcgcttcctcacgacgatccatccttatcttcgggacaactctttccaccgggattcgacccattaaataggaggcccagtgcagatgctggctatgtatccgcccgatcgggtttgtgtctctcttatatcctcctcttcatgtccgcgtcctctcggagactcgactgattcaggacttctaaccacttctagcggacgcgttgctgtcggacatccgaccgacctcgcttggacctcaagcactgatgtttctgaatgagcttttggatgagctgctgggtactatcttgagacgatcccatggcttgagtacaggtgagttcactcccatgttgatggaaacctttttgctcgggtgtgaccgcttacattgatcgtttaatggatagaacgaatcaaaacgttggcagtgccatacattatcccccttcctctcagtcgtgaatcgatatctgaggccgagcttgagcttctgagctggacagagagcgaagagggtcgggcgtggcaagggacaaaagaaaaggtgtacgcatcggatgatgtcgatgatgttgagcaaaggtggcctctcaaggaggcgtgggatttgatgagagcgattactcaaacctactctgtgagtctttctatcggaagggtcttactttatagtactgattgagttttgtttttaatctgtctttttcgaaaaaacacgtcgactgatgtcatcaatcccttcttcatcgaatgcaatgcagacgttcggagataaacaaaagaacgacagatccattgcagcctttataaaggcaatggagagtaaaggtggagatacaagagaaggaattgttgagcccgctgcattgtacttgaccgctatcatagagtgagcgaatgatctccttgtcaaatcacctaatgttttaaacgaactcatgagctaatcacttgttataatgttttcacgaagatatatcgccgaagatgtactggcctctctgtctagggtgatggtcaatgatcctatgctgtctcaagcgagtcctaaggaactgtacgctgcattgagtcataatgaggttttatatgagatgatgaagcggctgaagagcaagttcaaatcccttttcagtacctatgttacttttcttcttaccagcttaacatgcattttttcttggctcgcggttatctttagtcaaaaagactatagaaaatcatctggcctcaaagttacgaagcgctcctgctacaagccgtaaacactcacaaaacatcgctgtttcaggatctacggaagtagttcagcacggggatccacattcatcaagtactgctgtgatcgacttgtcctcaacctctactcaatatgactcagtcaattcaacgtctacccggaaatcaactgagccggccgccagttcgagtaccagcaaactattttccaaaggatccagaccttcagttgagtataatggctccacttcgagcatcgtagggatagcaggaacttcgaaggcgagcttagggaagaagacaggtacttatatccgaggggttggcgaagacgcgataccatcaaattccagtttgagagtaagtagcggttcggccaatcaagatagtacgataaacgagggggaacaacaagcgctagcgaaacaagatcactttgacaagctcatccaaggggaaaacacgaaaaagatgactttgacgccgcacgcactactcaggagttcggtgagttttcttgttttttagctacattgattaccctttcactatcttaacgcacggaattagctgacaatgtgctcttctctgctttgcacgcggccattgttcgtattgcttgtgggctacatcaacgattttgacaaataaaggaaaacaacgtcgattaccgatcatccaagtcccgaagccctgtcagtcgaaacgggttacagcagaatcatccaagatccaacagttcaaacggaaaaggcccggtttcaccggaattacttacgattgcttctggaaagcttttggaccgcgctgaaattgacgaagaggaggtgttggaaaccgaatctggctctcgctcagctcacggacagcttccctctatacaagccaaaaccaacgaaaaactaacaaaaagctcttcacaaacatacccgtcatctgatcttattggtctatttaaccaaccttctccagtggttcttgattcaaatttttcgcaatcaagaaatgtcagcagttcccgggtgacgaacatcagttcaagtgatgttatggatcctgtcaaaggaaagaaatccggcggattgaaaagcttcgtttccaaagtcatgaagaactcttcaaaggagactcgagatcccactgtcaacgattgttcttctcccatgacagtaaagcctggtccatattcccgtacgctcaagtcggatctcaagaccagcacggaagacattagccccgagatgggccgtggtttgtctagttctccttccccggtagtggttcccaatcctacttcctccacccgtgaggaacctccctcagttctcttgacttctcgaccaactggtcaatctccctctgccgggcaaccatcaaccaatcctgttgatactctgcgaactgaacctgtaattggcggacaatcattattggtgccgaataggtccttccggttcgatagggtgccggctccttcagttctttcagatccaccttctccgctgtctacgtctgtcgctctcacaaggcctgaatacatttcggagccaatatcaccaaagaatatgatgtcaatgaacgggctgtcaaactctgagattgaatctgacgttgacctaggacgtgtgacggggcctcaaataggatcgatctcaccggaacctgccttggatcaaccctcttcgcatacagccaacttggctccttcgtccgctcaagcacacgctttccaaacctctccaacatccatccctttggttgaggttgctcaactccgggagattctaactcatgctaccactgcagacgaatgtcgattactcgttaatgcactacttggtacctggaaagtccctcatatttctgtaaatcccccctctagtggggatgaacaggcctctccgcgggagataaaggctcatatggccaatcaagtaggaaaggtttacgaatggcttttgaacggagagaaagcttcgaacctgtaaccttgagaactctagtgaggtaggctcaaggatgggggtcgagcaataaggaatttaagagtcatcgtgttttttactgctttgcctatctatcattctatactttgtcttgtcaatcgatcttgtcttatctcgttttgctgctcaggatgaaaacctcctcattcgtatatcgtgtctctgcgttcacatcaagactctgcttttactgctcttcttccatatctctatactctgcttaatatctatctcggctctttatatttgcctcgcttctgttaccaacgtctcttcgatcgatgaaggtactttttggatataaatctcaagacttgagaaaacgtgacctttagatatagattgaagatcgacgcgtaagtggacgcgtcggattttatcttgttttggatatatgtaccagcttccaactccaaacgatcttctcttcatcccggtcatcctctcaagtctgccgtctcttctagcaaaagatctgttctagacaacaagttctctctaagctagaaattcccttgagctggattccctcctcttcgttctgttctcggtgattagactcgacagatgcctcgagaggtcaatccacccagagcgtatgagtctcctatcgttccccggatacttctttctcagtcatcctcttcatcaacttcttcgaatcaggctaaaccggcacccgtagatcgagcaggggtctctgggctgagaagaggaggtccgtttggctttcataatgctgtcgtgtcgaggggttcaaccctcagaaactccatgaaacctaggttagtcggctaacacagatatcgatgtataagagtgtgttggcattgatcatacttcacacactcgaccccattccgttcgctcctctttaggccatcagcaacggatgcagttatagttgagaaatctataaggtcccctgattcagattcacgaaactcaaagttattgacacccccaagtagtcaagaagccgagggtgaagggattgatccttacattaaacattccacaggattcaatttcatggatagggggaacgtatgttgaatcaagtaattattctgaatgattggctgtataggctcgttctgaacttgatttcggcccattatccttgtttagtcagaggttccacaatccccgatacatccgtctctaatgagaagagcagtatctgaaacacaagcatccacaccaaatcatcatgccggtccctccaaaccacgctactcagcaaaaacgttcttcgatgatgaagaatccgattccccttatcaatcaactacgccgtcggctgcacctcctgcttcatactttccaacctcgtatctccctactggttctcctttgaagtcttccagggtacgaaagagaagcagtgcatcgcaacaacctgaatacaacatgacttctccaaatactcgatccaaaaagcaaacgagacggtctcatcctccaccaggcgcattctctacacctcaaccgtcgctttctacccatgccaggcgcaacgcagccccacgaacagaaaagccgacaatctcttcgaatcgaaggaagctcgaccctctttccaagtctctatcctatccaacttcatccgcgaatacatctgcaaccgctggaaggagacgccgatcaacccctcatgtgaatggaaagcctctgagagcacccatgttcgtgattccagattttgtccccaaggggacgtcgatggatccggatcctccgttaccacctcctagtcctggtgatgaccccattctattagttggaaaccggagtgatattttaagtcagcctcctgtgctagatgattttcaagaggcaacttacgactcttcaaacggtgaggaggttgaccaagacgatgcgcttgtactaaatcctgtttctggaagaaaaggaaggacactggctatgttggatacagatgaggacatagtcaagaccgaggatgattgggaaaaccctggattcgagatggatcttggcgtcgcagatcatccttcgtcagatgcctcaagtcaccaagaagagagcgaaagtgaaggagaccaaaaccctgacatatcttacgtccctgggtccaagtcgagatcattcaatgaatttacgaatgggctcatccctggtctgcgagaccctccgttccctacaaccttgtctccgtacgcatctcaaaatacctggcacaaaccagtgccgccttcatctgctcagaccagtcgtaaacgcactgaagaactatctgttccgaggtccttcttctcgcctcctttgcccaatacgttttctttagatgatgatgcggagaatattttggggtttagcattcctccacctggttcatctcgatcccctactgtcactcgcacgatctcttactctcccttctcagctgcccattcgaggtcgtcccagacccccactccaggaccaagctcacctgataaccacgcctcaaatcttgaggaagacaacttaagatctagcgttcttcctttcaaatcatcagggggatcaatatcaaatgccgaaccggtttcttccaactcctctgttcgctcaagaacttccaaaactcccgtcttgcgctctcctacgccatattcagaacctgttgccgagtctgttacaccccagccagcgctttcaccccttcctaatcctcttcccattgctctgcagcatggtccaccaactagtacacccttccttgataggaaatcaatcaatttggaccacacaccagctcctattctctcgccatacgtcttccaccctccaggtacacctgattcatattctggtagctcggaggatgaccaaaagatcatcggtataggcttatcgagaaaagatagcgtggatcgtgtttttgagaagcttaacaaacagtgggagacgaagaggggagatgaaacggagaatgaggaggatgtaggggtttccgagtgggcaagaaagattcgaagtagtctgtccccagatagcgatgacgtagaagtcgaagtggaggcagggggcacggatgatgatacggtggtactgagccatcacgccgacactcagattgagcagatagatgtcgaagaggaagtgaagagcaatgaaaagattgtagtcggaagcgggatggacggggagcaacacagggagaaggagtcatacgaggtcccagaaacgattcaggcggaggggtttgatgtggtagttccaccaaaatcttcgcatggcgctttggaaaaccttccagtgtcagcggatgaaaggatcttggatcattcggttgatagtcaggagatttttggatcttttgtcaaggccagcattcaaaccgatgtggttctcataacggagactgattgttcgcaccctgatctagcggttccaagcgacgaaccagaatcaaaggaagttctcttccgagaggagtcaatcttcgcagaagagagccaagcaatggaggaacaaccaagaagggacataagcgatggtaaggaatcgctagtacctcgacaggagcctgcatctgaaggtttggagcgagagaagacttttgtggatcttcagcctcaagtagaccagccatcttttgagattgagtcagcacgctccgaacctatactgttctcgaagacggatcgaaccaatcaaggcgatcactacctcgcgtttcttaacccaaacgatcccgcttctgataatccccctcctcagataactgccgcatcaccttcattcaaccaaccaatattttcttcgaacccagcgtggcaaacgtcctctcaccctcttgctcccgaaccataccccttgcctgcaatttcttcaacgactactccatctctctcacctccaccttcacaggatatacacatcaatcctcctttagaatctcctctgcttgtttcaaccatcgaacgttccactgatgctcttctggatgttactcttgtccgttcttcaaatcataaagagagggattcagaacagctaagttccaaagagggagtggcgatgaagggaggtgtccgagatgtagaccaagatcagaatttcgggtccgaggagatcaaggaagccacaatcgacactgatatggttgatgaggacggtgtcgaagatatcagggacgaaaaaatgacgacatcgccggaagagtctttcatagccgtcaaatctaagaggcgacagtctctagctgaagagatgcaagctatcggggaagaaggttacggtgtctttgatgatacctttgatttcggcgaagaagagccttctggactcgaaaagttcatagaagggttcgaaggagatgaagttatggaggaggatgctgttgaggctagcgcagactcaattgaaacaagtaagcaggagaagtcgattcgtcagagtgagtttcatgtgtgttattttgagagaacacttgattcaaatgatgcgctgatgaaagttctgcatgtggatcttgcccctccagctgaggcactcgaagaaatacactcgacacctgctcttgtcgcccaacaaccttcgccacaacctgcttctaaatcctggtcgcgaatcatccccccatcgcctagtccatctacagattcctctgtatcttccgatacagtatccgagactcaaaacttctcattccttggaaagacacaggacttcgttgtggagttgaacgacatttctgatgagtctttggacgaccagatcgaaaacatcattcaagagcgctccatccaagaagataccttccgaacagattctcctgacgcatccattcgaccgccgttaccgaataagatctcttcagaaaagctgtctggtatcaatgagcttttccggaaaagacatgctggtggtcaggtcgccatgtccacaccccctcctgctcaacctacactgtccgatacggtggctcggcctgctgttccctccgttactttccttccgtctatcccatcagcccccttacgtggaacttcccgaatcgccaagccgttgagaggtggcctacattttccgaaagaacctgaacgtttgcagtctctcatttctttgcaatcttctcggatcaaagcacccatgtctctgtcagctccagtccgacttggtcaaccttcagctttacctaatctggcaacctctcgagcacctcagctgaaagcacgtaattctcccattccctctgtcaccgttgctccgccgactcgttctgtcgctccgacattcgccggtcctgtcatgccatctgcctctatcagaccttcgacttttgattcttcaacaacgaaatcccatcaaactccttccaacgcaccttctccttccccttcagttccttcttttctcaatcactcttcgtcatcaagaaacaatgctgcatctcaagcaccaagcaagatcatgccttcttggacggctcgtcaacgtactgtttcctcgcaacctcaacacaacgcaagtgtatcagatatgtctagtcagattgatgttagccttgggcatgaaggtgaaaaggaaggtgatgagctcgaaacgtacatcaagatcaccagtaacaaccccaaagaggctgctcgggcgactgcttttctcaagctggtgagcttccttcagttgtttgattagcgctaattttctgctcactttccttgttgatgcacgtttctatagttccatgactatgtcgagaccgagcttataccactcaatcccgacaatactgtggcctcagccgtatccatccgcagccaatcaaacctcaacacttccatccgttctcaattcaaccaatcagttgcatctcatgctaatatgtcgataatgtctgccccagaactccttatggaggctgaacaagaaattgctgccgatgctgaatcttccgatgatgagacgctcagagaccgaatacaagagctttcaatccctggtagcttcaactcgcattcatccctcaaagagctcgctgatagacgcgcaaagattcaggaacgcagtcttgcggatcatgtctggggtccgagagattggaggcgtttaatgaactgtttggatgccgaaggcggcaaaaagaatgcggatgtaaatccagaaaaagtggtcgctcgatttatcgaagagatggcgctcaatgagaaagacttagtggatgaatgggaccggtacgtcgagcactcgctctgatatggattctgtgtttccgttgactgatcatctctcctcctcctgtctacgtttaactttgtttatcagccaaaagctcattctgagggtcaattctatacaaactcggcggcgagccgaagcggctaaccctccttcccgtcgtcgacgttcttcgatgaacccaagcagatctttgatattaccaaacaaagcttcaagctcttcgttcgcccgagcaaatcatcgttcaagtccccttcggaaaagccaatcgatgccttcagagcttgtctcaaaaccttctttgtcattgaccaacaagatctttgggtttttcacgaagaagtggaaagccagcgccgctcagctggaagaggttgtgttgtctgatcggtcttcgtctaaagcagaacgtgctagggatagggatgcgcatactgttgtatcagcatattccggacgtcagctagtaggtcctcggcccaattcgccagtcattatctctcctagctttcccgagagtgcgccaaaacaagttgaacatcacactatctctgcacatcgacaacaacgacgacaaagacctgatccgacggcatcacactcaagccagctcactcgcgctccaccccggatctcaccttcgatgtctgcccccaacacctccatcgcctcatccttatcctcgtcttcttcgtcgtcctttcggtcgaacatccagaagacgcctatatcccaacattcatcgaggatccaacctcgacccctctctatagcgcatctacctcctcgatcgacactttcagacacgagacctactcgatcaccaatcgtctctcgtcgacaggctccttccgaccgatcatcctcttccatagtgtctttatcctccagacctgtccccatctcgatcccgactccaatctcaattccaacctcaaactcaatgactggagtgggggcgagaggaaaagcaaacgatttaccagtcagaccgagatcgagctttgagagttctccacccagagtatcggctctggtgagaagttttgagagtgtaggttcgggttcgggatcgttagatgaacatatgggtggtggtggtggtaggttcggtaaggatagacggagatgatggcacttgtcttcgctttgcttttttcttccttcttagctttcttcctcttctattggaactcctttccctctgacatttcttccgtacatgttcctcttctaggttttcatagttttctgtttgattttgctctttttctttttcttttcttagtcacagtcttcttctttagttgattgatcaagtatcataatcttgtcctacttctaatcactacgatcataatcgcgcacgtttttacgataaactgaatgttatgtctttctctctgacattcaatcattttacgtttgtgggtatatgcatatgatatcatcaaaggacgtttcgaaaagaaaaggtgaagatgggaaatagaaagtccaaacagtcttacaaacaagataaacaacaatgaaggtgaagtgtcttctgatcgagattcaaatttgaattcaagagaaatgagcaaggggaagacagggtttggtttgaatagaaacaatccgaggcggacagtaggatgattgaattgatcgagatgacgaggaaagaaagtgctgaataaggtatagagtgtccgatagatagaagaaaaaaacaaagaatagtcgagatagaagaaaggatgagttaaatgatgggatttacgaagaagagaaagtaaaacgaaatatgccaatggacagcgctagatcaaaagtttcaaaggatgaaggacaaatgagagattcctgaagactctagtctcaaaccctcgtgcgtctgcctactccaccaagaataccccacccactgatgaagatagtgagaatagtcatgaagagcatgcagaaaccaggttgggagagtaattcacgcgcggacgagcaactagcgcaggtccaaccatctgtaggttggagaatgagggtaacgccaaaaagggtcagcaagttcatgcaaacaacaagaatcagggagatactcacttgataaacttgtgtaagtctgaggcctgtatagagcaaaggtaattccactattgacgctcattttacctccttccgctgtagccgtcggaccacgatcatcccagatttttgccgtataagatgtcaccgcccagggaacagagttggtttgttcgatgctatatggcgaccaaacaaagttggtggccgtaccgggaattgtggagatagtgtatgtatttccgttttttccgatagcagcgacggtaagagatgtcggtgtgttctgaaagcaagatttaggatccagcatcaagtggtcagtccttttgattttcaatatgcaaaactggtggagacaaggagatcgatgttcgacttacgtagacagaagtcatattccaaccccaggtcacaaagttgttatctgcaatcttgtagtacgttgcagctgcatttgtggccggcatctaggaaaggttgcacagagacatatcaagggcgatgtcagaaatatataacgagggcagagaaggaacagtgccctgtctgttcgtgcatcggtcgatatcaaagaagaactttcacacgtacagtgattgagagacctcccacagcagccgtggccgggctaagtgatgaaaggaggggaggttgagtaagcaacatagcccaaacagaagctgggacagatctgaccaggtgagcaggccaaggaaagacagaaagagtttgacatacatcgagactgagctagacatggctcctacttgtactttttcgatcgaacgggatcagagaggaatatcaacagacagggatcgagtctctggccaagaagcacaaggaaagacagagagagaaagtaagatatctgtgagagagagaaagaaagagaaggtattgtgtgtgtttgttaaatgaatggaggacgcaaggtattgatcgtcactatatttgaatgaaggtgatttgagctgtctaaggtgaaatttgttgattaagggtacacatgattactgaggtaatcgagtgacttccgcacagcccggccggaggagatggccgaaaatcctgcttacttaatctgtatatttatcggccggctctctcacctcccaaaataccggctagatctgaccaacactctacttttaccatcatagcctctttgggtttcttctcccctgctctctttctctctacctcacaagcccttctgatcgtcgtcactccctctcagtctcgacttcattcgtctcccgattacttatgggctttacccctaaacagtcttcaccaagctcatccttagatccttcgtcaacagcaacgttggccaatccgccttctccaaagtcatcacctgcacagcggtcgacagatcaactttcgaatttatctacctcagccagcaggtcgtctactcagcttcttcggtcaaagtctggtagcacctcatttagtctcaagaaacgaaattctataccgaaggcaggtccgagcacatggaaacggagtcaagagggtgctggcaggcgaagggtgaagactcggccgcgtaagtatatcgttctctcttgctcttctaatttgtcgtctctttcttttttttctgttttctttgttcgatttctttcttcttctactcgaggatgtgtcacgtactttattgtcacttggcagtgaactggttcatcaaaccgattcgtcgatatgcgccatcctgattatgttcatctcagcctggctctctgttctttggagcaagcttcgtgtttggtccgccaaacatgccctggggtgtccacgtctctctctctttctctttctttactcgtatttttctttcaacactctccatcgcttctaatctcgttcgtcttatcttaatttgctgattggtgtatgcattctgttctcgaatgccgccatgtaaacagcattcgcatataatgaacctgatacacccccggaatccagcactcctcttcctcaggttcctctctcaacatctggcgagccaacagacagcaacatctccaaacgctatcctatcacatctttaccaccttctaaaactcctcgcaaccatctctcacgctcttcttctgcagaattcgttcggaggtcctcaaatctatcgcccgaggataggaccgctttacgccaagaagaagattctgtcccgcctctgtttgggttcccactctccactaccaatcagagatacagttcagaagagcccgtcttttctagtaattccacagggcctttgggtctacgccggaacacattcaatgatgcaatgtttggagtaaagcatagccgacctgtatcgctaggagctgaacttgctggactacccgaatcgccgttgccgccaccgtccaagcttcccggagcagatcgtggcgaatggtggccattcaatccgtctcggaccaagagtcatactagatgggctacaccgtttggtggagggggcacaaaatcctactttccagatacttctgactcgattgatttgggtttaaacgaaggtcggttagaggttggagtcccttctcctgaaaatgatcggccgcccaacaatttgataacttcttacgacgtagatccgctgagaaacccggatgagggcaatgaatcttctcctcttccactcctcccccccgcagtagttacacctcataaatctaggaaagatccgaaaccgtcctttcggattgctctgcctacacctcaaccattcttacattctgcccatcattctaaaacacccggctggtcgagcccttatgcagctccagaacgacttcgtagattctctggcaccgatatggagagtgggggttctaaaggatcaaatagcaaaagctggtgggagaggattcaggattatgtgctctacaacacatgggtacctctagtcatccgattgtttaatttttcactcgcggtttgcaccctcgcgttgggcatcaagattagggcattagaacgggcggccggtttgccgggtgtgacgggaagtagtccccttggttggtcttccttcttcttttgctcattcttctttttatgctgttgtccatcacgatgtgacattgtttggatgctaacattttctcttgtaacgaatcttcgcagtggccatcatatattctcctatcaccctgattcacgtcgtcttagtggtctacgttgaatactttggaccgcctttggggctgtggtctcttccatccaagatcctctttacctctttcgagctcatcattatctctttgtggtcctcgcttctctcactcgtgatatccgacctgttcacaacttcgctcttttgcgtatctaccaatttgaaatggtggactcatctgacgcaaccgatagaacgaaactatgcccccggagtgtgcgatcatcagatagggtacgtttctccttcatttgttgtcctatcagagaatttttaaccatttgatactcatctatattgcgtgtcgtatgctttcaactttctcaagtttggtggtcatggtgtttgtaggtgtggttgggtttctagtaggcaatgtggtttccctaggtcgaatttttgccaaagtcgtcaaacggagtggatacggtggcggtggcggtggtcgttgatcgcacattgtttcgtgtgtatgttcttatttagtcgtttcttctcccttttttcttctctctactagcttcctttttcgatttcttttgctttctgtcttttggtcatctctattcatcacctgggctacggatcaggctttgtttattttattttacttccttctcgtttttcaatatcagcattttcccaaaaacaaacttgtcctctagctttgtgttccagagcatatgctggattcccctcctcatgcattctcctttccttcgtccttcatgaaccacttttttatcttttgtctactctccatcaactcagccaatctatcacaatgcacacgagtcttgttcttacactacaatctttgctctattttctccatgatcagcggtcttgattcgacttctctggaaggaaaagaaatctcatatatgtctcgatcggtgtttggtttcgtttaggaactggctctgggcaagcctgttgaattgatcgataacgtgatcatgtgtgagagcttgtgcaaagaaaagaatgagtcgacagggaaatctaatctaatcttgccagtcggctctagggttaattacgtcatgtgatctccacaccgcagaaagaacagtattcaaaaacttggaaacactcgaagaaatattagaagaaagaaatactccgtactctcatcaagttattcgttcaagccgagacgaaaagatggctaaaagaaaaccacaatctacaaagtgagtacctgctgctcgacttattcatcttctttgctagagaagagagggtacattgactaattctaggttttaccgggtcgaagacaacggaagggtaaggctcattctatttcctcaaaccaaccgaacgatcagccagctttgccgtacacttgacacatcaaaactaactctgtatgcttctatatagctcaactccaagagaaacgagcgatcaagaggggagatattgatcctcccgataaaccgaaaccatttaatacaaggaaacctaacccaggaaggatccgggagacgactgcgaatgctccgagatctcagcagttggtctcaaagttcttaccactgacccctcaggtttgtcgtctcctcctcttattcaatcagtatctcttgtacattctaggaatgcaccagttggggcaaaggctgacatccgaccgaccgttgattgaacaaccattatcagtatctggccaattcaaagacgctctcgttgaccctccctttggatcgaccgctgcctgacgagatctcaacctttccaatcgagctgatcagtcaatctgggctgacaaagcaactcaccgtcccgagacggccaaagtggagatatgagatgacaaagaaggaagtggaggcgaacgaggcggggttgtttaaaaagtggttggccggaatggatgaatgtgtggaaagatggagaaagactgaggagaagaatgagagtgaagagaaagcagagatagacggagctggagaagacgggaaggaagacagagaagttaaatcccaacagattcgctggccaaaatccacgagtgagttttttctttctttatttcctttcttttttttttctttttttccgaagaaagggatctcaagaccgagctgatcattcttctctttggggtatcttcgcttcccttctctttcagcctacttcgaaagaaacttagaagtgtatcgtcagctgtggcgaacaactgaagcgtcgcccatccttctagtcctgatcgatatccgatgtccgcctcttcattttccaccatcgatgcaagactatatctcgagtttgcaaccgaagaaagaggtcatcttgatcttgacaaagtgtgatctcgtaccagaggacgttagaacaggatgggtccagtggtgtgagaaagaatgggccgagaaatggggatgggatgtgatttgtctggagagttaccgaagggaaaaacgggctcaaggtgcgatttctgtgttcagtctcaaggaaagttacgcgttggtaaggttcgcacccaccgcttactttgacttgtttttaaacaggtacgagatcgatcttgaagtcacatcttccaccagcctcactttccactctagtatcctctctcaagagagcccatgttcgactactcactcctccacctgccgtccaggccgaccgaaagagacttgaacaatggagccctaagatcagacgagagattgattggaattcactcttggcagagaaggatctggaggaacctgatcctgaaccggctaaacctgtgacagacttaggtcaagacgagcacgacgcccctcagacaagagaagaggcggacgaggaagcgaatctagaatatttgaccattgggctgatcgggtatgtctagttaatttttttcctctgtcaattatgctcctgaacggtcgaatcataacgcatctttccttaaaaacagacaaccaaatgttggaaagagctctttgctaaatgccttggtgggcaagagcaaagtaagagcatctaaaacgcctggaaagtaagtcaagaagatctgctctttgaatcaacatcatattgattgcaagtagaagaaacatgtctcatattcttcttctctttggcgaccgctcagaacgaaacatctacaggtacgagtattcctcaagggatttccatctaatacgaatagcttagctgactttgagaattgtgctcggtagacaatcttttggacgaaagaggtatctaaacgctccgtatctttgaacacgtttgtcgaatctcgtcatgtctctcgtgctgatctaacttgttcaaaattccttcaaaaagatccggctagcagattcccccggactggtcttaccatcgatgacgccgttcgagctccaggcaatttcctctattcttccgatctcgacgatccctgctctgccttcggtcattcggctggcttgtcagctgatgcctcttgagcgtgttcttggtttgaagcatgaggatgaggataaggagaaggagatgaaggataaaaagacatggagacctggaagtctggtcagagggggccgaacgaaagaggaggtctggacgacgggaatgatcatggaaggttgggcgttggagagagggttccgtgagttccgtgctttctttcatcaattgctagtccttcaggtgaagccacgaacgaagatctgaacgagcgtacaatcatttttatgttggcgatgatattatcagtgactgccaaagctggtcggcctgatttcaaccgagctggtaaccacagtgagtctcaactctatctggttctttccttcatttgactagtcgtttctggacttctgacaacaatctatttcatcacggatgttccttctttcccgatacaagtcctccggtctattgcagaggcacgtattccgtggtcatttcgcgcgcctcctgtctcttccgaggtttcccgagccggtccaagtgcagatgtagaggtcaagactacgtcagctgaagatcggactggtttgttgtctactgggagattcaaggcggatcctgaaggagccaatgggatctggctaggcgtacgggaagacaatgaagacgaagaggaggaggattacaaagaatcaagcgaggaagaacaattgagtgaaggtgaagaagggacgagcgaagaagaggagcaggaagatgaagaagatgaggaggaggttgaggttcagcagcctgtaaagaagcgaggcgggtttaccagcatgtttgatgctctcggcgtggaagaaggcgaggacgaaagtgagggagaggacgacgataaaactgaggacgacattgagagtgaagaggagcaggaggaggatgaagaggaggatgaagaggagaaggaggaggagaaggaggagagggaggagatgattaccaagtaagggtcgtgtaataaagtattgtgtgatgagcgataatggtctccaagctcagctcaacagaacatgatcatagaataagaaaatagctctctatcggagcgtgataagcatccaccggatccgatacagacagctgtctcgaccatcagctgatgaccatcggttgatacatcgaacggctggtctatcttgagcagctttgatcgtttgaccttcatctaaagatggaacacgacctaaactaccggctttgggcgactcgagcatttctggcggtctaattttgagggagaccgcacggagaattaacgagccgctaaggtttatcgccgtggtagctagcgcgtttgcctcgagtccaccgagcaacctacactctacacaatgtccactggatacactgacatctgtgtgtgcaacctgtaagcgcatactctgaccatgtctgatgtgtatgcgcccaagcgaccagcgcccccaacggaccgacctctggccgagaggaaggaacaggcccggcgaaggaatttgaaggattagacgaattggaaataaaagatagagaaaatgaaaaatatttgaattgagaattcagctgcggaattgtgcctgaatggaaaaaaaaggtggtcatagcgcaagcggttccttcccatctttcggctttctcccgttcttaccttctaccatcatcttcgttttcttctttccgtccttcaacttgcctttgttgctgtttgtctgtctcttctcttgaatcatgtcggaagctccctcctattcgcataaccccacccttctcgctccgtatttggagcttgatcagggaggaaagatcatggctgagtgttcgttccgagtcatcattcagtctatttccttgtccttcgctttattttcttttttctcatttttccttcctttttctcttctccctccgattcaatcacgtctgatcctgtttcattcgacatggcaaacaaacagacatctgggtcgatggtgtcggtggaatgaggtacgtacacttaattgtcttgccgctgtatttttatttgaaaaatctttccagggcctctttctctccctctggcgctcgtctgccttgtttaagaaacacgtcattcggtcgaaattctgcggcaaactgacggtctggctcttttgcaattctctcttctctctccaaatagatgcaagactgctgtgagttcatcttgagatcgttgattctttcactcggcaagaacatcttcatgatagggagggacgataatacgtccgggcttctggcttcggattcatttcgggtagcccgaaaaggttttccttatcccctccctagccttatctccctctcgcccaacaaaccccggacacttatcctctgttttctctctacttgtagacggtcgatcaccccgtctctaacgtctcggagctcaagggttcgttcgttttgccggaacgatagatgacttgtgctcttgatctacctactcacatccccttgctccttcattctatctttcttgtagagtggaacttcgatggaagttcgactggacaggcccccggacacgactctgatgtttattgtacgttccatcttgacgtttctcattcattcttatgacaacttctgagcatcagactctttttgtagtgaggcctgttgccatcttcaaggatcctttccgaaagggagacaacatcctggttc

SEQ ID NO: 567 - DNA, 26313 bp, Xanthophyllomyces dendrorhous
tcctggttctgttcgtataaattcttttgctctcaaaacaaatccatcgtctttctcatttcgcgtagccgaactcttaactgacccttgtccttccttctttccttccgaaactaacagttgcgagaccttcagtacgttccggccctagtcggtgacgataccgtgtcttgttatcatttcttttcaaaagaaaaaagacttttccccctcaccgagacttctctccttctcgttctcgtacaacttgttttgtacagacagcgatggaacccccaaccggaccaacttcaggcatcacgccgcaaagtccatggaggccgccaaggaggtccgttgttatgctttcaccatttaccattgtgctctaggtgctgactagacgtcgattgttctcacatcttttctcacagcacgagccctggttcggactcgagcaggagtactctctccttgatgccgatggctggccccttcactggcccaagggtggataccctggtcctcagggtccctactactgtggagttggaactggaaaggtgttcgctcgagacttgatcgaggctcactacgtacgtcgacggcccgcctggttaatcccattctaggccttggactgatggtagacacgtctcgatcttgacttgtcctttctttcttcgtatctgttcatctagcgagcttgtctgtatgccggtgtcaccattggtggtatcaacgctgaggtcatggcctcccagtgggagttccaggttggaccctgcgagggtgtctcgatgggtgacgagttgaccatggctgtatgtgtctgatctctgtccgcttatctctgtcgatgtccaatcagctaaccatgtcgtctttccgatacacagcgattccttctgcaccgagttgctgaggagtggggaatcaaggtcaccttccaccccaagatcttcaaggacggagactggaacggtgctggttgccacagtacgtatctcctcaaagtatcttcactcgtttctctccttgctcaccagtgcgaaatcgacgaatcatacgaaatcaactagccaactactccaccaaggccatgcgacagcctggaggaatgaaggctatcgaagaggccatcaagaagcttggcgagaagcactgtacgtctgctttccattggtttctgactttgcttgccaagtgcctgataacttatctcttcctgtttctatgtatacgtagtggagcacattgccgtgtacggtgagggtaacgaggagcggttgtccggaaagcacgagaccggacacattggagacttcacctccggtgtcgctgatcgaggagcttcgatccgaattccccgacacgttgccgcccagggttacggttacttggaggacaggcgacctgcttccaacatcgatccttatcaggtcactggtatcattgtcgatactactctcctctaagcgggttctcttccttttcttttcctttcctttcttatgataagggagggtaaagcgatgtactatgccattcattttcttgtcgttctctttctatcctgttttgttttgttctgtttggtttcatccttcacaaacaaacacacacccacacacacacacaccttttctatgtttggttcagactcattcgttcagtcgtctgtctgttgccgttcttccactatgttgtgccagtaaacccgaaaaagaaaatagaaaaaaaaaccccctttcccttttatttcacttttgaagatataaaaagaatgctcgttccttcgcaatgcgattgcatctcttttatcttactttgctcgattgatcgacaaaagaggagagagagaaaggacgacaacatgcgatacacgagtagagaatgaaactctaacatgattgagaacgagagaaaagtagtagatccggatggactcgtctccaaagaaatcaccgtccttttctatcgacatctaacaacacccccgtctaacctataacagtcaacctctagggcctgatctctaagttctgtgatcatcggccaacagaagggatttatctattcgagcaacgtatggaaacaaaggagcagaagaaaacgagaatgaacaatggagtgaaaggagcgttaaagacatgacgtagccagatgagatgggatggggcaaggagtgacaaatttggaacaatatggagagtaaaagatagtgatggggaaaaagcacagatggacgttgtggattgtgatgagtggtctatggtacatgatgtgcaaagagacaaaaaccgaagatagaaatgatagagaaacgattgagaaacatttcgagaataatatatggcaaggaaactggactacaaaaagaatgcagataaagaaggaagatggaagatggggagaaggacttagaacgaagacaaattgagtcctcgccttctgcctcctccgataaagtttgtgactgcagcggcgacaaacaatcccacactgcaaccagcgacatgaaagtatagaaaatgcaaggaatcagccgacgtgactttgttcagaaagaaaaagccggatacaaagaagatggccaacatacgttaaaccgatagccgtctggatgagctgttcagccaccaagaaaccagacgaatagtagtccgttgtaccactcgtactttcacttgcgaatctcaacaaacctccgtttgatagaccagaggctaaaaaaattaacaatagacaggaacgatgaatatcgtaaaatgcgcagacagtcggaagttgagagataatgaacgactcacgaagttgaaagagaataccgaccacctgatatcacgaattaaccccaaaacgaattcactgttagaacaatctttacttcgtgaacctgaagaaatagaagggtacaacgtaccatgataacgaaagcggaacctctagtaaatttactgtagagacctcccaagagaccgacgacaaaagctccgatagcctgtgcaacatgagcgagtcagctaggtgaacaatctcaacagaaatgtagaggacactatacaaacagaggtgatgtccggtcggttgacaaagacccgtcccgaaaagtaattgcacgagaaacctaagccggatcaatgaaaacgaactcagctcatgtatatttacatgtctgactcaaaagagcatgtgaagctagatactgacctgcacaacctgtcaaaatcatcacaggcagttccttccgtcggatgggttgaccgtttcggagtgctagacaagctagataggctggagccgtgaggaagactgagaaggaagaacgacgatggagataaggtgtgtgtgtcagtcaattcatgatctgtctctatataacagtcctaactcggtaggcgatagattgtgacgagcaagacatacagaaccaaggagagatcgtagcccgataccaaggagcattcgcccggagtgtggtacattggtattcgtttgcatatgggatgctcgagccggtaactcggataaagatttctgagccgatggaaaggccaaagccaaggaagagagagtagagaaccgagtagacaagacggacagagccagagatgatagacctattgcaaagctcgagagaaccgcacaacacgatatatcctggcaagatcaagacgacagagcctaaagaaggaaaaaatgaagaagaatatcagtcatcgaaaagaaatatttgatagcacaacaaaatacaaatggctctacctgaagtcatagccgaaaagcagagtacgccactggaagagatgatgcagagctgaggatcagaaggctacatataaagagggcggacacagactgatttcgtgaaaataggcagaagaaaaacgtacgtctttgaaagtgcggccgccaggaatgcattcaaactggcgatgacgagctcaaacaaactgctgtacaggtcgttcttactgaccaagacctggacaagaacaagaagcatgccgagaggaatggtgaccagacaatcgattagggaaccatagaaagcgctgggctgaataaatgccgaggcgagaccaccgataagaagttgttgccaaagtttgtatgcagctttggatgtcatcagctcgtctaacttggcagaggcctcagtaacacccattttgtcatgcacgacctagcaaggagggttaatagatagtcaaacgatgagcttggaaatcgaatcagagttacgacatttgatgaaactcacttgataatacaccatatgtgcatctaaaagctttcccagatccaatccgttggcttgtttcaagaacttaatttaaacaagaacgagatatttgtaagataactaaggattggagaacaatagatgaattcagaaaaacagactgactttgacttccgaggtatgagtggcaggatcaccgaagctgacaagaaagatccctggtaagagaatcatttgacagttgagttccagaattcgggcagtggcctgcatctgggcttccaaccgactgattgttgatgtttttcattatcatgataagaccaataccagaatcaatattgggagaaggcacagtaataaacaagagaaggctatatacacactgagtaggtgcaccgaaacacattaacgctcttgtcagtttcaacaagaagtcctgcctctccaggatggcagccacatgctgagtgatgaagatttgctctcttcttcgcttttccttcgcttttcttctccttcgcttttccttctcccattccttcttttcccgttcttcttgggtgagcactggcttagggcttttctgatgatgtccaaagtagtcggcatactctccgctagccctcgagtccggggtggtagccgctttggactttgtcaatttgagtggggcagtcatcatgttgagtgccagactctcaatttgcttgaatccggaagccgaccgacgtttcattgcgttttcagagaacgacgtcgaatgagttgctccggctggtcgggatggagtcgaagaaggagggtctaatgtgaaagaacgggccatgggatggccaggcgaggtcgttcgaggccgaacgggaggaccgatcgagatcgggggtgggtctaactgagaaagatgaagatctccagcatctggactattaggcgccgaaagtgactcgacaaggtctttgttggtagggaaagtacttgtcgttgggctggaagtgatggatgaaggacgatgagagaaactatggaaggaagacggccgtttcgagttcgacggcgggcttcgaggcgactttggagactttggcgatttgggaggcttaggaggaggagaagaaagtcgggtgagatggaatcccggtcggtgagcatctggggccagctgagaagcgaccggagcagcaattcccgcaagatttccctgtttgatgaacaaacccataagagttgagtgaggtgagtaagtctaggcagtgttccaaagaaaaacatggaaaaagactgactgtagtagcgatcaagcctccaaatacaccggctgagctttttgcaaagtatggtctggatgaactcgtttccacctccagcccaagggtttcgcctagctttttaacccgagaggtcaccgcgctgaccctgctcgtcttggacggtcttcttgctagcataccgggctccaaagccaaggctttggtcgatcgagcgtctgcagaaggtgacttcttatctgcgcgaggagaccccaacggcgcagtagatctgccttgaataaattgagagatggtggagtactgccttgaatgatttttcgatccagtagatgagttgagccccggcgaagagggctggtctttgccatcggtagatgaacgaatgggagtcgtagtagaagaagacagacgagtgtatttcgaagagagacctggtgtgttattaccgctaccgcttccgaacggattccagccatttttgattcggtgctctctgataaactttgtccgctcctcttcatcctcctcagagtcgtccgaaagtgtggaactccgtcgggatgggggtcgagaagatgcgggagtagaaacaatgctgaccgattcggcccgctgttgaccgctctgaagtgcgagcaaagatgagagaacaccacccgccccagcaacgattcctttgccacgagcgattgcggcggacggtggaacatcaaggttgacaccgaaagtgctctcgtacgtcgtacctggttccctaccttctctgagctttcttccgaaatccccagtgccatcttcatctttgttcgaaagttcgatggcctctttccaaagtccatcttcgccagcggtgaagttgtcttgtccctgcttggaagatttcttccttcgacgcatgaagccaaacatgccggttgtatgagctctaacgagcgcctctgccgcctgtctattccgttcgacatcccgttctgggttgacggaaggcagaccgtcgacctcgtacggatctacaaacatctccatcagattagtgttttcagcctgttgataatccccatctgataccacactcggcgctctggtcgtcacctcgcttgatacttgagattctggatcggtggcgatgttgtttcccgtgaagaacggatgacgcctcctcgcctcggttggttcgtcgtacgccgaaaagttctgaagggctgattggagggcttcccgtccgccctggtcgacaagagtctgtggagacatcgcgattggattgtctttcccaaattcttcaggccactgcactcgtttgttctttcctgccgataagccgctcggagccgagggcgggtgaataggagtctccgctccggaaggtgaagacagggtgagagggccctctggagacgtccgctcgataggagaaacaatcggtaaggagtttactctcatcgtcggtggccggagtggcgatggtggggaccgcgtggcactacttggattcgatcggatggccgacggctgacctatggatacggaaggatgagtgatcgatggctccaagctgtttctcggaggagaggacgtcgaggagtgactgcttatcctgtttggatccagaaacgggttgtctggaatagacatgacggacgggtggagggaggtgttagtagaggacgtggaagagagacagaggtggtggtgggtggacgaaagaaagaggagagagatggataaggataaaaagggacgaggatggtgacgaagaggaaggatggagaaaaataaggaacaggaacgggaccaagaacaggatcaggaacaggaacgacaaggaagtagcgaaaaacaatttccgagcgagcgtgcgccgtcatctcggactttctctccaaaagcgcagtccttccgttcctgaccccacgtcgaacgttcatcgctcgcacaaaattccccacagtctactccagatctgcccagggtctagaacagacctgtgtgttgtcaccggccttgtccccaccggttggttctccctatcgcccgttgcacagcgcatatataatgtatacagttcaggctgggcatgcttaatcacaaatcagcagccacaattgttcttacatcgttgtcatgttttcttgttgtcagctccttcatccttggagttcgtgagcttgagccgatcatctgttcaagggtgatgaaactctcaaacggcatgagataacatgacatacagtatttatttaaagaaagtcttcccatcacagaaagagatatggacgatgatagatgagacacactatccgggtacaccaatacaaacaggacacagttttactacaaatcaggacacagaagacaaaacaagaaggaaaaaattggggaaaaaagaagaaaaagagagagagagagagatacaaaaggcgcaacaagagaggcttgtatgagtagaaattcgtccatatcagactcgttgatcctttccccgtaatcactttgatgcgacctcgatctcggcgtgctctctcttgatgtcctctcccttctcgtcatcaaatgcgggactaaatctaccctcagggttggtcaactgagagtcagacacaacccagacggaccaaggctggccgtactttcttgatcgtgatcgccacatgaggaatccatagcacatgacgactggttgtgtaagaaggagagggtcagaaagacttatactggtgttcctcacaattagctcgtcaagactcaccaataaatccagtcatgggaactgatacgtgcacatagcaaatggatataaaaagaatatcaaccgcacatcagaatcaagaacatcacagactagagtgctgagccaacgcgaagcaagactcactaaagaaagatgtactcgtgctagagtaatcagcgacggcgccctgcatcgccgggaacgccgctcctccagagacagcagcagcgatacaaccggatccgatcttgaaccatgggccgagatccgccgtcgcgatcgtgcttcaagggaacccggtcaacaaagatgtcaaagtgtcagtatctcggcctaacagacaaatcaggagaaaatatacagaagactcacaagatgacagggtagcagatactctcgaagaagaacacaatatacaggcaagcaataccccctaaaggacaaggcgcggataagatggaacagtgttccagcagttagcctaaggaaacagaactcagatatatgacctgtctaacaagtgaaaagaagcctctacccaccatatgcaggaagagtggaaacaagaaccgagaacagtacgagcattgtacccgagacgaacagcgcgaacgcagggtcctgttgattttggtcaagaacaaatctcacatatcagcaacgatttatgatctatcgctcggaaaggagtgaggcacaaatactcacaaagtatcggaggtacaaaacaccagcaaatcttttatgagagacagaacatcccgattaacaaccaggaactttcagttgcattctagaatagccacagatatggcgtgggccaaaacgaaggcattactgaagcactcaccgaccgacggtgaacacggcttggcagccggaaaacatgttggatgcggtggaatcgtcaattctggggctgatacccctgatctcagttatgtaaaacacggtgaaagaggctgtggcaagtttttttggtagacgtggttgattagaaactgtttgggactttgctagacagttgaagagaacagagacagaacgaaccaactgcaacttgagctcctatagagagcaaccaatgaagacccaatcatacatgtcttctgtcagagatccgagaaccataaatcacccctggtagaacttaacgtgcgaagaaacggtagactcaccaacatagaagaactgagcgactactccccaaaccaatcgatgttgctgccagaaagagccagttttctcgtttgcgtccccatctagaatttgagtaatctctgggagcttcgcaaaatatatcccgatattcaatgcgatcccgctatttgtatttgatcgataaacaaagagaacaggatggtgttcatcagtctcattaacgcgccaaatatgctgacttgtaaattagagaaagaaccaaagaaactcacacacagcagagcgccaggtatacgtattgcacggtggatagtgatgcactgttttcacccttgaagaaggcctgggcagcgatcaaaggaccgataacagtcgacacaccgttagctgcctgggcaagtacaagtctcattgctgcatgttcgggagggcccaaaatggtgatgtaactgttcgcagcgactatttttcagaatggatcattttaaacgggatgcatgagccttggacataagagtgaaagaagagaacatttcatcgtctttcgacataccttcgagggtagccaaaccggaggcggtgatgaaggtgaaaccaacaaacatcccaaacttttcgtacacagcagccggctaaacagtaggaaaggagagagatatttagttgttggcttccctatcacacgaaaaggagagtcttagatgaaaaactcacccagtagagaatcgttccgagactgagaacgataattgaggttgcaccaatgaagttataagtcaacttcgtctatgtgtactaatgatagacaaatacacatacgagaacagccccaaaccaatatgaattccaattttgtatccgtacttgcgcatgaaaaatcccatctaaatatgatcggtaggatgtgaagaactcatttagccatcatgaagaccaacctggtaaaattgagcgatagagagcttttacttaccggaggggcaaccagcaaataggacacaaagtaactgaactaatcgtggtcaaaacgaaggagatatcgaatgagtacaactattatcaaccaaagaataaaaagagcaaattcttacctgcaacagtgtactctgaactctggtgagacctatgagcgaagaatcatcaaagagaacttggcgtaaaaatgctgaggaaacgaggaagtcaacggtgaaaactcggtctcttaccgaagatattcaagaagtgctgatcgtccaaaggttttatcagaacgtatcagtcaagtacgattgacgacgacacgattctatgtcgaagaagaaacaagaaattgaagactaaccttgttcaagacatcgaccaagccgtaggaaagcccccataagaagaatagactagcgataaggctgaaggagaagatagtgtccgatttggagagctaagagagagccattcatgcaatcggaataaagtgagttcatagatattcgatcttcctctctcctcttcaatctttggatataaacatacacttttataatccagagggatgggcacgcctctctcgtctactttcggcgcctgcttctttgcaaagaaacccatggttcgtgtgagtacgcgtgtgttggttttaaggctatagaatgagttgagctgaaatgggattaggtgtaagtaaaagcgaaagcgagagaacgaaagaacgagggagcgagagttggacgaaacatggacgagaacagcgggctttatgaactaacaagagagagaaaccggggtcaaacggttggtgtcgaccggatgaagaagagagcaagagacataacacgcgatggaccgagggaacccaagagatcatcaaaccctctcggtcggtctgattgtccgtccttccatcgctgtaggttggctgagtggtcactcgatccgtcggctcttttggaaacgtttgaacaaagcaagaaagcagtaaacaaaatgaggactcaaactagacccaggtcagcgggtcagcggatcagtagcccaattgacgagaaagctttaactccagagccaagctagaaaggggtcagtgaatgaaagacaatgttagtgaagaatggcaagagcaaggagacaagagaagctaaaggtgatcgttcttccatccgtagctctcatcgacctaattggcggcattcggctcgatttaacaccggccgcggcggtgatcattcagaacgtcgggaggcttggctcctccgagcacgggtcttcgtgtagcaaggctcgttctttctgtattctcatcatatcttggtttgttcagacattcatacgctcgtctatctgtgcagtttttcgtcgctgtgcaaaagaagtcttggatagcgattgctatcgacgtacaagcgcttccgtccacttgatcttggcgcggtttacctcgaagtcgttttcttttaatttcaccttcttggatacttggcatcactgacactgtaccgcttggacataagaacatacgaggtgtggggtattgagagcgatcgacatggtttctttccacctattcttctatcccttctgatccctcttggttctcttacggttgtcttttctccagtcaaaagtcgataaatgaaacattcatcgcgtcatgttcttcttttttaattccatccgctcacagcggtcagcctcggatccaccttcagcatatccaatggctgtgatatacattctaactcttccgccggcacatcgaatagcttgtccaagactaactgggcttgctcggtctacagagtaaaggcatagtgaatgtgaaacaaacaccgacgtgagcttgatagccccgagacatcctaaggcatatgttcctttctacatgtgtggatctcttacctggttacccatccagccaagcttggtccaaggctcttcctcctcttctcgcatcgcatgaaagatgtttccgcctccgtacccggaccccacagcctttccgtcctctgtcacacgcttcaccacaaccttgaaagggtagaggtgttgaagagagaaaagcaagcgggagaacgtttgtcaactaccagaagatacgatacgcatgtaagaaagaggaacaaacagcgacggccttcccagcttgctccttcttctcgtcctccgagtccgagtcatccatcgcgcgttcctttcgcctttcctctttggcctgctcgtccagtgcgtccaaataatcgagcgcgggccgtagctgaaactgatgagtgattggatgcaagtatagcgcgcctgtagatgcaaacattttgcatccaaagaaatatacgagaccgttaatttcattatcagctccgacggtcgctctattcagaacgctgatagatttcaacagacgaaccatctttcatacagccagccatataactcgtctgatctggcacgagctgacttctcagcttgatgtgctgcaacgatttcttcggcccttccctagaggccattgcctccctttccctgtcctccttcttcttcttcttactaccgcttaaagaagatcctgcgtttgctctggcagcggcgacggctaattctttctcgaacaacaatcgagcaccttctccaagctcttcacctctttctcggtcataaacctcttgccgagtatccaatgggatctaattcaaggttaatatgtccccgaagagtgatgtctttagcttcattctctccatttatggaaagcaagcgacaggctacacgcataagtcacagacaaggaccgtacgcatatgccatgagtcttcctttgagatgaaaagcaaagacctacgaacctccatttcgaaccgttttgcattcggcttccacctcgctgagatcttccaacccttctcagctgctcgttcaggaacctcgacgttgtcagtcaccggaaattgaaacaagtggaggttcttcccgagcgcatgagatagatagacaggaatttcatgttcgactgtgtcttcgtcatcagagtctgaatccgaatccggatccggatctggtaggaacggtgtgtcggtggttgtcacagggattgttggagaggatggagggttgggagctaccggtgtcgaagccggtggacgttcagaggctgatgaagtctgtgatgtagaaagtggaagtcgcggcttttcagctggagatgtctgagtagccggcaaggcgtccgtctttttgactgttcgagtagactttttggcagagagcatgccgatcagttcagacgtagtacaagaatagagagtgagggactgagacttactcgagttgccatagtagtaacttttattttttttctcctcaatttcgatggcttcccaacacgaaaactgggtcaacagggatgatgtccagctatagaagtcgaacagacaaacgctctgagcaaaggagtggtcggatcaggtgttgggttctgctgactttggaaggttgtctggacgtaatggagttggtctcaaaatgttgacttacctaagtgctatatgatttcaactattcattcaaaaatctcttttctccatctctgctctctcaacttctcgcagccgctctcgaatagtttctatcaatcccccaccttgcccttccaaagatcaacaggagagcgtacgaaaccatggacggagtcatccctaccgaagatccatctgcaccagcctcgacggctgaaggagctgctcctctcgtttctgatgcgatcgacaccacttcagacgatcagcataagatcgaggtcgacgaacagaccatcaaggctgaaggtctatccgaggaggaagacttagcgaaaaaggcggaggaggaggcaaacgcaaaggaagctgccgagaaagctagattagaggccgaggcacggcttagggaggagcaggagaaatttagacaggagcaggagcggatcagattggaacaaatcaagattcaggaggaaaaagatagagcagagagggcgacatggacagagacgctgtatatccacgtaagtagggattgatcgtagcctctgaaccaagagtatggttgctgatgctgattctctggtcttgtctctttgcttctgttctttaatcacagaatctgaacgaaaaagttaaattacctggtacgaatcgtctatttgtagtctatatgttcttcagtgtcatgtctctctcgtcgccaatgtcgctgccgaccggacgtttcttaccatctctctgtgcttttgctcgccggttgatggtcgtccttcataacctgtccttgctgatgcttcctgtctcttctctccagtgatgaagcagtgtctcggttatctgttcaagatgtatgccccggtactcgatatcgtcgctcacacgaacgtccggatgagaggtcaggcgttcgtgtcatttgaaaacaaggagatagcggcaaaggctctgaaagaagtgaagggatttcctctatacggcaagcctatggttcgtgtcttttctttctctcctgcaaggtcaccgaacgcgtctctatcaatcggctgaccgtgtctggatgttgtttccacgaggtcggccaatagcaaatcgaatttgcacgcacaaagtcggacgctgtcgtgagaaaacttgatgatgcaggattcgatcagcacaaggagcttcgaaaagagcacaagagttcgtcctccccttcatctactttttttcattcgagaatgcagagcttagatctcagtttagggcagccacttaacgataccatgtgtctctttgtttctcgaaaaaccagagaaagcccgagttgataatcctcatcgtcagaaggagcaggcgaagcgcaaggctgctgccgacgccgctgctgccgcttctgcggccgatcctgccagtggcgaagccggttctgctgccggcttagtggccgctcctgtcaagcgagtgcctgttcagatgccggacgagtacctgcccccgaatacgacgttgttcattcaaaatttggtcgacggagttacgaaagaagatttggaggagcagttctcaaagtcagttttcttggtacatctgagagaaggccgtctactcatcacttcccgacttgtcttttgtcaccggtatcatcttttctttcctcttcaaacagataccccaacttggtggcagtgcgtgtgattgctgcacgtcgagacattgccttcgtcgattatgcagacgaggcaagttcaacgctggcaagagaaggtctcaacaactttaaaatgggtcccggggagggagaagctatgagggtatgtctttgtttatcttgattgaacccttatccaccgcctatcgatcgacccagcttgtcttgtatttttggcacgactgacactgtatgcgtattgtgtttccgtactccctcacaggtcacgtttgctaggaagtaaagttggccggtcaagatgtattatatatttgttttaaactctgttctctctggtgtttcgatctaagaagatacacaatgaaggacgcaagacgaacgctcgaatgacgcgtgtttttgaagagtggattgcttcccgataattgccttggacaacataagatgaagaggactcaggatcgctcctctcttcctgcatgctctcgtactcggatccgcggagcttatttaatgaaaatgaaatgttgcgcatatcactcagacaatgtttgcaagaaccaatcttgatgagtcttgtcgatgtgtctgatctgtttgctagattgatggttctatcagcggccggttaaggattttcttcaggcctacgtttttttggttctaattcaattgggaaatcccgcagcgtttttcaacatcgattcagcaccctccaaccacttattctcaccatcattgtcgttcccgttctctgagaagaactgaaacctcaaaaagatctgaatcatgacgtctttccggcgaatcaagccatcttcccttccttctccccctccgggaacgatcgtgtgcccaactgttcccctacctcacttgtccaccggtctggcctctctggatgacgtcctaagccccggtcaacctctatcatcggccctgcttgtcctcacccccgatgcccactcagcctgggggaagctcatccaaagatattggattgctcagggtctgattagccagcagaacgttgtcgtcgtaggtgctcaagacgagcctgacgagctcgtcaaaggatgcatgtgggatgctagtgcagcacagcagcagcaacaacagaaagagaacaaggagcagggagagcccaaagctgagaacgaagatgctggcatggaaagtgagggagaggagctgctagacgagaacgaggaaggaaacaagatcaagattgcttggaggtatggtgggatgagcaagtttcagaccacagtggataccaagtcttcatcaggtaagtacatcgctctctttctatttcttcaagctcgttctcactatacttgcctatatatcttatccataaattggcttggtgtcttggtgtgatatgattgtttcaatgactgaacttctctgttcttttcttgcccatcaaagttaattcattcaactacaccttatctctcacccagaatattccccgctcgagaatcgccgacttaatagattcccgtcaattagcctatgtccatgtggatccgtacactcctcggccatccagaaaaaaaggagagaccgtgggtgttgagagtccacttgacgaagtactgaaccaaatcaagaagatcgtcgagaaaggaccataccagtacgtgcgctggtctattctctctgaaattgacacctctcgagctctcacagctcacctctcgactatacgtctgttggcactcgtggacttctctcaactaaagacgtagtacaatcgagcctcgtccaagtcaacctgctcgagcccttcgaatcgctcttcctaatctattctcccagtcttatggtgacctgacccatgctgtacgtacccttcgttcacccataattctctatcaacttttaaattgattccacaagctgactcaaggtatctctcctactcggttatcaggaaatgttccggttcctgatgggtctccgttcggttatcagacctgtgcatgtggccgtgctaataacccttcctcctcacctttgtgctgacaaggcgttggtctctcggttgatgtgggcaactgactcgacgatcgaactcgagggtttcggctgtacgttcatgtttcttcttcaaacctgagctctctccttcccgtctttaaataaacacttgtagtatgtagaaactaattgcttacatctggttttctcttactgatatcacctatctcctcgatagccgacccgacccttcctgagctcttctctcatcaccacggtttccttcatgtccatgctccgttccaccaacaatctctagctcctccatctcaaaagacatctaccttgctcggtggtcgaggcggctcaaacaacctggcgttcaagttaaagcgaaaagcattcgtggtagagacgcttcatctagatgtcgaaggtggtgtaggcgagagacgaacgactgctcctccttcggtgactgcttctctcaaaggcatgaaggatctttctatcagcaacggtagtggtggtggcgagggacatgaccaccatacacactcgcatgatcacgatcattctcataactgtggagacaaggaagaaaaaggggcaggtagagttcgaatcgaggtctcggatgaggtggagttcccaaccgtcaaacgagaaccggtgctggacaagaaaagctcactttctagtgacaatgtcaagccaagaaagtcagcaatgaaaagagttggattcgtggatccttcaaagccggagatttatgaattttgaattgacgtcttgttgtaattcttaagcatcgtactttggatttctctccagtgaggatgcttattcgggcgggcacgtttcctttcttccatgacgcaacacaatggaagctcattcatagataaataagcaagagggagaacagagagcataagatcatattacagagattctataattgaagagaaagacatgtatagattgcccgatcatcagaggaatggagaacagagcatgtatacgaagaatagcatatgtacaaagaaactagcgtccgagagaaaaacgaaagaagagatcatagatttatttcttttcagcctcggggttgacatcagcacaccactctggatcgtctccatgctcgagaacgtatttctcgtggtcgtgaagcgcgtgcttccatcgaccctgaaggacctgtagctgagaagagattcgtccgtttggatcttgaccggcgacggcctcggctgctcgcatagccacgtcgaatctggacgctttgttcattcgaagcatcgaccacggactagtcgtggttccctgctcgatgtaaccgaggatatcaaaccttcctcgtccaacacgggcgttgcgagagaacagaagggatgacacgtccttagggaatccgtggaagttgaacacgacaggcttgtcaatagtgaagagtccctggaaagcgataggtgagagcgcgtgaggatgggttccttcatctccgaggatcataagatctgtcacattaacgactcggactcggacaccctgggcttgcaagaggaaagacgcagcgatgacctcaaacgtgacctcgactccacagccgacaagcacgacatctgggttgattccctcgtcagtagagtactttttccagacagaagctccagcgatacagtgctcttcggcctcatcggcatcgagccagcagggagtagggtttttagaaccgacgatcaagttaacgtagttcttggatcgcaagcagtgagcgatggtggacacagcggtgttcgcatcggcaggaaggtataccctagtctgatgggagggaagagcgagaagggacccaatgaagccagggttctgatgactgtatccgttatgttcctgtcgccaaagggtagaagtttcgatgtagttcaacgatgggttcttctcacgccaggtcgtctcctcggcgaccttgacaaacttcgcgtattgctcaaccatcgtagtgacaataccgaggaaagactcgtaggaagggaacagtccggttcgtccggtcaaggtataaccttgcatcagaccttgaagggtgtgctccgaaagcatttcggtcactcggccaccattgttagcggtctccggatcccattggaagtttcggtgggtgtgcttgaatactccgtcgagcttgttggaagccagctcgtccggagagaaaattcggaagctcttctggttcttagggttctcgacgactccctcgagataagatccaatggccttcatggccgagacatctccgttcttgacatcgtgagagaacttcttccagtcaggaagatcaaggggctcgtacccacggtacacagcctgtccgataatagtgtgaagtatgatgagctcatccgctcgcaatctgaagcccttttagggaaactacgatgacagacataccttgttgaatcccaacctcctctcttctttggccgggatgattcggagagatgctgcgttgacgaaatcagagggaagcgagctcgagagatcgccatgcttgttgcccgccgtgttgaagagttctcttggaccgtaagattccaaccagtccttgaggacaccaagctcataatcatctccagcagctttgggaaggggaacttgatgagctcgccaagtaccaaccatctggatgtccttgagtcgggcaggcccggtccaacccttgggagatctaaggatgatcaaaggccatcgaggcttggtgatcgggtttcctcctcgggcagctttctgaatcctctggatctctccataggcccacttgaaactggcggccatgtccaagttgatgctctcttcaagctgcttctcagaagcgttctcgggtaggttggctccatactcgacaattcgaacctggtaaccatatccggtgtacaagcacgcaagctcgagatcgtccattgttccagggatcgttcgctcagagatcttgaacccatttacgtgtagaacaggaaggaccgcaccggactcggcaggatctaggtacttgtgagcgtgccaagcggcgctgagttaaagagagatgattatcaggaacagaaggggacgacacacagatgacacgacaaagtactcacgcggttggtccagtctcactttctccatcaccaacgacaacgacgttgattcgctctggcttgtccatgacggaaccaaacgcgacagcaagcgcgtatccgagctctcctccttcgtgaatagatccaggagtctcggcgttgacctgcagaaatacatgtcaatgcccatgacatccaaaagcggtcagcaggcaattcatcatatcatcatattcaaacccccacatgagagcgcccacttacatgagaagggaatcctccagggaacgagaacgctcggataagctgtcgattgatgtcatccagtcaagatacacatcagtataatttcagatcgtttgccaagtcacagagatgatactgaaaattaccgacctgcttcaatccgtccttgtctcgaccaaactttggatagaacttggagatcgcaccttccaagtagagggtggccatgagcgcagggagaccatgtccaggtcctgtggtaaagacgaacctgattgaagtttgcgacgtcagtatcggttgaagtatgagtctgtgggcagggacaatgttgcacttactccgcatcaggagcgtgtgagattaagacgttggtgtgggcgtagacaaagttcagaccctgatagccatcaagccgatgtggaacatgagatggtcaactaaagctcacatttcctgcagcttcgatcatggcaggtatatatacaagagataggaattgagcatcttaccgggcaggttccccaatgtcccaagagccgctttttgatgtttccgtgcgttagctcttcctccaacaggccgtttgatctcaaaaagatctgagcagctgcgatgtagtttgctgctttctgaaaggcgagaagaccttcgaggtcgacggaggatgcgtccttcttgggatcgagttggacaaggagctgattgacaagcgcgggatctagagaggaagccttgggtgcggtcgatccgtcgaaagcggtatgctcgaacgaacctccttcagctatgtcggagagaaagggacgaagagaagagaagagaaagaactattgattagataggactatcctttactctcaacgagaagacctaacgaaccttgagctacagtaggagccatggttcaggatgcgatatatatatatatatatatgtgtgtgttggggtgaatgtatgtgtgtgtgtgtgtgacggctatattgttcttctaggtgccagatctgattcgggggagaaacgggcttgaaaatcgatgaaaatagggctacagataggaaagacaaaggtgatacagttagaagtgaggaagaagaagaagaagagacatgagatccaagatgggatctgatctttataaaggtttcagttgaaggacagcaaggaaggaaaagccagaaggatgatgcagcctatccgtcagttgtgcggtgacccatcatattcggatgagagcgactccgcaacgttcattcgctgtagatctttcttttgatctctaacttgtctgagtaccattgattgtgctacacaaatgaactgttcctcatctagctgaacatctccctcagacatcggactttcactcgagagaaccgtatcgtcctccttgctcgatatctcttgaatcccgagctgcaagatccatggtttataagtgccagatgggaacgttgacgaatttgctcagtgacgtcaccccggttggatgactgtggcaatagattcaccgttcttctctttgcttgacagatgatccatcacacatgcattcttgcaccctcggcatcctcgggttccctaaaagaacagaatgcatgaccataaggaaacactcagaaaagaaaggacggagtagaagtaaataataaaagtaaagaatagaagtaaaggtacgcggtacaatcgtgtaggaaatttcacagaacaaagaacaacaaagtagacacaagtgtaggaggaagaacagaaagtagaggagaaataagataaaagggggaaagtacaacagatattcaatcagaacaatcactcatgctgacgagttaggactctcgattttgaactggccgaggttgggagggaatgatcgggtaggatccaacccggaagcaagcgatcctccaaagaggacttcaccgttagcctctcggaatgctcggattcgagcctcaacctctggtcggaagtgcttcatcagaccctgaatgggccaagcggcagcgtctcccaaggcgcaaatggtatgaccttcgacctgcttagtcaattccaagagcatgtcgatttctcgttcggatcctcgaccttcaacgaatcggctcatcattgacgacatcaacgtcgttccctctcggcagggagtacactgaccacaagactcatgcttgtagaacttggagaatcgggcgatcgcattcacgatatcagtctgctggttcatcacgataacggctccggttccaagaccagatccaaagtccttgagagaatcgtagtccatcaaggccttttcgcaatcgactctaggcatgatcggaacagaggatcctccaggaacaattccaagaaggttgctccaaccacctcggacgccaccacagtgcttctcgacaagttcctgtagaggaattgacatttcctcctcgaccacacatgggttgttgacgtgcccactgatacagaacaacttcgtgccctggtttctctcccggccaaacgaagcaaaccaggatccacctcgtcgagcgatcgtcggtgcaacagcaacggtctccacattcgctaccgtagaggggcatccgaaaagaccgacatcggccgggaaaggtggcttaagtctcggcttgccctgcttgccctcgatcgactcgattaatgcagtctcctctccgcaaatatctattttccctcagattcaaaggaaatccaacaataatttagtgaccggcaacaaaccatggcaacagattgatcgcactcacaagctccggcacccttgtgcaagtagacatcgaaatcatatccagatccacaggcgttcttaccgatcaatccagccttgtaggcctcattgatggcctgctggacgtgggaagcttcttggaaaaactctcctctgatatagatgtatgctgcgaacgcacagatgatgaaaagttagctcatggtcgtctgatgaatcatcccgagacaggaatgggatgagctttaccagcagtagcattcatagctcgtccggccaccaagcatccttcaaccagtttgtgggggtctcctcgcatgatttcccgatccttgcatgtacctggctctccctcatcggcattgacaacaaggtatcggggtctgaattagaattgaacagaatcaagataggtcagattccatgtctttttatgtcttttcatgtccatcaataggtagatcgggatctctgaacaagagaaagagatttttttttaaaactcaccgaggatcattctgccaaccaggtttattcataaaactccacttcaaaccagaggggaatccggctcctcctcgacctcgaagaccagaattcttaatggtgtcaatgatccaggaatctcctttgagaaggatctcctttgtcttgtgccaatctcctcgggactaggagtagagaaaaaaagccaaccgatcgaccgaacaaacaggaccaaacgcaaacaacggatgataagacggtgaagattaaaacaaaggaaggaaggagaagaaagagaaaaagaggaaagatctatcagtatgaccggtttagaggaaaagtagcgaatcatccgatccgggtaacctatcggtcctagcacgaatccagaggctaaaaactcacttgggcacccttcagccgccaatcatgtctgttgtaagcgtttgtaaagatccgatcttggtctttgagcccaccgtaatgcctgacgggtggtgcttcagatgcagtcgctagagatcggacgctgggagtgataagccgggcggaggatgagcctgcctgagagacgacgactgtatgttgacgaaatgcagatggaatcgcagtcgatgaagagatcgctcgatccgagtcagcttattctgtcttttctttcctccttctggtaaaacgactgtcctgctatgagaaagaagagaaacaaacctttaagggagcttcgacttgtgtttcgaagcatagtttctcttctcttttttgcagtgagtggatcggaatggattggaaaggaaacgatggataggatgtagttttggggtatcagaacggggtatcttttgctcagaccaatcgacggggggcttattgtggacaaatacttaagttggatttatataagtatcaaatattcaaataaaattgaaatcaaacccaatcttcaagatacacaaaaacagattcacatagatattaagtgactagatattgtagggtgagaacggaaaagatgaatctaaaatacagtgagcgataagattgatacgacagagggcagaaggtcagagcaagagatgcagcagatgatgactatggccaagcgaaagatggtaatacaatctgccggaacatgcagagggtttgaagatatcagataaagcgaagaaaatagcgagtgaaacgaacaagatagttgaatagaaggttctctaagaataagcaagacaaagctcaggtgtccatgacggcgtctgatgaatgggcgtttggagggtaagcgtcctgctgagccaaaaattccaaagacgcccgttgatctggctcctgatggcccaatccgctctccgcttggttcagctcaacaaaaggacttgataatcccagaaccccactgccatctttcagtcccgggctgtttaatgaccaggggaccgagcctagcctccagtcgagttgtcgatctggtaaggatagcgtcaattgggagggcggtctacttgaggttactgcagactcagaagacaaagagtatgagagcagcgacccttctctcttgctcggagagtcttcaggtagcattgtggtcttctggcgcttgccagagggagcaaagacgatcggtccgttcagatctggttgagttaatgtagattcaggggagggcactgggggttcagaggaggatgaggaagaccctttgatcggcgttttagatgtgatctttgtcttgacggatgatctctcgcttgcttgcggaccgccgttcttcctaacaaaaccgacatcgtcgttgatgctgtcatccgtcataccaactgaggcataggcagccagtccgccagccattgaggcacttcttgtaagtcgaccaactgtccgggctttcaaacctttcgctccctgtgggtcttgagtcgtagtgatggtaacggattggtctacagcacccgagcctgatttcagtgcgccagcagtcgctgctctaacatatggattcacgtgtgcggtcgaggagccgatgatagacgctgaccggcgcaaatttcgacgaaggttataattatgttgtggctgcggtgtactttcttgtttcaaaggagggtgagccgaggaagggggcgtagagacagtggtgggtaaagcggaaggcggaggagaggtgtgaatacaggaaggaactgggg

SEQ ID NO: 568 - DNA, 91997 bp, Xanthophyllomyces dendrorhous
atcttcgaagggccgacggaggaaggggcagcgacgtcgtcaagggtagtaactctccttcatgagagaatagaacgtggcgcgtacgagaagcaagacattgatgcatcaggactcttcgttacatacgtagatgaggacaacaacggtttctgaaagactcacgatcttttcctttcttcttcgtccccgctcttaactcgagcccagattctaaactgagggctgtcgatgaaaattctccggcaataggatccagggaatccaacaaaaggggcttccctaggtcggctggcatcgacttcggtgagagctcggatccaaacatggtgaaaccagttgagtgacttggtatgaaactggtggacgatggaagaggagcgatccgagatgtctgttgcaatttagccgagaggctaaagaaagagagacgaagaagaggtgtgaggatggtaagaagaaaggtccagaaagtggtcgaaatcgtacttgagaacttttcttctgccctgactgagatcaggcgctcctgcttgatctaagaaatccatactgttctgcctggccatccctgggcggatgacgcctcctccaggtgagaacagcacggtctggtctgcctgtggattaccaggcatccgaagtggcaagaacggattcccattgggagtcgcgtacggagacatgggtatggcgagtgtgccagtcttgattgaattatgagatgagaatatatctatatgtctgtctgtctgtctgttcgtctttctgtctgtgtgagacgcgaaagcaagaaagaatgaaggcaagatggagaacaggatggaggttcagaatgaaacaatgttgaacgaccgcgcgcgacggatccgatacgtctaggccgacggaaagaaccgtccgaccggaccgatcggcaggaacgagatcgaattttcaagatatgtggcgttgtgtcacatgggacacagccttcaatataaccctaataaccgattaccttcggacacgtccggggagaatcaaccaactcgtatggatacacatctattctgctaaccatgtcatcctgctcacttgctttccctcttccatcaagcttaaaggatcaactcccactcagagaaccacatgcagacatttgcttgaccacatactttctccctacggatgctccccagatggttgagatcctgaataagaaggacgtgtcttggaacttgaccggaccgccttggccgtacacattacagatggctgagggatggatcgagcaagccgaggaaagggctgattccggagctgaacgaaggggtcccatcggtgtgtgatactctgaatcttaagagtgctctggagtgacttgtcaaggatcgatgttcatcaatcgattgatccatgaatcattggctcactaactggctggcacttccagtcatccgaacgatcaactcgttatcctccccatgcccgaagtttctgggaacgatctgcatagtaccaaatccatttactcatgtccaagatctttccctacgagccaagcgagtagcggagaatatggcgaagaaagacgacgagaagtcttgggcagtaggctattatctagatccagcttggaacggaaagggtgtgatgagcgtacgtcattcgttgtctctacttcctcgttctcgaagatcacagtcacaaagcttatatttttaggattatcgtagaccgtactggaagttgtcctagagtactacgtccatcaggagaatcttgaccctcgacgcgtaatcggtcatgccttcgctgataacattgggtcaatgtccgtatctctttctctttcccttccattctcacccctctcatttcgttctctcgttctctacttctcctcctttgccagtctcttccactgacatgacatgatcatttggaaaaaaatcaaccaaacagcaaagtaatgatgaagaacaactttcaacccctttatctctctcgttcgactgtgccggcttcggagagtaaacctggtcaatcaagcgatatgtgttatctagcctgggtacctgacaagcatatcggatatgatgaatccctctggaccgagggtgtgctagagtctttccggtttccaactctttcttctggacagtagagtacattacccttgccaagacctgaacttccgatctagattttcttgtagtgcattcatatacacttggggtatctacaaaggcaggagagaggaagatgtgaaagatggagaaaaggaaacaaagacagacactctgatacaaagaaaatctgaaattgagttttctataggaaaagtctattcgatccgttccctctttcgactacggccttgtctgacggcttccgcccaagcaggtgccacagctggatgagacctgatcctcgactcgaccaacacatcttccatctctctatccaacagacgtcgtagcttgccatcgactgaaacggatccagtctcatccggtgtagagagaacaggaaaaagctcggcgtgataaatcctagaggcttcatcctcagctactccaaccaaagattctacccgatccatccatttcccaacagagttctcttcctccacgcttccacctgatctagattcagtcaccggggaagggaagagcaacggcccgagctggttgatacacatgttgagtgctagatagagttcatggagaaacaacacatgttgatgctgagttctcgacgggaacaactttgtcaacactctattcgggaaaggatgaaacgacgatagatccccatcggcggcgtaaggagtcggaaaaatgagaagggaaagctcgagaaggaagagtgtagggagtgtcaagtttcgccactgattttcggagggagaagaaacaaagaggggcacaaataattcatcaattcgagattctgcctcgacagataacagaagacgtctttttgaacagacaacgagatgaaaaagaaaccaacatagatgatgttagggcctccgttcgagatgagcgtcataaaggcgagaacaccggcggagacgatgtagaacatgaaactgcccatcagaccacggaagagatattctcgctgtgtaaccaatcctttccagttcatgacttgctctccaaacctgagtaaaaaagaagacggaagttaagacatgttgagaccatacgaatggcaaccaatgtagcaaggtccttaccggtcatatgcccaccgttttccttcgtcactcaacccatcaaatgctcttctcccctcgacaaatctttgctcgatctcctccctacctccgaacaaagtatccctcactcggtccggatgattttttttcgcccacgctctccacccatccttcagcaccctctcgactccttcttcaccctgtctttcagggctaaacgacgatctgtctagcccaaggatctggtaaaagttaccagcagacgaaagccgaagatgggatgagagtagagtgtatgcgatatacaacgaaacaaacgcgatatgaatacgtcggatgttcttcggtgtcttgagcaaagaaggaagagggagagcgtttatgagaggagggaggagaacaggcgcaaggtgggtaactggttcgacaagggagctggataggccgtcagttctggagcgaccctcgatctgatgagaatgaggaaggacatactaagggtcgacattgcgtcttcagtatagaagtggcgaatgtgcagcctggcattttttttacagagtatatgtaccaaaatgaggacgtgtcagcatctcagaccgaatacagccatcaaaagtatgaatcccccaaggatcgttctgtccgctcagtgaacccggaggtctcttgaagttttaaatcaaccgtcctccttgccgtagttccttatagcattactcctggaagaaacccgcctaccacaatcaccctcttctctaagtaattgttcctttctgcttcgtctctctctatctctccttagactcctgcattctcttttctatcaacctgtttcctcctatatcagcccaaagatgctccgctctttctgaacacctcctcgccctccgccaagattatgagagctcaaaagatgtctgctccggaatcctcacgccgatttcctggaaaactctcaggaaaagcgctgaaacggtgcaatccttctttaaccactctagcaatccttcgctcttcaaagtctgaaaccggttcatttctgccccttgaatcagactcagaagagaaagagaaagcctaaagggaaacaaaaaggtaggataaatgtcccctccaatagcaatgcctctgctggttccaccccgcatcccttggatctatagggaaaggggctcggcctatcctggagggatttaagttgaaagagatagaacgaaaaagaaataggagagaaatatgtacagtcgccctttaccacgatcactccactgaaacgaccaacaaggtcaggaggaaagggtctaaaaacgagtcttgtggtttgatgaccatccggccttacatcccataagacaactcgttctgaccagaagaaagaagaggagtgtctgctcgggtagaagctcttgcgagagagattcgattcggacggtggaagagggatgtcgagaaggcaacggaaaggcaggccgtctcattgttgacactgagataggacaggagaagagagagaaggcagaggcaaagatagagaggttgaagcagaagtgaaagaaacgtcacaaaaaagaagagtgtaggagatgggttgaacgggagctttccacagagttgagcgtataaggagacgacgagaaggagctttcatcccttttactaaataccatctttacggttgctgcctccttggggaagagagttgtgagaacaagatgaagaaaaggagattggtccttacacaagatgtctgagagagttgcctgtacagagtgaaagagagaaagagcgaaagtgaaagtgattaagagagaacatgagaaagagggaggacacgtgacattgattgggaattgactaagccttagtcaaattcaaaaaaaaacataaattctttccgggaacttccggctcttcccggtttccttcataaccggtcagttccatcgagctttaagagaaacatccatcgtctttgcatcttctctttcgccttcttcctacaaacatccattctatcaataccacaacctttggctcatgctcatcaaaagagtgccaatctcggtctccaggcgatcgcttacccagttgatttctatccagtcttccgtcgtctctcctatcgtgagttcctttccctctcgtagctgtttccttcctattaggttcttctctctttctgtttccccctccggtacagggctgacggtcgattcgttaattctaatcccttaggctatgcctcctaaaagatcagcctcaatagccacaccaccgcctcctccgaaggaggaccctactcagccggccatgcttcggttccaaacccatctacctaatctcccggttcctcctctcgcgaagacgctcgacctgtacctgacgactatcaaaccacacttgacgcccgagcagctcgagacgtcgaccaaggtcgtcaaacagtttgaacaaagtgaaatcgcaaagactcttcagaacaggctagagaaccgagcccagaacgagggcagagacagctggctgagcgactggtggaatgaggctgcctatatgggttacaggttcgtacgcgctctcgaacgatgagctctctatgaagcactacaatccatgcttacgacagtcaattggttatcctggtaaaaaaatgatacagagacccggtcgtgccgtacgtaaactacttttatacacacagaggaacgggcggagaagacaagactcaagctcgacgagcagccgagttgatccgagcgactgaggtcttcagggacttgacagaaaggtatatcgttctggattcgttctaccaaaccataaaagattgatcctgattcatcatgcgccaaactgttgctcagccaaaacttggagccagagcgggttcgagtcactccgctttgcatggattcttacaagaatttgtacgctttctctcaagacagtatcttcttgttggagtaatggttattctcctaacacaactcaaatttaggttcaatgcttctcgaattcctactattcctattgatacgagcaaaaagtatcctacagcaaaaggtcaaaacgatcatgtcatcgtcctgagacgtaacagaatattcacagttcgagtcggagggctaggtgttcaagaaatcgaacggtgagaaatcttatgaacccactgattgcgttgcttagtgagatcatgctgacccccgattaaacatatcaggctgttccaagaggtgattgataccgttggtgacaaagaaggaccacccgtgggtttgctcacgagccaaaacagagacatctgggccgacgttcgttcgttccttctgtgtacgatatctcgtctcttgacgtgtctatggctgtctaaccgatcaaaattccttctacaactcttcaggccagagatcatctcatctccatcgctccatctaaccaagatatcttggagaaaattcagtcatcaatattagcagtagtgttagacgatgatcaccatgctacccatgctggcgggcagagcgagctcgaagatcgaagctggaacctatgggttggcaaggatggggaaaatagatggttcgacaagcatcaatgtaagtcttgttctcatatttgcacaatgcgcaaagctgataaacgcataacgtttctccctcatcccttattagtcatcgtcaccccctccgctcactctggtttcaatggggaacattccctcttggacggaacacctacactcaggatgaatgagttcgttcttgcttcgctcgcccaaggtcgaattgatcttgagccgaaggggtctgccgcttggggagagaacggaagaaagccggtcgagctagagtgggcgctagatgacaaggcacagagggatatcaaggaggcaggaaaggctcatcgagagctgatgggccaacacactatggaggtttgtggatcctggtttctttgtacctgcttttcatatgtccttgattctaattgcgcttccaactatgtggggccttacaaatagggacttcactacgagggatacggaagtgagatcattttatcacttgttcttctctatctcaggctctgatcaccgttgtttcctttcatttatagaggcccttatcaagaagttcaagacttctccggacgcctgggctcagatggtcaagcatttagcgttctacaagctcgagaaccgaatgggagtctgttacgagtctgctcagacccgaaagttcaagttgggtcgaaccgaagtaattcgaagtgcttctcaggaggctaaggagtggattgagagtatgtttagacaaggagaaagcgtgcgtctgctggctgagtttttagtaaattgtatcataatacggagattggaagctcatacatcttctctcaacccgggtcaacaggacgccaaccgagtagctctcttccgtaaagcggctacgcgacatctccagtacgctgcactcgccgccgacggccaaggtgtcgaccgacatctcttcggacttaagaagctcttgaaagaaggcgagcagatgccagagctcttcaccgatgtggctttcggaaagacgaatcattgggagatgagcacatcttcattgctgagtgactaccttgatggatggggctacggagaaggtccgtccattcatctttccttcattgattcagagatatgcgcctcctaaatctaaaatttgcgtgcttaataattaaattccttccctcaattattttgggtttcttctagttgttcctgatggatacggtctcgcctactctgttggtgacaacttccttcggtggatcatcacagcccgcaaagacatgaaagcgaaggagtacaaggaatgcctgatctgggcgtgtgaggaagttcgagagttgatggagcgagcggaaggaagtgccgagcaggggaaagcaaaactctgatcttctcctttgagtgttttgcgcttgagtctcacataaaagctctgtcttgatcaggatgcagaagattgagaggagtatttgtacgatccttctcgttgtagtctaaagttcgaatttcctttgctgtgttgttacaaaatacttgttgtcttcttctttcttctttcaacgcttacgtttacacagaagtgtatcgaaggacttttgcttctcatcttccctttctttctctcttctatatctctccttagcggttaccctaactgtaaatttcattgatatccatgtgtctacacaggttctctctacatgaacgtcatgagttcaagttagaagaatgttgtttatgagagattatcgcggttaaggcataggcgaacaggggcttccttcaaggtagtaagatcttggcatatatgatcaaccagtaatacaacatatcatcaaaactattcatcttctaagatcaatactaaattcgggatcaaatgtagattgaaactcccttattgagtttaaacttgagcgcgaccaagggttcaagaagaacagaagagacatgtgttgagagaagggcacgaaggtgtatgtatgacattctgcgcaaggtagcctgagggaccaggctgtctattcgtcttcgctgtcgtcttccaacatctctgtctctctgcgtttcgaacacaagaaaaacacgagcgggataggcgaaggcagagaaagaaaagagaacccaatcagtaacgaagggcacgcagacagacgaggatagaaagacgcactcaacccgatgaagctctctctccctcttgagtcgtctcttctcagccgccactcttttagccagtgcgcgatcttcctaaatccgcccgaaatttcaggtaaacaccgtcgcaaattgcattgttacaagggtcagaaacgtcttcaattagagagatcgaaacatcgcaagaggaataagggaagaataaagtaaagacgaacccgtagagagtctaggttgatcatcgcaacgcatcccgtttgaggacactgtctacttgaacgtccaatgtattcgtatatgttcgttttggaaaatgaatgcggacagaccgttctgtcgacacatttgatacaaaattcatcaatgagtaagaaagcggatagatggttagcttaatgcgtcgaatacttgagtggtagatgaagacgaacgacgaaacagggtcgaccaaaagggtcaaacttagcgggcatttgaaattttgggtcatgcctcccacttctatctcttcgtccgaatccgattcagctgtacgttcatctatttttggcaaatttagtgggcagaagagatatcagttctcgattatagaagctaagaagcgagaatgttctaggacggaggtttggatagaaatacgagcctcgagggaagaatgtagacataggcagcatgggctcttgggcatgcgcggattcctatattacatattcagaagattagtctctataatgttgacaacatcttgaagagtaatgagagttacccagacagcctctcgaaactggatgtatggctgacatttcatatcttgcatacacaaatgagtgtatatatcggtcagtccaagtcacttgacaaggctagcaaagaacaaggacccgtacatcttgttctgggattctgacttgtgtattcttcctctttgtcttgtgaagtcttctgataaatgccttgcgcatccgtctgagcagtgtgacaaacccaaagtccatagtagatcagcttaacattcattacaaccgaacgaagttgaactaagagacagactgaaaacgagaaccagaaaggactgacaacttcttctccatcttgcaaggcagtgatcaggtctttaagcacattttgtctgatctgaacgaatgcaagttcgtctagcagttgtcgaacggaaccgtcaatctcttcgaaattgctctagttagacaacacattcgggaaaaggcgcaagcggttaatcaatgtatgcatctatgtgttgatatcaagaaagagacacagaaaacgaacggagtcctcatcgagattggcttcggaaaacagagtcgctgtgtccttgaggttcaacaaggaggcattgagggctttgccaatgacagcccaatcctcatgtaatttattcagctgctccccgcacagacagaatcaaggaacaaataaggacgtcagagggagagagaggtgcacaaaaagcagagccatcaaataagggggttcggtctcctactatccttcttgacgaagacgcagatgttcaagacattgaggctcttgaaaggtagctagcgacaggttctggctcaccttagcactcaagctcccatcgagtgtcagaggcctcggctgaaatgtctcgactgtgaggcctctttgtgcaggagtttgaacagtggtcgcactttcatcatgctcttcttccctcccatcaacggttgagactttctcccggcgtctagctgtcgattctggatgcgagtctccaggctctactttgggtacctaggtggatatatcaaaggaggttttgaacataaaagtgatcgaaccggcagaaaatattaagcaagttttcaaggacgcaacaacatgagatgcagacaccgggcctcaccttaactgctctggccatggcgttggctttgatgaagaatgaccgagctgaagtagatgatagtggaggaaagtgaataagagacgcgtcttcttttggacgtcacacgcgtaagcgcgccagcttacgtcagcaagtcataagtgactaccctatgaaggcaattttttggttaacttcccttcctctcttcttctccctttactcctaacaaccgatcaaagctggagtcttactcacttaaaaaacgccatagatctcagccatggcacccagattaactaactcttcatcaggttcatcaaggaagcgcaagacgtccgaaccctccagctcctcgggcgcctccacatcgaagcaacctcttgaaacccttactggcaacctcgttctggcaggcgacgacgacgaagagccggaggacggagagggggctgatctggaggttgacgacgaagaagaggcagaagccttcccggagctcaacttagaggattcagatgaggaagattcagacttcgaggctgatgatgagtcggataatggagtattggaagatgaagaggacggctcggagtctgggtataattcatccgatcttgatggctcagacgatgaggatgagaacggagcgtcaaattccacacccggaacgtctttcacttcctccttgaggatggccgaccgaagaaagactttcgagagggaagcttctccgatatcaaacttcattcaggaaaacactcagaagccggacgagagggacgcttcgatcgtgcccaagccattcgacccgtacaagggacgaatggaggtcagtgagctgacaggaaggccaaagatggtttatgaagatatcgaggctggatatggaagtgaaagtagtactgaggatgtaagtatgcatatccgcgtaacaagccttctaaagatagatatatactatcatatctgaacgtgactggtggtactaggctgacctaactcacaattatcaactgttcaaacttaccaggcccccaatcgagtaggagatattccagaccattggtatgatgatttgcctcacattggatatgacatcaatggaaagaaagtcatgaggccggcagcaggggatgagttggacaagtttttgtctaccgttgaagatcctgattcatggttagtcctctccttcctcactattccttaaaaagccaatctttcttataaaactatcatacacaaatatccttcgtccttgaaacaggacttccgttcaagataagcttttgcagactaatgtgaatctcacggatgccgagcttgatatcatccgacgattgcagaagggagagaacccggatgagaactatgatccgtacgcaccgacagtagaatggtacactagccaaacgatggtcatgcctttgaacggacgagccgagccaaagtcaagattcgttgcgtccaagtgggagcacaagaaggtacgttctatctttgacttggtcttccctatagatgatatataccaaattaatatactctgttactgatgttgtgatgaccgtttttcgattccctctaatagatcatgaagatcgttcgagccattcgacaaggccgaatcgttcctcaaaaaccttcagtgtcaaaaccacagttcttcaacttgtggtctaaccaagatgccgagcccgctgcgcacgctatgcacatgcccgctcctcaacaacgtcttccagacaactcagaatcatacaacccgccggctgagtatttgttggatgaggatgagcgtgaggaatggctcgctcaggagaagggagatcgaaagaaggactacatgcctgcaaagcatgatgctctccgaagagttcctgcttatcacgaatttgttcaggagaggtttgagcgatgcctagatttgtaccttgctcctcgaatgaagcgaacgagattaaacattgatccggaaagcttggtaccaaagttgccggaaccgaaggagctcaagccgttcccgacaatgagcgggatgcgatacattcacccaggtggagtcagggtcaggtgtgtgagtgttgacccgacaggaatgtgggtcgctacaggcgcggaggatggtgtggttagggtctgggatctggcaaatggaaggatgagttggaaatacgaggtcggcaaaaccgcggtgttctcgttggattggtgtcctgacaagtcggttgggttgatcgctgctactctgtacgtttgcttttcttgctttggtcccacttgatttgttgtgatctctcttctcatcattggacttttacgtgtcatgacctgttcatagcgaaaacaaggtcgtcctgctttcgcctcttccattgttaaatcccaatctagctcttgcatcatccacaaccgctcttcgtgcggtcactggagcatcgaccgaagcaccaaaggcgaacgagattcgatgggcccgaggatccgaggttgagcgaaggaaaggtatgcttgtgttgattgaagttccagggacccccaaacaagttacctggcacaagaagggagattacttctcgaccgttgctagtgatggtatgttttgtttttggcttacccttcagaaatcccttctgcctccttcggccacgaaacgctgacagatctgacatacatgttgtttcttcatctgctctaggcgcaaatatgtcggttctcatccatcaactgtcgaagcatcagacacagtccccgtttaaaaggactaagggacaagtgcaaaaggttgctttccacccaagcaagcctcacttcttcgttgtcgtatgtgctttgactccacctatgtttcgggagataagatcttcgttactgatactacttctatttgcttccgcattaacacagacgcagcgatacgtccgactctacgatttggtcggtcaggcgctcatcaaaacgctccagcctggtctgaagtggctctcgtcaattgatgttcacccgctaggtgataacttgatcgttggttcctacgacaagaagctctgttggtttgatctagacttgagttcgaaaccctacaaaaccctccggtcagtctatcgactcccttttttctctcttgtgtcttatgttctgttctgacgattgttcaatatgacacctctatccagataccaaacccgagctatccgatccgttcactaccacaaatcctacccgcttttcgcgtcttgctctgatgatggaaccatcaacatcttccatggaaccgtctactcagatctcatgcaaaacccgctgattgtccctcttaaagtgctccgagggcatggtgtgaggaacggattgggagtgcttgacctgaagtggcacccgacattgcctatgctcatgacggctggagcagacggggaggctaggttgtggatgccttagagagcaggggaggacgaggacgaagaatggccgaggaaacttgcgctttcttcttcgatccaattttattagtcgtagtattttgattacactgcatgctatttcattctttctattgagaaacctgagactggtggaacaattattgtgttctctgttttatatgatcacgtgacatctcaatcctctattcgatgacgagggagggtaaatcccggggagtcatcttttcggtctctctacaagccatgtcgcccgaatgaaccctcaaggtcgtcaggaagaatattcatcatatcatcacagtgaaggcgaagaagaaaacgaaaatatcatcgacctcagtcagtttgatcactctcctaagacgacagctctctcatcgacaccatcagccgttgttcccgaaccatctgaatctataactgctggcttgatgagacgaatcttcaccgttgtcccgccttctccaccttcttcccccgctctctcctctgcaaccacgtctcttgtgtctcaaggaaaggctaaggctagagatcaaatccatagaccgagcggttccctatcctcccatgtggcctccaagcctccaactactaatgggactgaggcggccgctttgaatggactcaaaaatagtcttgaccttgggttgggcggttggtggtctgggaagggaaaggcatctactacgaatgatgatgagatggaaaagttcacagaagaaccagacgagtatttgactttgttcgacgagagagacgtcatcaggccggtgcctcaagcagtctcatcaatggatggcgcaaatctcgacgcgtcttcctcccaggggtccttatatgacggatttccatcgttccaccatcatttaacccaggagcgatctacgtccccagacgtcagctccagattgtccgaggcgctctcttctacactcgatgtgccctcctcgagcgcgcccgcctcggttctctcatatcctccccaagctcatatcgcgcctccttccccgtcgtcttcacgtacaaagtctttgttctcgagccgtcagcctggtagatctggtccatttcacgcggttcatagaggtccctctccagtaccgttcttacatcagcgatcagggtcggtttcatctttagagtctttaagagagctgcaaaggaaacaaagcgttcaagagcagcaggcaagagcttttggagtaagcgttcctagcgcattgtcagcctccgggctcggctggtggagggaaaataagacggttcgtttaattctttactccctaggtcacacgtagacgactgtgaagtaaacatgtacatcttgacctggggggacggcatacagatggttgatggaatgctttcagatgaagataagggaagtacggtcgaagaggaggaggcaaatattgctcgaaaatgttcgtccataatcattcgtatcatacttcaagagtggtttggcaaaatagctgatatatagatatccctaaagatcgggcgccgaagaatcccatcgtcttctgtcatggagtgagtgaccctcgcttcaacaaaaaaagagagaaacacttgacggtacatctgatcgctgattgatctgttctcttcttcttcttctgttttctctctcttccgtttggcgctccttcagttattcggatttgatcttatcggtcctgcatctatgcctactttgcagatatcacattggcgaggtatccgagaggtcctcgaagccaatggggccgaagtgtttatcggtcgagttcctgcaacgtcatcgatcgaggagcgagcaaacatattgaaagaagagattgagaaaaaatttgagggaagggaagttaatttggtcggacacagtatgggcgggcttgattgcaggtatctggcctcgaagctgaagccaatgaagttcaaagtattatccgtcaccacggtcgcaacacctcaccgagggtctgcttttgcggattatatgatcgatcaggtcatcggacgtatgtttctctcttcgctttcagtgttcatcttttttaatacccggatgagctcaccgaccgcttgcattgaaactatcaggtgcatatctgccatctgttttgtcggtgatggacgtccttcgattacctaaccaaggagacggtcgggcattcgatgcgttaggaacaatgtccatgtcaaagttcaatattgacgtgcgtgatgacccagatgtgatgtatgcttcttggggagcaagattcgatccatcgtacttcaacaccttcaagtatgaacgccttgtcatcatcaaccttgaggtttaaggtttagaactaactctagcatcttcgttttgtcaccaccattgttgttcaaaacttcagatggcctcactctgtcatcttccggaaggaaggcccgaacgatggtttggtcagcgttcgaagcgcacaatggggagaatatatgggtactctagagaatgtcaatcatctgtgaggtttttcttatcaatttgactttcttgcccagagcggagtcttttatcctgtatcagctgctgatcacagagctttgttaccaaccctgtagagatctagtgggctgggtcaaccaagtcagatatacactttccgaatggatgggtcagcctatcaagtttaaaccggctagtttctgtgagagaaagctttccgtcatctggacctagacatgccttattcgttgcttccttctttcgtgctactgatccgacgaacgctttgatgtacgttatcgtctttcttgttctgtatatgctttcttgatagatttggaactggtgagtggtttgattaagaatcagaaatgacctcgaaggtagcactgaatggctgaccaactccgatgatatcctgtgccttggtccgatctctagggcgacatgttagctaagagaggattctaaagaaccgtatagatccatataccatgcatgtttgtagagagaggagcgcaagaaagaacgcaaacacggaaaagaaaacgaaagaaatcaaaacaacagaagcgtgttaacaaagcagacgactgcgcaggatttcgcatgagaagtcgtttcatcattcaccaacaatcatggctgtcatgacttccgtcttgctcatcaccacatcgtccttttttcctcctttcctccaccctgtctctttggtctcgttccctctggctctcgctcttgctcgacatatcttcgttgtaagtttgatcggataggttgtaggaatctttatgctaacgtctgtttcgtacacgattggtcgtcaacagatagctactttcacccttcggtactcttctttctttaagcccgttcaacatcgagtcctccacaccgcatacattcaggaagaacacaaaaaatagccactgaaccttatactaccctcacacacagaagcatcacccacttcggttcacgctttaccttgaatctttaaaaccatgtccgcctcttctgctcagttgtacgtctccttccttgtcttcgattcctgtcaatggttcctggttcgcagttgaacggtcaggctgtgcccaagctgatttcaattcgacttttcaattgcccctgatatgtgtgtcatctctcccgatatctcctggtgtcggtacgatatcgtcttgaattcatcactgtcctcttttcgatctacaatctgggtctatattgggctcaatctcgacgaacgatcacaaaacctctgcctgtcctcttcacgaccttatgcgattctacttgccactggtgacttctaccttttgcgacttcttttttctttggccgaaccgacttcaagatcagcctcagttactcgaatcctctctctatccaactttccaaaagagctgaagacgagggatttaattgctgcgttctcagaatgggaaggcgaaccgggtggatttaaagtcaaatgggttgatgatacgaacgcgctcatagtatttggagaggcagctactggtcagtttgtctggtgttctctcttctattctgaaaaaagtcaaatccggatagatcgacgagtcctcatgtctcgtcgtccttgttgtcctcaatctatacggtgtatcagccaagaaagcataccttcgaacactacttcaaccccactcccacctcaccgcggaagctgtcgttaggccatacgacggacccgatgcgcagaatatcatctcgaatgtcaacgctcggggctcaacagcggccccaggaacaacaggtacaggtagtaggcacggacaaggagcaggctccatctctggacgagagtacgtacactcagtcatttcatcgtcttcgataaagttatatgcgtataagtttcatgttttgttccaagagattactcatttaatcaatctgtacatacatgcgctatctccagctcccttgctcctgccacgacttcttctcatcatcgatctccctctttcggaattgctcctcctatcgctggttcccatcatcgccagtcttctttctctcacacccgaatgggttcctttggttcctctaccaaatcatggggtcccaataccacgttctcgtcctcattttcgaaaccgtcaggaggcagagcccacactacttcttccagtagtggatcgggctccggttctcaagaaggagaccatactgcagtcggtggagcggatgctgcactaggagagatcgagaaagctctgaaaggcgtcacgacaaggggtgctcagattctagggccagggcatatgatcggtggacagggacagcttgtctaaaccctcaaccttcttgttgatctcatcttctcttgcttccgatctcttttttctttcctggttttgttctctaggttttccttgttccttgtcttttcctctgaagcaaagcaataaccgatcgatcaactccccgatgccgttttcttctctttctctatctctgacatctctcggcttctacataaccagttctatagtctgagctgctttgtccgtctcgatttggttcatatcttccatatcatgcatcttgatcattcgatcttttccttatcagcttctctatctagccttctccccatctatttccgtcaatctgttcagttcactctcctttctatctccagttttctatttcacgctttctctcgtctttactcacctctcttctctttctctctctcctctctttctttgcttccctggcttctttatcgctaccaatcatgaaattacgagaacacgttccgattgttgataagccgtgaaggaatcaagaacgtgtacgttgagaagatgtccgggagaacacagttggtaggtttgatctcatcgacagttctcacaagagggaagacgagaatgaaacagattcattcctcagtcaaaacgaatgtttcttcttcctttttttaaaagacatctctgacgcaatcacctttccgagcttggaagattatggactgcgtgcgaaactggatttttcatagcgcgtgagccatatcgagtctacacaagatgggcgtctttccattcttcaccagcctttccaagtttcatgctgaagtgagatatgcgcgaggtagaggtcacacatcgactgactcgatttgattaagcaaatacgcattataaagattctaacgaataagaagagcaagagcgagagcgagaaacggagcaagcgaggagaggtaacggataaacaatggcagatagtacagtcatagacattatcagcaataagaaagaaagaaaggaagattcataagtcttatcaaagagaaaaaaaagagaggtgggagaatagcctcataactatggaagccgtttcgaatcatcccatgatcacttggtgcataccgccgagctcaatcaacattgccagcatttctgattcgatcctcccgaactaatctcttcctcaccaatctttccatctcgtaattcaaagcaaacgcccaagaatctctctccaattttgaacgcgctcggagtacgatcttcttgtgcccatttttccccaagggtggaggctgaaaggaagcatcatcttcggctcgacggctgtatttctgggcagatgacgttaccacatgtgggcggtaccagatcaccagacaggtatctatcggcagttggcatcatgagtggtattcgccaagctgtcagagaacaaatttcaattggtagaggaaataatagcaagacttgacgtaccatcacttccatcagcggtctgcagtccgtctgcgtatcgtctcaactcgcctgaccaagcttcttcgttggacgaccttggtgtttcgttctgggccaacaagcctgtataaacctgagagtgtcatgaagaaaaccagagcgatcagcatctcgcactacgtcccaataacgagatcctcgttttgctcacatatgcatcaataagtgagatccgtcgagtgcgcacatggaacgccgtccctaaacggaacgagaactggaccagatgtccataacaaagcaagatatgtgtgtttctagatcggtgtcacagagatggttcaacgtgagttctcttgcagaatgtgaccgcactgaaatgacaggatacaccaaccgatactgtctcgaaccccgcttgatgaacagtcgtccactttttacgataggcaggcaaccgttgatgatgcaccagttccctgtaaatcagatgtcataaccgagtatcagtaatagaagcagaacaaccgatttccttcggaaggaactctgtcgcgcatcaacaaagttaatcactcacagatagtatccatgtgttcaggcggatcttcaggatcttcgatttccctatccatttcgtcagttcgtccggagagaatatcggatacggctatgtgcttgatgcgagcacattccatttccctctcagctctacatatgtatcaagaggtatagatcttgttgaggttctggtcatcgacagagttgggtatacaaaactcactgctcctcaagtttccggacccaatatatgcttagagcgttaagctaaataaataccaaattcagatgagtatatcgaagagaaccatacaagaagaagttgttgtattttaacgactcactcgatccacccattcacgggcaataagtcttgagtgggcctagaagaagaagaaacccccaggtcaatgtctgacctagtcaagattgacagactagacactcacttcgaataagactttctctccactcttgaattccacttcgaacatccgcgtttccctcaatttcttctgttcatgcaagccagtgcccttaaatacgccgtctccgccttcatcctcctcgtcttcactcatgctctcccaaccaccttcatccccgctagtgctatgcgtggagcctgaccctgtaaacccgtttgcttctcgggatttaggatttcctttctttttaacatcgcctgtcgatctgtaacgacggacttccttgatgtctctcaaatcaatgaaaccgttagaccccaagatttgctgaatcgctcgcttgtgttcgtgaaaaaggaaatcgtcgcgtgtttcaaatgaaggtgcatcatctgcggttggccgtctaggagggtgtgccttggaaggactgcaaacgaagagatgattcgcgctaaagatacccatgatgagagagtgtaagttaagagcccaggttgttcgaatgccaaggagtatacttcacgtactgggagacgaagtacgtctgggttctgacttgagtcttggatttgattcgatagacgaagccttctatgctagtaggctcggtgaggtggacctggttcttggtccgaacaaacgggacctggtgtcgaatcgtcctgagttcgagtttggaaaaaactcttctgccttggactcgacactgatagtggatatcaccaataaacagagatatcggtcagaaactgaagagcatacggaaagagagaacgggtactaaagatctacctgatacagtggtccagccccagcaaggacattccagtcccgtttgttgcctgtcacatctgtgtctgcccaaacccaatctagcctgctttctcttctccacgcaagtgccaaacgatcctccacgccttcgagctcatctccgtccgagttgaggatcccggaggtagtcaagagttccttccatgcaggaacgtccatcatgactttcgcgcagatgcgaatcaatttccgtctcgtcacatgccgaagaacatcttccatgctgtccactcctggatcctcgccaatctgaggaatcttgatcctaatccttgcgcggttcacctttggaacgtgaatatccaagtatgggggaggaaagttgaggacattgagttggcaataagtttcccacatccaatcaaccgaacgagaatgggatttaggccgaaagatgaaaatcgaggttcctgggccggatctgattggcattctggctcgaaaacgcgcacctcgactatcaggtttacaaggaggggtggtcaagcaaaaagtgtagtctgtctgagagtctgttataagagacaaatgacataagatgattattttgaggatcagcacccagattctgcagactctcaggttgcgctcgacttacagagagacaacgaagtttctttgtgaagccatattacataggccaatttctttttccctacaaatttctcttgaaaaggaaatgtctgtggaacaagaacagaaaaggaggtcagtctcaacatgtatagaatgccccgataagaaatgagttgagaaaagaaaaaaaatgagaataagctacacatacccaattttgccaaatctcgattcttcctctcctcatgaccaccatcatctcctcccaaggctcacttctgttggctggctcttgacgttgagtataagcatcataaccgctaggcaagctcgacaagcgtgaccattgtaccttgacaagcattcgatctttctcgatgcacaagattaaaggtgtttagaccaagatatatttatacgaggccaaaatatgttctctgagacaatgacatacctctcaagacaacatcattcggtccaagatctctcacctcttcgtcttctgagctatgttccttaccgtttgctatcctttgcaaatgatcctgactctcgactcctgttccgctcgaccggttgagaacttctcttggatccgcaggagattggtctccatcgagagtgtttccccattgagcaaattcctcgtcattcatcctttcttttgcctttccaggtagcagtttgcttgctaccgaggatatattggacggagggttgactggaaaacgaactgaggttgactgctgattactcataagtcggttggcgataggtggaaataatccgccaagagttggctttctattaatcgccgggaagggaccgttcaaacctgaagaagcgataggaacatcataaggctgactagattgcttgagcgcggatcttagaggcggagctgatggcgtagattgtggtacgaccggcaacgaggtgatatggtcttgggaggaggtggatgcccaaccatcattcgaggccaagacaggtgatgcaggagtatgagaaaacgtaggtaaagaggtggatgtaggtacaatgcgttcgatgctgatattggggggcatattgatgtccttggtcttgtcgatagacatgccgactgcagacacactagagaagttcctagggcgacgcccggtatggtatggaatggcttggatgctatctgcaaaagaagttttgcgttgtcgggagaggatcgttttagaaaacgaggcggacggtatgttcatggccgaggttgctgagctatcaggtatacgtaatgcagcgccaacatctgatgctcgacgacttctattgacattgaagaatgtaggttgggcagggtcgagtgagtgtatagaggattgacgagagacagggcgtagggagtctgtgtcaagctcgcttggatcccagtcgcttacgtcgaggtgggtttgagcagaaacgaaagattctgccccaccgctcgatgtggagattgtagggaagagcggagggatcgagagattatcaagattatcaggactcgagactagaggagcatcttcttcgtccagtaatgttgttcgtagacctcggcgtggagacgaagtcgaaggatcactgaggaaagctcgttccgtatttgggttgaacaacccgttcggtagtaaaccggaccttgctctaggatgcgcgacagacgaagtagaagcacctctcttcctcgttcgcacacttccttcgtcaccgtgccactttatcgtccaccaccctaattgatccaactcgtctacttcttcctccgtatcactattcgcttcatcgtcaatgttggtgtcatcaccctcgatcttgccgtcttcttctagcatctgccgagcccagctcttcatgtgctctcgcttgcggtgcctggtttttgcttcaagcccatcctccccccattcggattcagatctctcgcgtgttcggataaaacgacgtctgcgaacgatgtctcgtcttttaagtctcctagtattctcgtcgcctacatcgactgtcgcagtggtggctgtgctgtcagaacggagacgagtatgggccattgattcgtgttctccatggtgcggtgaagactctttgtgtgataacgggccgataaagactcgaacggtccggtgagggttgctaggcatgcggtatggtgtttttggaccggacgacatcgagtgagttaaacgaatgagccactgctcgatccagaacctggttcggtcacacaattaggaagttctataggtgcgcgaccagaagtcgaagcacttaagataacaaaaacgagagaaaaggaatgagaaacggaacaaagcagatacacaagaagaagcagagtgggtctctgttccgagtttctttggagctggagaactatgttgagttgtgagagcctggacgaatgtatgctcgtggaggagaacacatagatgggaaggaatatagaacagcacttaccggcaaggtccgatcagagaacccttgaaggaactatactttctggcttgccggaacttaaggaagatatagcttgactcttactatctatcagagaacaaagatgatagatgtcctcttccgagagattcgattgatgcttgtggccgatcgaagaagaatgaggcttcgatggatggttgttatggtgtctgatggattccgcttcagagaattcattcggccaaccatcccatcaacaactccgagtgactgacaaaggaccggataacgtccactctggaaatacacatatatacacccatggtatgcttcgtcatgcttcgttctaatctatgtttcttttggagtcatcatgggatacgattaccttttcttactttgtttctttttgaccatggcctggtcatcacttctctactccgtgtatctaactaggaagaaacttcgagtcgactctcatccctgactgtcgccgaacagggtgttgagcctcgtcgactgccttgcttaccagcagaaatgttcgtgtgactttcttcatccttggagccatcttcgaaggtcattactgattaaacaaatgatgaacgcttagctggcgaaagatcatcatccatgcttcccctgggagagtatttgactgtggcctaacaaacagtatcgaagaacaggaaggctctctctctgggctcggtttctggcgtgtaaacattccctctcgtgagtaatcgatatcctaattgctatataatgaatagtctcagtttctgaccatgtcaaattgattgttctttccgctatggacgactatcgctcttagaacataccaggtacaacatatgtctcgtctctcgtcagtttcgggatctttgtaccccacttctctatcgggatcttaaactatcttctccaaactcgatacctctattcgcgcggacaatatttcggaatccaatcacggatccctggacactagaacagagtaccggctggaagctcccaaactatgcatcctatgctatgagattagacgttgatctcagcaggtggttgaataaaaccgacgctgaaggaaatccgatctggccggaagatcaagaagatgccgaaagtgatgacgaggacgaggaatgggaggaagaccatccgatggagctaatatcgagactgatctggaagctggacgggctgagaatgtttctttgggtttgttctaacctttgcattttcccgccctcgatgttggcgctgatcgaactctgttcttgggtcatttaggattcaacagaaaaccttcactcactcccaaacagtatccttcattcactagcaagggcgccatgttcacagaatttgaaggatctggactggttcccagtttcacgtaagaactttgatggtttttgcgagttgctcatgagcgcaaaaggtattcagcatctagaaatcggagaactgtacgtatctcgatctgttttaagacttgttttcgtttctgaccaactcatttgaattgtgttgtggcacaacagtcatgatcatttcttcatgccgacaaccaaacagatcgtcctgcctgatttgcatactcttgcgatttctggtttgtttgtttgtttgtttgtttgtttgtttgtttgatttcttccatatcaagagacacagactgattctcttctatgtctctctttcaacaggagatggactagtaaccaggttgggccggctgctgttcgaactcttccaaacatagaattctacccgtatttctaattgtattctctattttctgtagtatactcttttctcaagcgagcttgccatcccttaaacgactcacacattggtccaccttccatccgcatgcattgatgaccttgatcgctcttttgagagcgcatggagaaaatctagaatgtctgtctttatggtctcccacgggcagagagttgatctctgaagaacacttccaattggtgacgatagacatgttaaaatcgtgtcccaacctgaagttagtccaaatcatgtttcttgatctcttccttgtacgaccctaactcagtttggttgattcgctcggtatggactgaatcttctatagattcttggagcttgatatatttgctccgcatccgcttccgcttgatatgagcccgcatcgatcgattgaacacatatcgctcggtctggaactcttaccgaccaaagaagatcgtatcgagtttgatgtttctccaatggatcaactcgttcgatcaatcaccaagaaatcgttcccaagtttgaagagcgtacatttgttgagcgctgatatgtcggcggtgtttgattctgcaaagggaaagaccggttggggaatgttaccaggatggtgtaggtgggccaagtcgcaagggttcgatctgaaggatggctggggtgacgtaattagagaagaggactgggcttggctagaggtgaaagcggaggtgagtatgaatctcgttcctcacaatttctgttttggttgatatcgactctgttgacattctgttcaaaactatttgccatttgacccttgggataaattgaacgcatcttttccattgaaaccatcggagaaagttggatagctcggctgagtctctatagatgaatgttgaatacagcgaaaagaagctcgttctagattctgacaattagatacctggtctacgtcaacgtcattccagactaatttaattcatctagaatccattctattacaagttctacaagcgttaccatgccttccttgtcccctttgtgggttttttatcgggcggactgaatgtaccagttggcttcttggtatagaacgcctggaagaaggcatccttgtcttcccatccaaagccgacctaaagattgacgaagaaggagcgaaattggtcaagagtgtcatcagaaacctatatatggaaatggagaaccagcaaaaaaaaaatgttgctctgatagaacaaataggcttactctcttcaggcgacctgccgtagtgatacctttcgcacaggcctcggtcaaaccaggagaagaacttaggggtgaatcgtttggcgctaacagggtgaaactcgtgggtaaaccacgaacaaaaggcgggaagtctgtcaaaatcttcaagagatgtgctaggatagggaaagcactggggatagagtatgtagcggatgaagtgagaggggtcggagatgggtatctagaaacagaatgatcaatgaatgaaggtcagtccgagaagcaacaatggagactcgtgaccaggaagagacgcgatgaagcttaaagagacagactcacttaacacaaaccaaccagattccaaatggtgtccatccttttctctctccatgatttccaaacacgtcttcaaacttcaagacaccccgcccgttactggtcgttccttcggggaacaagcagagcactctatcttgctgttttgctcttgtctggacgtccgagaaggtttctcgaatagttgatgtaggaggagtcgatggagtatatccagtgtagagcagagttcgagaaaggggcagagtgaacacggtcgggggcgtgcccaaggatgaagcctccgatgggaacacaaagattggatcgaatctatagaaagaggtgaagggttacaacagataggcttaatttactttcagcactgtatgagatgacttgaaagaatgagcctacttgtatgtgaaccaaagaagctcgatccaagagacccagttggaaacgataagatctccagctttaggcttccatgtgttcttcaagtcagatttcctgtagatgatgaaacatatcaacggtggacaggctgagatgccgtcgagaaatgttttaaaaaatgcgtaccctctagaggtagaagccgagaacttcacgtcaagtcttagcgctcccagaaacaatagaatcagtcgtgtccagacggccgacgcgactcgacagtaaggacgatggatgaccgaaggcgtagtagcactctatacattcatcaaaagcgttcagccggcagccataagaagaattcatgaggtagttgttactgacaagtatcccgccgataatttcaacagtgagcagatacaatatcccgcaaagaacgataggtatagccttgatgtacacagatggtgacgaaaagctctttcagccacttgacacaaggttcaactttctatataggcagtagacttactctgacgactccgactacataccggattccggtaaagacagattccagcgggcttgcttccgatcgaggaggtataggtgtcaagaacggctgtgaataagtacaagcagaagaagtaccaagtaatgagacaccggttatgtcggagggatttggagatcaatcaagattacctgaatgcccgttcccggatcctaaatgaaacaacatgagacaaacgacgtggtgagaataaactcgggatgcaaatcaagaaaaggcttgaactgactctccatctagaatacttctccattgcaacggcggtagcggatgatgttgggagctcaagagtttgggaatgcttagtggcttgtctcacagtcgtagccggcttggatgagtcagcgaaaaatgcgatcatcagaataatcattagaaaaaaaaaccgaaatacagagtaagaccaaacgttcaacattcaaacatccctcaaacagtcgttgctcgtattatatccagcatgtccagctcaataagtccgttctcgaccatggaggacgctatcgccgcttttggtagaggagagttcgtcgtagtcatggacgatgaggatcgagagaacgagggggatttgttaattgccgctagtgaatgcacaaccgagaagatggcttggttcatcaagcacaccaggtttgttctattcatatcattctgtgtgcattctatttgatgtttcactatataggtgtcgaagtcctctggtttctttgtggacaaacgggcgtggtcgactgccccatcacctttgcgctgactcttctttcttctaccctcttcttgacgtcaccattgtggctctagtgggtacatatgcatttctctcccccagagtcgcttggaggcgctcgacatcccgatgatggtcgctcgtaatgaggaaaccaaccagactgcttatactgtcactgtcgactacaacaaaggtgcggcccatcatctctatctgtgccgtttcgtccgattctaggctgatgtacttcgtttttgtttcttctgtggcaccttgtgttacaggaaccacgaccggtatctcagcccatgatcgagccttgacagcacgaaaactggccgatctttcttcgtccgcttccgacttcaaccgaccaggccacatggttcctctacgatatcacgacggcggtgtgctcaagagaaaaggccacaccgaatctgctctgggtccgtcgtttttcttctcagattctgcttacgataacatccttatatgtcttgaaccaacttctcgctcccttcgctttggcgcattgttgctctccgaatcatgattcatattcaaacacagatctttgcgttcttgcatcccttcccccggcaggtcttctctgcgaattggttgcgccggatccaaacccgacaggacgaatggctcagttggacgactgtattactttcgccaaacagtggaacttgcctctcatcacggtggagatgctcaagaggtggagagagcagaagggcctctgattatgcccaaatatattgaatatgaaaagtgaagaaatgattactatcaaaaacggagtcaattctgaagcgatatatatcttagaaggctcttccacgacgataaacaagttgttatgcatgagtcctattgacagcagatacctatgtacggtaaggaggtgaggcagaagaataaatcaaagacgtgcttccagcgtttccaagatcaatttagagagtaatcgatttccctatgttcattatccaacgaaaatgtgtccttgtcctgaatcagtctcacccgtttctccagaacgttgtaacgagtttgccgacaaaggattagacgtacgttctcatttagatgtacaccatccaccaacaagtcctcgacaacatgtccctccccctgtatatattcttccatggcctgtcacatcaaaagcactcttgcaatcagtcaaaggcagaaagagagcgagaatgatcaagactcgcgtttacaaaggacagtaaatcaactgacctgccagaagtctactaatatcaccccttcgcccacagcttccagctcatgccctaggtttcgacaggcatccgcgtacagagccatctgcaccttagttcggccgttccacgtgacctcggaaggtatgggtggcgttatgagaagtttgatgactgatggggaaagcatgttcagtatcgtatctagattctggacgtattcacccaaaggaacctatcaagcgtgtatattaaaatggccggagtttcatcagaccaaatttctagacctcaaaagataagataaaggaaaaagtatgaaaagaaaagacgtgcgcgagattctccccagccaacagagtcattagtccctaagagaagagtgatgaacttgattgagctggaagaagtgccatttggcacaaacaagtctcgtgcgattggtaggacaccccgagtagatatgcctccgacccctcggttgaggattgagaacgttcccccatatctccctgagttgaccggaacacgacacacacacaaaaagcgcaacatatctcattattaaagatactacagccatgctattgatgtctatggctttgaatgccctcaaggaaggtgttagagtgcgtctagaaggttgaagacgaacgagtaagttgagttgtgaacccctcaggcgaggtacttctgtcagtaattgaatctcctaataatatggcataaggtatatctgatgaaggtagttccatcgtcgacacggtcgaagttcgaaggtcatccggtagtttagatgactgggccacgtgggggtgggaagttaactgatcttgcatgactgggtcagagaagccagaataggtaatatcggaatgccatagctcggtgttcacagtcaatgcttcggagatgactggtctagacagtcctagtgagctcaatgttatgaaccccagagcaattgctgttttaatagatgaggccatgccaaagagagagtatataatcccaagtcgttgtgtcgttataaggtcagatttacacctctacctaccatcatcgaatatcccagggtatacaaaagaatttgttagttctctgaggacgatacagctacccatactatcttgtgcaccgaagagaaaatacagctggtctctatggaccactcacttttgggagccagggttcgttgtttctattaaaagaagaaaaatggttcgaaaggaatgttggtcactgtactttggaaaaaagtgaaaattaatttcgatgcgcggagataagataagataatgacaccagagaacgtcatctacagataccgcagagtggccttgagggaagcgatgctacgatgagttctaagagatcattagactcgatgaggttgacagagtgaaactatcacaatgattaaattcttgtaacacatatatatagaggcgaaagattcaatacaaaaaagaaacagaattgcgaagaaataaagtagatatcaatacaaaggctgtctgcttttctcaggtttgtcatgagtacatccatcttgatgctcgatgtatgatgatccgattcattaacaaacaaaaaacggtctaggtaattatccaaaacgatcgtcaaagttagagagaagtatgaacttaaaaacagtgggaatatcatctcgagtcatcaagaccactccagttccaagaagctcgaagagggtcggttctcaagaactcggcgatttcaacattaggtctccacattcggaccgtcgaattgtctgcgcatgaagcaaacttatacagggtacaaagaacgacaatgccaggttagcacgtgtattggttcaacaaaaaaaaagtacacaagcataagccgattcgaatgctcactccttgtgatccccatgatacaccagttgtttcaaacgctcctgctgcggctcctgcgcctgatgtattcaatacaatcccttcactctcttttgcgctcaaagttcgagttagacctcctcctacttcccatatatgaacttttcctgatgtggagcccgaggtcagatatcgaccgcatgaagatagagcgagccgggtgtagaaacttgttcggagaagaggatgagtgtacgtctggctaagaggggtagagagatcatacggtgtataagtatgaattctataattgacaggttgttttatagagaaagatgattcgtcagtgaaatgagactacactcgaaagaaagggactgatgcgcacgtgttgtctgttcttagcgagtagatcacatctccttctttccctaataccaagcttgacaccccatatgatctcttccaacttgatagccctttctcgccggttgattcacctgactcttggataggaacagaaggtgacttggaagaatatgagccgtgcatcctaagatcccaaagcttcactacactatctcccgttccggctgagatcagagtatgaggacgggatggaagatagagaagcgatgtaggagatctagaggccgagcgctgaaaaattggatatgtcaatatagtcggctaattagaagcagcttgtgcgtccgaagggacaatgaaacacttgcacatactatttgggtccctcgcttcggcttcaaccctttatctccatgagcttgacggatggtatttactggactcttattccctatcgtggcctctgcgtggattcaagcaagagagacgaaacaaaaagaaatcaaatcctgtgatgaacaagagcatttgaacattagaagtatggaacatacgaagtgttggccctggcttgcctcgtttgttcggctgctcaagcgcactagttgcgctcccatcgcgcagatcatacacatgtatatttccgtctctggaagcggtagagatcacgtctattataattgtgatagatatagtagccacagttaagtatacatgatccgacgatcaatcaatgatgaactcagtagaacgagaggcatacgaggagaggaaggatcccaacaagaagtcttgattgttcccaagtggcctttcaagcgcgcgatcggctttgatgtgggcacatccaggacatatgcagtctgatcaccacttgaagttacctattggtatattcgatttgatatgattgagtgacaaccctacaggcaggagtaatagacacagagtggtatggatgtaaacgatatgacacgtacaacacggttatcgtccaatgaccaagcgacatcaaagattgcattctcgtggactttgatcgaacgatgggcgcgttcgccgtcccattgagacgagtggtcaagattgagaaagtctacgcttccttcttcagtcccgacacaaagaatctgggaaccgcctcgtttggcatctaatgtcaggacatataacgagaaggatgaaaaatcagagctaaatcctttgctacgtgttttttttacaacaaaatgacacaaactgtaagagaaggcgcaagtgagagggggcgcgaaatcgttttcggattgatgagagggtattcgatatacatccttcgtgtgagatgagactaagattgaagggtatctatctatcatcgacactgaaaaacattaatatgttgtgtaacacgtcattagaagtatgcacgagattattggagtgacgagaaagacaagatattaaccttgaaaatctagccaagccggtcctcgtttgtttcttggtatagagcttctttgatccaaaaattgcagaccacccatgcttctcctgcataatctatcctgagtcgtgccctgaacaggcatccttatcccttggggttctacgataagttcgtcctcaacacccgtttccataatttctcgtcgctgcttcttcctcgtttcccttctccttcccgttatagtgtcctcgtcagaagaagactcattcctcgtgggagaagaaaaagtgaacttgagtcgtttggattttgtttcacccatctcctcgtcgtcactataaggtgatctatgagcaatcacttgctggtcgttatccgttcgttcttcgaacccacacgacaagtcaaagcggtaactactctttctcgcgaaaggtgtgccactcaaacttccagcgaccgaagaagatgcgtcaaagatgggagaggatgagaactcatcattacgaggaagagatgagctgatcggagatagtggaagctgctcaagtatgttggtttcagaaacgaaacaagccttgggagtggatccgaacagagtgtcatctatgatattcgggtcggagacaagatatggtggcgtgagaagtcttcccgacatgatcggttccagcggctcaacgtttttctctgctgatttgaacgtcagaacttctatacttcttgatggatacaatgttgataagctgaggaattgcgtagaggagtgaacgaagcaagttgatgaatgatgatggatgatggtctgaaagaacaaaagcgcgttccgtcattaaacacgtcacgtcgagcgagacgcgtcgcgtgttcctcttctatcttcaatgactttgtatgctcagatattcataaaagcattctcgttcataaactttcgaagggtatgttggttctatgacatttttatcgatattacactattgactttgagtggacgcaaatgttcgtctacgactctatcgcttcccgcgcacttcttcgtcgcgaacgacatgtagtccgacccggttaaccattccctgattggcacccgcactataagacaagtacaatcagatcattagagaagtattagttcaaaaagcattgttcggtacgtagggactggccgtaattgagtaggaatgtacttactgtccacgagaccaactgtttgatgggtcggtcgagaggcgtctgataagctcacagtaactcatcatatatcagtgtcgagatgagaaagaatcacttactcgtatgattgagcccaggctaagatgctatggtcatgattctatcgaacatgaaagcatatttgattaaattaaagcttttgagtattcaaagttgacgattcaagttacttacgaatgctgtggacacaacaggggttggaatttgatccggaccaagattaggttgcggtgtgaaagctggattttcaaacgaaggacctatcaaaaatgatatcctcgaaaccgaataggaaccttcgagacacatacatttaagtcttgatcgagcaacagcatcccagatgtgaaaggtctgtacgagtaaatgtgcattcagtgcattgatatggaaagtcaaaagagaaagagagtgatcttaccccatcgccacctgctcagcacaaaagagacaacatgagtaaacagttgacgaatatgcaagaaggaagaacaggacgaaacacttacctcccgtcacccatgttccgtatcttttatggaagctgatagtattcacacctagacaaatataaatgtgtcttctcttgttagaatgttccattgagataatgtaaggaacctctaagttcgaaggggttgataactcactatagattgctgctggctttggcggattcgtccgtggcgggggaggttcttttctgtgacatttgaatgagaacgtgtctgctgcattcgcctcgttaaccaaactgtgatttaataagaacgtaagtttgtggatagattctcgagttgcaaattcagtattaggatgatcactcacttgtaagccatccttccttcaatagacccgattgcgtaccccggtttatctgttgaaggcaaacaggcgatcactcttgtctgccacttcagcggcgagtccatttccttcaacgctgtcccagggtttctgactggtgaatcgtagagaacagttgattttgtattcaatgatctatacctggcgctaatgagcgcatatgcaactttggttcagattgagaatcaagtataaacgcacggtcataaagaaggactttgcgttctgctgtaccaacgacgagcagatcaccaaatgtatccattgcgtaacatcgctcaggaagggcaagctggcccactggttgagctgggagattggaacaagacagtggtaaggatcacaagtaatctttagcgatcgaacgtacttcctgatatggaatacaagaacggaatgtctcaacttgaaagtagtagacgaacggtttttgagatcccaaaacttgaggtttttatcccatccaccggtaatgaagaaagatgacccgttggtcgattttccaaaacgacattgagagatgactccttcgtgcgccgctacctgagctgtccgacagttgagtcagaagcagataaggttagttccgcattgccgaaatgttatcacagacctacaccatagaactcacaggattgaccggtcgtcaggtcgtatgctcttccagccttatcacctcctacggaaagcagcttgctcccatcctttcgtgtggttcaacaaacatttgccacgaccatagtttacacgcagaaaagtttcaaggtgtcaggtgttgtcgccatataaaggaagataaacacataccgatgtccaggctacgtccaataccggtccttggtggttatataatgcttttggttgcgactgcccgttactattgacctcatacaatcgaacctacgtcgctcaaatccgaaatgaacagaaacattcgtaagagagagtcgggttcatctcattgtcatcgaaacgatatgtgtctaactagaaggaagcattcacacctcattgttccagcttgcgacggctaggatgggagcgacaggagagaacgcgagcttgctgatcgagtccggcggttgactgagttctgggtctggatttgaagggtttgaattcccaaacggaggcatacttcttgttctgtatcgactctgacgagattgttaacagactacgataggagtagcaggatgaaccaaagaagcaaggcggttgttgatgatgatgatgatggtgatggtagagaaacacaaattgttctcggaggggagcgactatccctttcgacgtctgaccatcatcaacaacgtcttctattttctggttctctcgtcggtcttctctacctgctcgatgaaatgactattctaggatttggcaatgacctgcttcacatcccccgactggcgaatctcctgagtcgaccaaaccgattggacgcgttctccaagcgaatcctcacgaagcgcgagttggatttactcgctttggtcgaaccgggggatgctcagacccgatttctagctgttaggtcagtatttttctcgacggtatatcaagactgttaaacaatagatccatcgaattgttgtctgtcgatatgctcactatgtgcatgtaatgatggctatggtgacttagatgggcggccaaagaatctctgtacaaagcactctacccagtattcaagccgacttggaaggatgtctcaatcctccctcttcctctcccatcttccacgtcttcctctagtataccattatcaccacgaccgactggttcgaagccgatggttgtatttgaacaagaaggccaattggctgataagggactcagagcgcacctcagcatcagccatgataccggcctagtgcttgcaggtgtcattgtcgaggaagataagaatgaaataaagtagtacaagaaataaaagaatcacatgagagaatccaagatggacgagacaaagttcttgattgtgtagaggttggacgacaaacgaagagtaagacaagaaccgagtgtcttgagcgacacctagtttctatcatcccttcttaggattgtgtcagctagtatcaatccctctcatgggcgtgcttcgcccaaaccaacagctctgcctggatcatggaaacaaccgcatccagaatctttcaaggttgctcgtcgtgtctatttcatatatttcatttctcttctgatacagggactgcccctcctggtaccgatgacttgtgtgcattcacaccgatgatagatacgcttggaacaccttcctttcggttatttgttgtcgaaggattccctcggaatcgtttcctcatgtcaagctgtgagcagagagaaggaaggagaacagaagggtaatcattcgatcgtcagccttggtcgagcaagggaacacgcttcctaacagtctgacgtgtggaccgtgttggaaagaggcaatcgacatagatagagtgatacaaaatcaaacggaaagaacaagcaacataccatacccctcttgcactgagtcagactctttctcaagaattgacattcctcggcaagttcgtcgatatgtttcgtgaggcattctgccggtgtgttgccttgcttgagcacacagtctgttcggaggaggcagtttgccaaatccatccggataccagcgcatgcacgatcctcgggagcggtagcaaaggcggtaggaactgctggtgccatatgaggaggttggagtgataggataggaaagaaaggtcaatatgagggttggttgggtagagcaggtcgaaggtagaaggaaagagaaagatattccgatcagtcttcaatcccatcctcgtccatccgacataaaccatcaattgtcggtcaaccatcatcggccacctttctgtttttgaaggactatccacatcatattcgtcctcccgtgagtgtccctatgagtattctgtcgaacggtctccccatgctgacaccaagctatcttgttttctttacaagtgttgctttgtgtagatcaaccgaataccctatcgcctagacgttcatatccttctcttcttcacagcatagatcatctttcgttctatcttcaaccatgccttctctgccatctaaatcacggtctacggacgaagacgaaactctttctaacatgtttgcccggctacaatctcaccaaccttcgactagttcagaactttctccgcccggttcggtttcctccgatggaagtaagcatgccgacgacgatgacgaagaagaagagacttgggcagatgccttgacgggggaggatacagaagaggatctaccgaaaaaacactggacgacagatgatctcgtggttcgttctgattttccttcttaccaacgacaactcttttattcactgttgttcaatcatccttcgttgatctcctctcttcacataggcgtctgtagcgaaagcagagtcattgaagactaaagcaaacgctcagttcaatcctggaaaggcatatcaccaggctctgcaaacctatctctctgttcttgccgctcttccatctcagtctgactcgatatcaccacagaagactggccaaccttctcagcttaaagaggaggagggacttcagatagtcgaggtggatgaagaggaggcagcacgaattgagcgaggagaaaccgaggaggagcgtaagcgaagaaatctggaagagaaagtagtcagactgagagcggtcatctggggaaacgtcgctgcttgttatctgaggcttgtcagtcttcacttttcttctcatcttgtgtgaccactaaggatgctgacagctggtgttgtatgtataatcgcttccttcgcgccatgcttacctttttgtgctcggctagaatcaatacaaggagaccgttgaagcttgcacagaaggtaggttgtggttctcgactagaatgatttattcgacatcgtgacaacacatagttaatccgaaaaatcttgttgctattaacagccttgaaagacgatccggaatatgttaaagcgcttcacagaagaatcaccgcaaatacagcgatcgattcgtggtcttctctccaatctgctcttgatggttcgtttcttttccatgtttccacaagagggaccgagtgcataccatccgttgagatcaatcgttcctcacctcccacacgtctctttcgaattttgaaacgacttcagatgcgaaaaagctccttccactccttccttcaaactctcctatccgatctgagattcagctctcggtccgagacttgccaggtaaagtgaatgctaagggcgagaaagaaaaggcagagatgatgggcaagttaaagaatctagggaatagtgtgttgggtactttcgggttgagtacagacaagtaggtcgatttctgttcatcattcatactcttcgcccctatctatctcttcccgtccttcaacaggattctctcctgttgttctatcttctcaatctgatctatcttgtcttggcaatgttctctctctcgggtgcctttcgtgcgaaaaccagtttcaagtttgagccgaatggacaaggcggatacagtatgaactttgtacgatgacatcatgtgtttcgttctccatctaattttgccactctctaccgcatacaacctaaagtgacatttgtgccttcgagtgaacgaactcccactgccgagctcttcccgttccggttatgacaattcttgaatcattcatagaatgaagactttgatgatcagataagacttatatgttttcacttgctctcggaaaggtacccatcagagtcgcgctcctcattggagttccgaatctacctcctgaggggaaccctggtccacttgaagagctcgacccgccttccattgagtttgttggatagctcatctgagctattccagtggccgaagccgttctcctcagcaaggtccctccaccaccggccccacttctgattccttcctgttcatcctctgctcttacctcttcgttaggatcgtagaggacgccagtcttgaatcgaggagagagagtggacgaagggttgccagcgtcaaaccctctgggcgcgtacattctctgagtgacgtggcttgctgaattcgatcctcctgccgtcggttgactcacgctcgccgtcataggtgatgaactggccgacaagaacgagggcggttttctgtatgatgttgactgaagcgaacttcgaggagaggatggttgttgagatgatgagagcgaagcttggttgtttgggtccaggcccgaatggggggatagtagaccttcggttgggtcgagctcgcgctcaaagtatttccttgggaagaatcgagaaaggaaagaggacagtatggatttcgatggaggaggtaaggtgaaggcagaagagctaggctctttagaggtgattgggtttgctccacctggagtggagtctgagttgcgattaccgggagaagacgcgtcgggtagaacacatgagagaccttaacgttagtctttgtgtgacagagtatccatagatagaagaaaaggaaccaaacaagaaagcatgggatttatcttacttagactcagaaacacgaagaacgggacagcccagaccgctaccacataaaacgtgaatctctccagtccgtcatacctgacctcggctgctctctccaaacgagctgccttgccgtacaccggtctaatcttgagctctttagattgcgcttcaaggaaatggtagtaccatgataggtgggtcaccggtagaaggataactcccaagatgagtgtgatacctggagaagctaagctaggcgtcgggatgagtgtgatgattcgctgtcggttcatgttaaatacgagtcagcattagaaagaggacaagattgaaagtcggatatgtttgtaaaatagatgttgtgagaagggctttaccaggtataccaaatgagctactatcgagagtaggatcaacttcagagggtatgaatccactaggtagagtagtacatgagcactgatcaccgtctacaagttgatcacattcgtttgtgcgtacatcaaagaagaacaagagccaaggaggacgaagagtgagggttgaatcagtaaagagagctggataccatcaagacacggcaggccagtcgtgtatcaagacaagacgggaaagatcccttctgatgggcggcaacagaacgaaagagctcacgtaggttaacgtcctgccccatctacgggaagcttttgggttatgttccagcatatcggccagccagaggagtccagctcctgtggtttcccatagggccatccggatagaagtgtagaatttgttggttaacaaagcggaagcctattcgggtaggataacggagaagcgactttacctagtgcaaacagacagaacaaggccgtgacgagacatgtacacgcggtgagaacccagagaaagcccatggggtccaagtatctgatgaggtcttcgagacgaatgcaggagtgaacgtaagatgttgtgggctatcgcgagggaagcttggttgatctcggtgaactgtgggtgtatggttgtgtgggtgtatgatgtagattgatagatgtaatgttgtcaacgctagagacgcgtttgttttctgcgctcagcctttccttgcccgagattctcttgcccggttggtttagccagcatacatccatacacacggacagacacagatctagatgacgatcccttatctatgagagagatcttgggtggcttgatagttgaagaacacatgcgccgctgttgatcgttgaacacgatggatgatcccaataaaactctttagactattcatagttataacctttgagccttgctgggatcgttccaccaggatgcatgaagttctgaatgaggtcatgttctattctatgttctatgttctgtgtcctgcttcctgtgttatcgaacactctgcgatctctcaactcgtttgcttcagtgggtctacatcgttcgttccatgtgtcactctgttttgcccccagcctgttctgcacgcgctttcaccatccctaggtgatcgtgtatccatccgtctcttgatcgatgctccttgctccttcccagaccgacaacttggttggcttgttcgagtctctgttctccttgttctacaagaaccgattcatctctctatagcagattgtttcttgatcctttgtatcttggtcatctacaccaacaatgctcagctctaactctgtctctatctctcacttgatccgtttcttcatttcccttcttttaaatatctgcaaactatcttcttcctcagaatcccggcaagaccattctacgatctacacgacctccaaactcttccatctttgaaccaagtgcatcgctcacggagaccctgcgcgctgtacgacaacacactcaacccaatgctcacctacgtgatcggccaacgtcgtgacctttttcccgttcaaactccgctggactttttcacttcttatttttcaagtcttgggcattcggtaggttgactccctctctcttcttctcttgctcaagccagtcgttgttgccatcaagagaagatcggcagtgaacaacgaggtcgtccctctaagggatatgactggagttgttggcgagatcttgtcttgtggaagaacggcttggtctttttctcgcctttctatttccttcatggtaagtctctaagccatacagcaatcctacaacatcatcccctccctcttcctccctcacactctccgacgtctaaggatgaacaaattttacaagctcaacagtcttaatcaccctatgtggattacaactcttcttcttttttattctctgaaatcactctttcacctcagtttttcttccagcctgatccttttttgagaatcttttttactaacggatgttttctcttgctcgggtcttgttggtcctaggttaggtcgtttggaaacgttgatcattcgtgtttgccatactggtcttctgaaaaggttggttccatccaattctggctgatacatatcatttcccttccccctctcccaccgcaccgcaaggtggcccttctaaggatgaacaaattttacaagctcaacagtcttaatatccacatgtggatcacaactcttcttcttttttatttctgaaaccatctcgtctctttgatcttatactttgaattctgtctgaacagtgcaaatttactgactcgaagatgccatacatttactctgtcggtttagatcagggtcgctgttacacaacaaatcgtaagaaacactttagtcttcacgctctccccaagccaccctcccttatgatgagaaccaatcacatcccttcctggcccgctcgtctcgaaacggtcagggaggacacctcaatcatctatgtggatctcgtaattctgcaatcctgaggggatatccagtggcttgggatctttggtttcagcatcgttgtcaccttgtgctgacttttgcttttccatctgttcttagtgtatgtctgtctttatctagtcaaattcttgttgtatatatatatgtgctctcctttcatcatcactgttgttaagatcatccaacgcacatgcgtccgaaagcctcttgtcacactcaatacacgcacaagaacaattattcttctaccatgttctcatgtgaacatacgctatgacagacacgcttcgacaaacacactaagcatacacagacaacaagcaaagaatagcgcacaagaaagatacatccaacgggaaaagtcatgacgacgcgcagtcggctgtagatcctatccttcaacctcgtcagccgctttccttccaggctcaccttcttctcccgtccggtccgttagaagagacatcgtcccatcctttgctcttgacaacgacaacagttcattgccattgcgttcttggttcatttgcatatatcctctgtttcttcagaattccatccatccatccatccttctgtccgtctagtcagtcaccgagcaggttatcgcctcgatcagtcaagctagagaaaattcattcaagcccaacaacaggaacaaatctcaacgcccgatgatcacgttagatctcggacacctccttcaatcgactgctccggaggatgcgcctcttcggagacagctcagctcgatatcaaccagcgtcgcaaagagtaagaagatcgtggttgtctctggagcgggcatcagttgtagttgtgggatcccggttcgtccttccgtcttggaacagagagaggactctttgttgttctcttcccttcttttttcttctcgttttcgtccaatccgctatgaaacgctcccttattgacaaatgtttttctttcacggtctgtatgttctccgtctcttcaggactttcgttcacaagacggactctacaacctagtgaaaactagataccccaatatcgtccttacgggcaaagacctcttttcgtcctctctcttccgatctgccgaatcaacttcactcttctactcctttatcgccgaactcaaactgtcgatcgatgcggtcgaaccgtccaagacgcatctgtttgttaaaaagctcgacgaaaagggcaaactcatgagaagttatacccaaaacatcgatggactggaacgacgagccgggctggcgtgcagttcgtcacctccgccagatccgtcatcctccataacatctatagcttccaccaccccattcacggcaccttcgagtgaagaatcgcctctcgatcagccacagtcttctcaggaatcgtttcctccgtcatctcaatcatccgattacccgtcttcctcccaagactctattctgtccgccgcgtctacgtcaacagcccgatcgagtggaggcccgacgatgcacaaaaaatggacgaaaaatgttcaactacacggagacattcatcaggtccgatgtatggtctgtcagagctcttatgatttcactccagagtatgtcgagatctttcgagagggtgacgccccggaatgccctgcctgtgaagagagaggttcgttttctttttctttcttctttcgttcttcttcatagcgcttgtctcttttcccatcaaacctgtggctccgactttcaagatgtaccgttgtatactgacagttttcatcgtcatcatcatcacagccggagagcggcgggcgagggctgctcggactttggctacgggcgtgttgagaccgtcgatcgtgttgtacgacgaggtacgcatatagtcatttactcttccctaggatgcttgtctttctgatcggctgattttctcttgcttccttcgatcagaaccatcctaatggagattcgataggcagtctgcagacacatgacctttctaaaacgccagacctgctcctcgttctcggtacctctcttaaagtccatggactcaaaaggctcgtgaaagaactttcccgatctatccattctttgccggtcaccaaggctagaccacacggaggcaaaggtcgggtggtgttcgtcaacaagacggaacctcagggagcggaatggaaaggggtgtttgattattgggtcaagggcgactgtgacgcgtttgtgagcaaggtcgaagaggaatggcgaacggtcaagaagagtgattgggagaggcaggagaccttgacggggttgggcgcaaaaatcgtcaaaaacgtcgacaaaaaggagggagtcaagggggaaaaaccagtagaagacatcggaccatctgcaaacggagtcactccggaaaacatcgagttggatttgccaaagccaaaaacgaaaaaagcggcagtaaagaagacggctagtaaaggttagtagtggcttcggtcgtttttcttttgaatgtagccctgtactcatttggtctttatcttttgatcgtcacagctaaagtaacgcccgtcgatgcttcgctcactccgccagtcactttaccaccatccccgatatcagaacctttccaaacatttgatgagcccgttctttccatgtctccgtcactctcttgcccgtcggctcctacccttccatcgactacccgctcgcctatacgtacaccctcctcccatcaccatcgacatctctcttccccttctcgccggctttctcgcgagaccacgcctcagcctgatccaagctcgtctctctcacctgtctcttctcctacttcttcctcaaaacgatcgctcagctcttcaaaatttcacgcgtctacagaggatccaccctcaccttccaagaggtccaaacgatccatcaggcagacggtctcggcgactttctcctcaccttcatcctcgccttgctctgcccactcgccacccagagatctatccgagatggatcggccaacggagacgacgacgatttctttgagcggcatcgaaaagtttgctttcaacctggatgatgaagatgagttcgagggggaacgacaggttgagatcgagcttacggaggtcccgcaagagaaagtacttgaagagaaggaactatcggtggcagtggctccgacaaagagggcgacgcgatcgaggtcgcgcacacccagtgtcaaaacctcagtcacagagcttttggcaccggctttgcttcctccgaacgatggcgtatcaggtgacggacaggtaaagccagtgatgtcggtgccggtaccattaagaaggtcgacgaggagtgcgttgagagctgccagttcagaaatcttatcttgagcccaatcaagaggtttctttctatcttttttctttctccattcttttctgctctcttcgtttcttgactcgttttgttttcttgttgtatcgtctcttgttcccgctttctttcttcgtcttctgttcaacatgatttctcaatcggctagttctctcgcgccatttgttcttttaacttgtcttcttgctcccttttgttcgatggtcacgatcaactgcttccctcttcctttcctcatccgacgttttcttcgatcagatactacaacgataccaccatgatacccgtgtctatttccgataaatgtctttagtttctaattcatgagccttaatcacccggagcatcgtccgagatcacacaagcttgagaccgctgatgttgctggagcacggtggctgctcgcacgtttcgaccgtgcccgggatccaggaacgaaaagatcgctaaggtctgtatccatccggacaggccattccctcagatcaggtcacaacaacaacacttgtgttcgctcaactctctgttctcgcaacaagtagctcttggaatctcaccgtacacgttgaactcaccttgcgagaagcgccaccccaggtcaccccttcctcattgattgtctttgactcgagcacgcgcatatatcggtatgggttacttttcgtcgttcgtcaagggacacccaagcgtcgagacgataggatcatcgatcgaccatccagatcatgaccgtaaatctaaacgggttcggcctccagtttctctctctcttcttaagcttgggtcttttgaaagttggacgttggagatttcgagtttggtttaaaccgaactgatcacacgctttcattcgcatgttctccgtttctccctcgttgtttcgctctaatcttgcaacgtttcgaatagatgtctatacgctcgatcaagcatacgcctcggctgtcggtcatgaacgagctgaatccgcaattcaataccattggtcgacctagcgatctatttattaaaggatcggaagtttccattgctctcgcaaatccttcatgtaatcctacagcggtagattcgcgtctgctgtccacagaaccacctgagaaaggactgataagtaagatcaaattcggattaggctcaaggccggtggcgatgtattcccagactatgcccagtatataccagagaaaatctcacacctcggtgtaccaaccgagtgaatcaatcagaagagcatcacatcgagaactggatagagatcagaaagaagatgtggatacgtgagtgtatatccctgtcaaccctcctcctcctacggtttgactgtttctaatccatcctgataccatattgataactctccatgcgcgcgctttatctgatcgaccgataagtatggcgagtagattgaatcaactagcgatggccaattccaacagtctcctggggttagttcatcagattttagagagaacatataggtttcatcacccacatcaattctgatcgactgatcgacatttccagagatgaagactaccgtctacttcgacaaatattatttgacgagtgcgcgagtagacaaagctcttctctgagcaacagctcaaaccgtacgaccgaaccagccagaggctccgttcaatcagtgcggggtatgccccttgactggaagcctgctcctatttcttatcacgagcgggccttatcattaagttcacgatacaccaggtatagtagcaggccctctttctcagcccagtactcctcgatgggcttaccgaaggtgtcgagctctgaagccgggtcaccggaagagattctgtcgatgatcagatcagccgagtccgaaagcagtcatatggtagagatgtttgaccagatggagagaaaagtactgactgaagcagtagaaaatgggtggatcgtcgaccagaactcgaaaaatcaaacggaagtgagttctcctgctgtatctgttgggcgctgttgtatattcagtgaatcaagagactgtttgcatctatagtcaaccagtgtggctggatccaaactcgaatcaaatcctctcgtttcgaatacttcggatcgaatgattcaaatcaagctgagtgatatcagggagagaagacgagacgttcagtatcgatatgatcttcggctagatctttttcgaaagaaactcagagcgtatgttccctagctttcctatctattcggcttggttatccgtctttctgatttatgtcagctcgcattcatgactttagagcggaaatcagagtaaatgttatgcgttgatgaatgtagatagtatgatgctattttctcctcctgggcgtgtgcccctgagatcttctcggtatgagaaaccctgagttctctaagtgttacttgcttcctgtctgtgattgttgattgtccatttaggtgtcgctactattctctctgtcacacccatcaacttgagtgttctcccctatcgatgtagtttcctcgtttgtttttgttacaacatcacgtcatcctggcaccgtctacctacatcgcttattattgtattttgagtgtacatataagtgttttgccacgatgtccgttagcatctaagaagggtcgtgatagatcatgatatgtcgtttcttataggtatattcccgtccctccttccatccattcacgagctatgcgctgccggtcaagccccagagcaatccagcgagcgcacagagtttttcagggtcctgggcttcttcggcagagagtaaagttacaggggtgatgtttgattgagcatcgtttcgggcgaggatcttgtttggtgctgaaggaacgttgattgatgaggtgtttgatggggagggaagaagtgtatagcctagagattgaagtagattaagccgaagtctgaagaaatcgtttggagcagagaaaaataatgagaacatcggagggttgatcaatgataggcaacggaagtttgctcagaataggaaaagggaatgatgtggcagataagaattgacatacgcttccccatctgtttctgctgagtctccgtctgcatcactccctgacaaccggttctctctccactgctccctttctttctccaacgctgcgtattcttctttcaggttctccaatgcccgagctttagaagcgatcgaactctccttctcgttcgttgccttgccaagcgagagctgggtcttgccgagttgttggatggattctcgatgttgctgttcggtcggttgattcggctttcgagttagttgggactgcgcttgcttgagtttttttgctagagctggtttggttcatgtgaacatggacatgaacatgttcgtgagaggaactgggttgagactcttctacttctccttccgtggtgaaagagtagaacaagaacagaggcaaggacgcaccttttaactcggcctggatctggtcctgttcgaccgaacgttctctcgcccgattatcgattgcattctgggtttcctgaacagaataaagatcgtcgtctgtgttgatgagctgacaaacactctggaggacgggtctgttgagccgtgtctcattaatatcagcatcgtacacaccccaacggcaactgaaaacggaccgatgatcaaggcaagagaacgagagaagcaaacggttcgcgcacatcacatccgtccaagcttgatgagatttgacctgaggagatgccatggatactgatgtttgagcaaagaaagaacgaaagaaaccaactggcttggaccgactgaaggttaggatgatgttgctgctgctgctgctcaaccgaatctactcaagttaacgcgtaaacgcgtcgcgcgtcgacgcgtcggtgccaagaagatcaatatcctagctatgactgcttcgcccacgaaattcagaaaattcactcaactatcatgatgatccggctgaagctcagggtttctctaatccaaatagtcatccgtaggattcgttaggtcgatatatacaccaacaaatggctactccgttgccgaaaaagatactattcgtcttgtgtctggccaggttgggagagcctatcgcatactcggtcatctttccgttcatcaactctcttgtcgaggggttgtctatagtaaaggacaagtcccatgttgggttctatgccggtcttcttgagggcgctttcagtttgagcgaggttagctgattaatatcggttctgttgtgttagtgcttgaactcttggtcgcttacccaaagattgtttgtcacatcccacagatccttacaatttacttttggggaagtctgagcgaccgcatcggtcggaaacccgttatcatcatcggtctctccggtacggcagtgtcgatcgtttgcttcggcttatcgaccgagttctatcaactcgctctttccagagcgctcaacggagcattatctgggaatgtcagtgtgatcaaggcctgtctggcagaaatttcggacgaaacgaacgagagtagaataatgcccatgttcaacttgatgtggagtattggactggtcatcgggtatgtttccttgttctccctatgtcattgtccgtccgatataatcagatcatatcctctgttacaaacaagaggaaatcaagttggttcgaccattctgacgcaagatcattcgacctggtagaccgttaataggtggttatacatcgaagccagccgagaaatttccaaccgtcttcacttcccctttttggaagatatacccatacttccttccttgtttaatcggaagtagcatagcgttcttgagctgccttgtcactctgttcttcttgtcagaagtcagtcgttcgcacattcaaaggacatcgatatcctcttgagtaccttggaatactcatcatctcttacattccgctttatagaccctgcaaagcaaaaaacggagagatgccgaggcgatattggccgcacaaatcgaacaagttcctctgctcacaccttcaccttctacaaaccatcttcctatatctccgtcttctcctataccgaatgctcttacttcgaacccacccccggagacatggacactcaaacagatactcgggacggtatctatccgagtagtcttactttcttatttcttcatcgtgtttctggcgagttctttcgacgttctgttcgtcctattctcatattcagccaagaaacgaggtggactaggcctatcggtatgttgtatctttgacagctgttctttgttagaaacaaactccctgtgagctgactgaacaagattcgtttcattcattcatcgaaaatcatcaggatgcaaaaattgcacagttgttgatggcaggaggcgtgatctcgttagttcatagtcgcttttcggtggctcatctcccagttttcttcaaacgctgatcgctgggacttctttcctccttgtctgtttagtgctgtatctcagctctccatctttccaccccttcatcgaatatttggaaccagcagattataccgagcttgcaacggagcatttgttctcgccttcttcatccctctcgttctcgtcgttcttccttcgtccaacacaaacggctcgttatcaggttgggagtggggagctgtgggaatgatggttatggtgggcagagctgctttcttggcatttccgttcgttcatcatctcctgtcttaccttgttacaagaaagtgaatactctcgttgagaccccgtcgcgctcaccgtactgttcttgctctgtctgacaggctgagcatgattgcactcaacatcgctacaccctctccatcagctttaggctcggtcaactcgatcaatcacattctcgcttgtatttctagaggagtcggaccagcgctcgtgggcgcgctcttcgcgctttccatcaagacaagtaacccgtgtgagttgccgttcaatctttcaatgttctgaatcgatcagaggattatactcattctgcctctgctctacataaacgaccgaatgaatggggaaaaaaaatcaatcttgaaaggggtctggttgttctatataatcttatccctcgtcagtctcggctttgccttcccggttaaaggtagaaccggcacatggtctggtgtcaaaaacggattcagtcgggttcactatgacgatgacgatcatcgagaagaccaccgtccacctgctttgatcgtgcaggcctctctacctgcacccatacccagatcaagtactctaccggtatcggtaccagggacggtggaagacagcaattcagacgggaagggtggctcttttcagagatctcgccggcgagaggaattataactacgagtgtagaaggaagagtgttttggtcgtcgtttatatagacttataattcatatgtgtagttaagttatcgttgtatctgtctttgtctttcatagcaaatctagcaagcggcaactcgttgggacttgatctttgtcatcttcatcatcttccacgtcgcctttttgtctctaaccaagacatagattcctgattccgttttgaaatggagcattccccacaccgcctgaaatcatattcgatccatactgatactccatgcacaaacatggccttcctgtcttcttcttgtgtctttcatcctccgacgactaccttctacgtcaggaaggtagtctctggacgtaggaaaaaatttcgagagaaaactctattggcgttatttcttgaatgataaaggaagctgacgagattgttttgtcgaagaagagggtatggtcgggtattccagcaaggaggatgtgtacaacaaggacagttcttcgtatggtatgaagtgacaggtcgggtgaatatgaggggtatacaagaagactgagtagaaaacaaggcgaggggagcgcgctcaacgccgccagactttgatggatccatctacgtgaatacagatacaaccggccgtcagattagaggtttttttttttaatcgcatcagagaagcaagaaattagaacggtaatatagataacggaccagcaccggcagtaagcatctcgtctttgtcgattgggtttgtttcaacccagagcacggctttactgtgaatctgacgaggtgccgctttcgatagtggtttagactaagcgagaattggcacagaagaacgaaatagaatcagaatgacttgctgcatgaactgatatataaaggaaactaaagcctacgtcaagaacgccccatccccaaagttttccatcttcatcgccgcacactactccgctctcgcctaataagaaagcggccttagatcgatagctctcattcttgtgcccttgaaaagaggcgaggactttcccgttcgttcggtctagaagccggatggtagagtcgagtgtggtgacaagtacagttgtattcgaggtgggagagaccgtgagagacgtgataggatctaaatgcggcaaaccccaggacgtcaaacggtcaagtgaatgctggatggaaaaggggatgggggatgggggatgagtgacttacgccctatgtagtcagaacgaagctcgcccattcgaagatcatattctctaacatatccatcgacagagcctgtcatgaggaccgttccggagatggtcacagacgtaatggaatctttcgcctctgtcaatgtctgcaaaggcgctcgactctgcgatcttggttgtagaacatatgacccaaagcttgttcagccggatgactagcagatgacagataagatgtagacatacttgagatcccacagagataatgtcgagtcgtacgagcctgaacatgcgagtttgaatcctggtatgtcagtaaggaattctaccgagagaactgtagaaacagtagacgaaccggaggcaagaacactagcatctgcattgaaatcaactgcattgactttactggtgtgtctctggaacttccggatgaccgacccggtagtcacatcccaaaagagtaccgacttgtctccaccacacgatgcaaactttgaattgtccggtgttctgaggacgagggtgagggcgagggcgaagtggtgatcaggatacagagttcaagatccacagagcagaaagacaagaacgaaagacctacacgcagattcccaacacctcatatgcatgctctttgtagcatttgatctctttgcctgatgttggattccacagtctgatcgtccgatctgttcctccggagagacagtactttgctcctgcctacaaaacacacaaaagatgatcagcttgaaaggatcaccaggaggccatggaagaagtctggactcacattatatcggacgatgttcactgagccaatgtgggacgacaatgtgtgtgccaacctggacggaggctccataggtgatgtgagatcaaccatgtgtgctatgctggatgggacggatggctatatgcggtcggatgtgagtgcgttgggtttgtggagaaagactagagaacgttttgtaatggcttattagaaaacttcagaaagcattaggaaaaactctcctaaggcttttgccaggcttttatcagcctctctccttcttccttcctcatccttccttcaaaggctagagtcaccatggcaaactcgagtgagctcattgatccttcccttcaggaccatcaccatcatcagcatttctctcagctgcatcacaaccaacacgaccatcacgttcatcctcatcactcgcatcgacttgatgtcgaagaagacgaagacgatggaatcagggatccttctgctgtcgcgggtctagttgacggtgtggtggaagatgaagaacaacaacaacagcaacaccagggctcgccagaagactttcatccacatcaagaacagaacatccttcaccatcagcagcaacagcaacaacagcatcatcaacaccagcatcatctcagacagcagcatcagagggaacagcttggggcatctggcctgactcaagggagagacttgagtaatatctctgaagcagagtacgtgttcacctctcatatgccatcctgtactttgaaaaacttcttgggatcaactcagtaaactcttctttcccttactccatgtgatttcggttctcacagcattcaatccatcctgactgcgtcccaaatccttcaatcaatcgtacctcagtctcaggccggtccagccacgacaagccgtattccctctccgcttctcgctcttcgaaatcatgcttcacccgcgtctggctcctctatcaatcgaaagagacagtatatcgaactctcggatgggaatgaggctgatgtagacgaaatagaggatgtcgattacctaagagaagaggtcaaacgattgaggatgctcctcagagaacgagacgcgtctaacaagaatggagaggaaatgggcaggtccggaagcacaggacccggaggaaacaaggcaaagaagaaagatgacgggagcatcgggatgagctcagatttcaagagggacgagacgaccggcaagagggagagcacggataggaagggcgcgctgaacgtttgtctcgttttcttcaccctcatgccatagacaaggcgacgcgtcgctgtgtgccgttcattcaaacttacgtctgttgattgaatatatcctcccctgtcactctcccatactgttatccttctgagcaatctagaaagccgttcgatccaagatgagaaacctgatgggcatagcggatgacgcgcctcttcctgatccagttgaccccctcttgcctcaacctctatctatgaatggcacgcctctcgctcgacccaactggaatgtcggtctcaaatccatcgccaacaaagacgtatgtccccttgtcttgctttactattcgcaacgcgctcattctgatcgatttttatcttgaactatctctatctattctcactgatttagtggattgaaatcgtggccactcaagtcatcaacgaaggataccaaactctccgatcgcctgagtctgctccgcttcatgctgttcgaatcccagaagatgatcttgatctagaaaaggcgagaaaggcagcgcggacggcgtttggaaatttcgtgaaaaagttagtttttttctttcttttcatccgctttttttttttttaattgcagacgtgatattggaattgaactttcgtgattatctcttagatacgcggctcagaatgatccgttagcaaagatcaaggccgttcgagacgctaaacggggtcgacgatgggctcgcaaggaccttgttcgtcacccttcttcgctaattgatatcttgccagatgcttacccataatgatcttcttggactggtgggaatcgtgacagaaacaacgcaaaagaacaaaggcagcgacggacccaacattcaattctcagtacgcccaacacccgtatccgcacgttctcaggatagactacatgtcatccgaatactcttccgaaggcgaaggcgacggacctggtcgcgctggactaggaccaggcgtatgggactcggtagcagggaagagtgacctaatttcggggggcggatcgacaccaggagcagggggtatctctcaaggaggcgagcaggatgaagcaagcaaggctgagaaagttttagaagtcagaacacctaggtggagaagcggcgaggtgagttctattgcttcttcagttgtctctcgagatcgcaccttcaagcttgcgtgcgcttgtttagtagaaaacacgtcccaagatctcttgtccttattttttctttcttttccgttgccgcagctcaatacaatctacgccgaattggatagcattgctgccgcccaatccaaagcgatcaaaggcaacttttatactgcccctcttctcagacggttcaagctcaacccacttcgagaccttcctccgccagctgatcctacatcattgacgcccttcgaacgatgggagtttgatccatcctggttggatcaatctggtcaggagaacgagcggatgaggaaaagactcggattggcaggaggcgctggttcttcttcggtcggaatgggactcgggggattaggattaggcgtcgggatgagtttgggtcacggaggggatgagattcagatgcagagtgccgggtcgatgttggatctagagtatccaccagatatgcaatcaagttaaaactctttcttgtgtcgattatctttaactatatatgtgtatggaatcgtgtttcaaaactgtccattactacttgttaacgtgttttccgattgtgtgtagcctttgcatggcctagagacgaaaagagtgtcaaatgcaagatgcgttgaatctatgggctatcacatcaaagaagcagagtcctggcccgataccattcgatcagacaggcctcattctcgtcactttaggtaacatctgtttcgcctcgaattatttcacgatcagttaaagtcaatggaaagaaggatgaagaaattaaagagaagaaaaagagctatacctctcgaagatattgtgcatgtttcactctcagatctcggtctccgtcctcctcgtccctgttagatatccttctgccgactcttctccctccgtcctcgtctcctagaagataaatgacagtgtatggttctagcacttcgtctctgttctcgtcttgttcctcttcggaattgcgcgtatcagatgcagaagggacgagcgcacagccggcaccgattatacagttgtcggttatccttgtcgaggccgctgtggatgaccgaggatgaaacgtattgaatgaaccgaccgaaggagattcgatacgagaattgattgagaacaaattatggtcccctatctgcatcgtttccttgcggctgtgtgatcggtttcatgagtgatctctatacgtacaagacgaggaagagcagaacgaaccggttaacgatgactgctccttcttcgatgatgttgtccgaacctggccgagaagagaaacaagaaccatttgtcgcatcaaacgaagacgttctacatctatacatctgagatgtaaccgagattcttaccaatcacgataggtcctgtaatcgcaaatatggtggccttggaatgaatgattgtccctttggcgttcgaatgtcacagatgataccatcagcctaggttcggtcgaggcggtcctgagagatggacaactcaccgcttccaatgatgatctctcctttgagttctacatcgtgacaaacctgtttctcccggttggggttgtacgatgagatgcggtgcttagtcgaacaagagttagagagcactcaatacggacgatcgctgtgtgagagatctcaaagttatcttttctttccagcggaaggagaaggggaggtgacgatgaggctaggtgagttaggtctatatggctggccgacacgtctatctgactctctttcaatatgctcacaataagcgtgccatgctatatcatctgattttagtcaagtcgtctgctgctacttgtgagggggagaagagagcgtcgagatgagatgtgagtgtgggttcgttgtactcaattaaagacttgccgcctttttttgctcacctcttcttttgaacatcgtccataaccatcatcatcatcatcaataaagatgtcgtccaaaaagatgtttgtactacgttctcttctttcctttgtctgtatcatatggcttacctcttttctcacttcgttttctcttctatcctctctctttctcatatagcgacttgctcgttcgtgttcgatacgaaaacccgttacctccgccgccgtttcctccaaagctacttgatattcctacatccatctctcgatatgctcgtccgagcttcacctccaacctcgctaaagcaatcccgctgccgatgatggtcgatgctgagtgtggtatgcctttgaacttattaggctatcctgctatctgggaaggagacatgtcacgttcgttcccttcctttcgccttaaccgagattctatcgagacgcgatctgaccacctacttttgatttcgttctctttctaaaaatccgaattcttgcacacatattcgcatatggatgcagagctcaacccaaaggcacttcatccatcattacacccttccgatgcttaccttctcaccgctcctacccctgacaatctacctgtcgacccctcgtccgcttcgagctcaaagcttgtcgcgaacggttctagctcgaccacaatcactggtggtctcaagccggaagctcatggacacgtcggctggctccgaccgacagagtatattcaaaatgaaacaaagaaggctagatcatcggctgcaaatggcctcaagcagctcaaacgaccggaaaatctggatagatcgatcgagggacaatggaaattaatcgaaagctcgtttgaagaacttgaaaagtcaaaattggaggatatgaggttccctggaaagccccacttgcgtgcagaggaggtctgttcacttcatctaatctcttggtgttggttttaccttcgtgggctgacatcctctttgtcttgccttcactccttccgctagtcgtttgactttttgccagatcctcaatcgtggtacaacgggtactctctcttccgattccaagaagctcccggcaaagaattgtcggatcctgatcgtgtggtgagttccagttgataggtctcagtcctctcgaatggccgataagcttacttctcattaattctacgtttggaaattcaaggacgaagacctagcgctctcttcggctatcttccgaccagtcttgcttgacgacgagacaacgctggtgtactaccttcctgattctgaagaggtcggacggaaagcagtggagggaatggtcgaccggggtgagactggtccatctacagatgaggtcagttctacatttcttgcttctcctgtccctctctttttttcaattccgtatcgcgagaattcatttaagaaacccctgacgtctgttcttcccttgtcgttacactcttctactctttttcgggcgctctgtgctcgtatagtcgtacaaatacaatttgacgaggaagtatgaagttgtggatcaacaactccgacaggctaccgaactaggtttcattctttgcaccgataactcttcgactgaagatcaagctgagaatggtaccggaggaaagaggaagagatcgaaaggagcttactaccacgagtatcattcgaggaccgtcctcaagaagaagagagccaatgttcgtctcgtcctcttccctcttcctttttttgtgctctcttcagtttcttactatctttcacgaatttcttctaacacgacgattcttttctatgcgtccatctttacaatctacccctgagtagaaagaccctcaagcgcaagacgaccaagaatgggacgagattcacctcacattacataacccgacggctgaatcactcgaagaacgacaagagacaaattcgttcctcgtcgatccagattgggcgatcaagaccaaagaagcccagttgagagccgctcaggctgaggctgaggctgaagttggaggtgacgctcaggcccaaacggggtctggaaggatggatcgggtcagcgatagagatgctgagggtgaagctgaagccgagagtgaagaggaaacgggagcgaatgaatagaccaaagaaaacgccgagtagagagctcttctctttccttttcttctgtcctcttcaggttcgatgccatgtatatgacgaaaacaacactcctcagagtatacgagaagggaaagggaagacagatatcggccgtgtatcgagaacgaatggagctagacaagaaagaccgaagttcagtggggccaagctaagaacgagagtatgcgtatgcgtgtatacaggctatcgagagctgtgtgtttgcgaatggcagaacgggttcgatgaaccgaagagtaaaaagaaaggcagaaagaaagaaggaagaaaaaagaagcttgttgaaatgtcctgcaatctctatcgcccgatccggcctgaagaaggagagacataagtaggaatagaagtacggcaagagttggggtatggtgtaacgtggagaacggcaaagaaggtttcagctggaacgctgcttcacacgctaccagaaacaatcccaagagaaaggaatggatggatggatagatagatagatagatagatagatagatagatagatagacagaaaggactcaggcagtgaataccagtattgatatcaaaaaggaaagtatccgtcatgggagaccatgtccaagagagaagattgaagagagaaagtatgcaaacaaaacagagagaaatcaatgttgacgactctacaccaggactacgcgtctgagcagtccgaggacaaggaattagtaacacaagatactacgagatcaagcgagagaagagtccgagtaaacagctaagcaaggagaattggtatgtgggtgatatatcagaaacaagaatagaacccaatacagatagaacggatatatatagagaaatacgagattacagaaggtgaagataaacatgcgctcgagaatgtctcaaagaggaaagaagaaaacaagactgagcaaaagaagtcttgaaacgaactaatcccaaagatgggtgagaaagaagatgaacgaagaggggggggaacagcaattgtgtctcgtttcttgatcaagccaagaccttcttctcattcacctcgacctccggccctagtccaatgccatctatgtttggcacccctttctctatatcggatgaccctacagagtcgttgccggtcattccatccgatgacgccaacagctctccactgtttgttcccttgcccataaccatgcccgtattcgaggtcgaggtcaagttcaccatcacggtgctcacaggaggtgtcatgggtccgttgctagagaccatagttgaactgtgagagtgtctcagcgagggcgccgttgggattgaacgttttgaggcaactaacgtcagatcggatgaaagttcggcttgaggaggtggagaacgatctaagaaatccgagtgcgtcggcttagtcgaaggagagagtgatggcacgacttttgagggtgtatccgttcccttaatctcttttttcccagcatcattcgacgtagcattgggggacgaagtagacgagactttcttggaggatgagaatccaaagatcttccagaacccaccaccccctccttcctttgccttcttctctcttcctttcagactcttcgccgtcgacttgttctctctcgccggcttaacggtagcagcactaggggaggccggtacaggagtcgaagctgaccggttacccggtcttcctcctctgatggaggaagaggcagtagcaggggtagtggcaacaggagtattattttttggctgtgcaattctatttggcaaaggcgtcaaagatgcttgacttggcggatcgacggtggtagcggcgggttcaggcacagacaaaactatcggtttgacccctagatctcccttcgaggagctagtggtcgagacagcaccagtatcagcagcagcagcaaccgccgatgcaggcacagatacaggcgcaggaccgtcggatggtaaggtggcaggcaatggccttgtcggcgctacaggcgtcgatgccgttctctccctgatgccaaactcggagctcccgttgacgaaactggtcggcacggggggaataggcggtatcaaaccaccttcaatctctctgtctgatgaacggcctgtccatgttcggttccttaacgccgtactctcaagcgacgtggttgatttcatgcgagtccggtctttgaagagactcgactgtcctacttcgtcagtcaaaagaatggcatcttcagatgcgactgaaatattggcaacgttcttagaagatttagatccccaaagggaaagtcgtttcttcttagtcgtcgttgtagttggcgaacgcgagacagacgccggcgctgatgcagcctccgttggtgagggtggtctggatgtctgagacagtgggcttttggagaacgtctgatgactggttatcgactgaacatgttcggaaaacagaactgtcaacgatggggcctaatcatcccagtagacagataaaggacaatggaaaaagatggcccttacaggtgtgtgtctcatcccctgaggttttccctcatccccttccaacacagtcgacacgccgttgttgtccgagttgttctttcccttcttccggatcgtactatgtcgtttcggccctttcccttttgattccttgtccgatgtgggcgaaggcgggaggggtccgttccagaccggccacgggctgctatcgccgattgattccagccgggaagatctggagacaggcgaagtatgcattgtggcaaaagggaactttattgggtagtatgtggagagagagagacgcggttgtgagtaaagaatgcttgagtgaaagtatggacgggttggtgaaacactcaccggtccgttcatcgataaagaggatgggtaggcgccgtccattgaaagggacgggtaggagcctaccataccgatagcggtcgatgggaatccatggctaggcgattgaggggacgaagatggactggacggatacgatggtctgaaaggagttgaggacgatgattaacatgcaagcctgataggacgtagaatgagaagaaacgacttgcatcctattcatatacagatcgtccgatcgatagaccgggactgagggctgagatccataagatgacaacctagagtaatcctgtcgatcggcctgtcggctcagtcttttgatggtatccaacggtcgttctgtcgcagagcgatacctggaaaaagggaaagaagaaacgaactaaaacatcagattgtttgcgtggtacataacaatggtgcgaggtaactcacgggttactcagatccatgggtgccggtagtttgccgttattgatggcgacaagacttgaactcgatacggatgattctgcgctgggaggaatcgttctgtccgtggacgagagcgaggagcctgaaccggaggtccgtctagactcgcttctcattggaccgggcgagggaatgatgaatggactcgaggcgatagctggatgtggaacaggccggttactcggcggaggttgatgcagaggcatcgagagaggtggcagagatggctgaagtcgttgagagtggtgtggtggtggttgttgctggtactgctgttgctcctgctttcgaggaggaccagaatgaatgcgaggaggggaagaaagcgaaggaggaggagacgaagacgaagagctaggctgccaaacgatcgaggcatcttttccgccaggcgacgtaggtgaactaggaatgatcggttggactgtgggcaaatctggttggccattaccagggctttgtggcagttggtcggactcggttagaatactatcggagcctccgatggaggattgtctgccggagaaggcatttcttttgaacgatcccttaatggatgtgcgggatttgtttctagagaggatagatctagatccagatggaggagatgtgccactctggtgaagagagagagcctggagggcggcttggtcgggaattttagtcggagaggaaggcgtaaagattggctttggcggaaactcgatttcgggtgatcttgacgtgacagacgaccggcgacgccctgagagttgggaagagaagattgaccatacaggtcagaggctgtgtacgtacaggggaagaattgatgatgaatggaaaaactagagagagaacaggacttgcaggcaacggagggagtctgaaagtaatcgccctggatgtcgcgttcaggagagaccggaggaggagcggcctgagtttatgagttggttgaagggagaagtgagcgatggacaacgacaaatggggtttgattagtaaagagtatcaggcagattgaataaacaagcggcagaaaggaaagaatcgttgagagaagtgtacgcgtgcgatggatggtgagagatggagggaagggacggagggaagggcgagtaagagtgagagtgtagaagagaggaaaccctcggatccaaaggagagaactcctagatgaacgacctcgaccggtctgatcgatctcgaccgaacgaaagactagacagatgataggacgatgctgcttgcgagatggaaggcaaagaagagaaggaaggcatgtatgcgtccaagcaaaaacaagcgaagttggaagaaacccaagcccagcgcgtaaagaattctctttttgattgacagatacagatacaaactcctagctttactcacctcttcgaacggttcgggaagagcgttgggcgagtacattgtcggtttctctcctctctgatgacttgtagatctgtctgtatagagggagagctcggatatggggagggtaaagggcaaggagaaagaagctgggcgaggtcactgacaagggggaaagagtgcaaagagaaagaagacacagtaaagacgggcagggcgggtgattgacagcggagacagggacggcgatatgaatagggtcaggaacagggacacgaacaggaacaggaacagcaaacagcaacagagaatacacatgcgcagctcgatcgtcaacctaccaagcacggcgtaccgcacgtccacggccgcactctgcatccccaggtctcggcccgcgcagtcagacgtcagagctgtggctcgttcaccctttactccttcgtgccccgcgctgtcatcatggttcttatcagccggcccccgactgtgcaagcgtcaaacgtgagctgcgcattcacttgccggagtctatactcgcgcactctgacgcaactgtgcactatcaagccttacggtccgtgccctgacgcatccgacgcgttgtttcaatcatcttccttttaatcacggggaaacaaaaggtttcatctccaccaacgtcccttggctttttttttgccgtcctgtagtgtttgtgtggtttcttctctaacgacgaaatgcgtcgatttgtagtgtctctattgtaattagcttctctagcctctttctactttttttactttttttgcagtctcttttcccggtctctactgcggctccttccgccctggattgttccttccatttccggtataaccctaacgtccggggtctcaatccaatcaacggggtttcttcatcaaccaaaagagaaagaaaaactagcaagatctcatcttcaaactcccttgggtctttcttttcatcgtgcattttttgttttgtttctttcttgatgatacatgatgcagtacgatacgattcgatacggtccgtttgtcaccctttacagtgcgttgttatactcgagagaaggaattttttagaaccaatgtatccattcatatatccagacgccatctcttcatttgccccgaccataggtatatgatgctatgcacacacatatacacgcccaactacgtgtacacaaacacataaacactctctttcgcgtagtccctttcacatatacatatgcatacaagcgctatgttcatctctctcgcttaaccggtccatcccttcccggtcttggtctgcttcttggccgtctttggcttggccttggccttcccgttgttcgatccagcatcgccaacaaacgcatcaaacgcacctttccaactgttcttcatgaaaccctcgatcacgccctcgggaacgactccggcaacgccatcgacaaacgaacgaacggtctcctgtccggacgcatctgccggcttgcttcctctaccggatgaagacgaagagaacagtccggccagaggggaggatgtcttcttggtgctatcctgtccgccgagagcccaaccggcaacttgcttcagattctccagattcccactcgtcgctccaaagtaccaagcggccagactgccaatcggcccgacagctcggacgacttgggagaacgcgttctgagtctgggccacagcaacttccgggccgttggtgaacgcagagtagaccgcagagaccgcggccaccaacaatccccatttagcggtgaagtagaaagttctgagttcggcaaatagatgagtggtcgcgtcagttagtatctctgtctatccttctgcgttcctccgtccctttctccctctgtgtctctcacatacaaagagaacgtacctccacgccatccgggcggtcctcaacatgctcattgctccaaaatacagtgcaaccaaactcatcaccaacggcagatgtcgcttgatgaaccctacaatctcgttatcatcgttcccatcagatgaggtgaatgcagagacatacggtctcacagctggtggaagctgggatgagatcactttcaaagtgtgaatgatagacataaaagaaagattggttagccaactaagagggggatggaggaagcttcgaaagaagaagaagcttacagttgataatagtatccatggcgttaggtgtgtgtgtctatgtgtacgtctccttcttgttgagacaaaactgtcgatagattcaaagcgaaaagaaacagaagagctatccgaggtagagataatgtgtgttagggagaacgaacgaaatcgtatctctgccagcaggaggtaagtgggaaaaaaagaccaggtgggggggaaatcgaaaacgcgtcatcaatacagtcgcgtgccactcgacaagcttcaaagctagcctcacccccaggattgtctctcgcgcaagcctttatcgaactggtctctgtgttcttatggaaggagggtttacagctaatattatctattgtatcgggtgtgttcaataacataggaggttcttgaagttgatttgtctattgatcgaaggcagcctggagagattttggcatctcgtctgtatagaggtatcactatgtatcatcgtctagaggaaagaccaggatggcacgagtcaagcgtctctctttctctttctctttctctttctctttcgccttccctttccctcttcttccctcgcactctcccacagctcctccgatatgtactctggaaagtcagagatcgtccgaacataccagcaaaggtatctgaagcagaccaccgcctgggctcggaccaacacgtgatgtcgtgaccctttagccttcaaactccgatcgttctcggtcagcctcttttctttttcagcctgccttttttccttgcgaatttttctttcttcaaagtcgttgccagcaaaaggctggctgtcccctgcttttcattccagaacagacggacaaacggagcgacttgagaacagaacttccctctcgggttttctctttcttcttcctcatccttcaaacggtggggaaaaaggaggggataacagctttcgatcgtcttgcttttcatttcagagatggtcggttgtcgatatggtacattctttcgccttctcttttctttgctcttgcattcgttgtgccttgtttctgcccattgtgtgtcctagtgggaacattatttcttctcaactatccgatataatgacccgttctttaatatacgaaaagaactatagataaatagaaaacaaaatccctcccaaatagaaacactgacaagatgacgaaagaaatccaagaacgggatagaagcaagggtaggatagtctagcatgtataagtaaagaaagagagaggagaaaacaagaaaagacaaaacctatagtgactccagtacaaagaatcaccacccatccaacagcctccttgcagccatatgattcttcacatccaactccttcttccactctgtccagccttccggcgttctcttccaaccggcctggatcatcgacctgatctcctcctccgcacctggaggcatcgaccgtcttccgtcaggttggatctctggaacgatcggttcgaaccaaccagcacgaaggactctcaaagcggcgatctctcggagatacgtcggtcggttgatcgatacggaagaagatcgggtgtaggtatacaccttgtggatatgccgggtcgttagtagtgggacctcacacatcatcgccatcgccacacttgaactcgcttgaacctcgtaatctaaagaaaccccgaaagcagacaacgacaagggcgcgcctatgagtctgtggttctcttgaaagttctctctctctctctcgctcgtctaggaaggacagacatgaaggaaataaaagaaacaaaaataagagagacaagaactcacaaccacccttggtactcttgctaaaagcaggtatcgcgacatccatcgaactcatcaatttgaaaaactctggataactcaacccagtatgaaccaccacgacctccttcaacatatctggcacgttcatctgaccatctcctgcaagatgaagctcgaacggggtgacctctccgttcggattcggcttgaaggtcggttcggcctcggttacagggtgataaccccaagcgaccgggtcggccgttaattcggatacgagatcttggaagattccttcgtaatcccttcgattcggatcaaagttaccttggacgatcgccttggtcaacatcttttcagacgtcccacgggaagatgcaatcttgagaggaagcaccggaacatgaacgtcgatcgggatcaagtcgtatccgtattgatgggtgtccggagagtcagcgaatgaatcaaagtggtacatgaacactcgtttcacactgttcatcaagatttcgagccacaagacatctgagatcaacatactagagcgtgccacacacacacacacacaaagatgcaacgatcttactgttcagaaataggcatcactctgagcgcgccttccctcacccaatccgcaccgtactcaaccaaccattctacagagaacgcattgtggacgatgcataccaacgtaaatttctcgtcttcacctcgggcaagatattgttcaaatagtttttgcgaaaaatgttccatgctgagagtcatcggaaataaaaatcaaagacaagatacgcgtgtcaatctctcaattagatcaaaaaggaggggagagggaagagaacatcagcaagaaagagagcgcgtgctatgaacggggacatactcaatctcacatgttcctaagatgaccatgtctgctttctttccccgatcctccgagttagaaaacaagttgtcacgagagagatcgctgacaatctgctccgggtcatagtacttcccgctgtacaagttcagatcctggacgacatcctcaaagccccatcggaagcctttggcgtacactctaatagagtcggtgtacgaggaaatcgtatgaagaagggacatgtacacgtctgttttggtttcgatcgccatccagccagtcagttacacaagacatgttggaagaaacaggagaatatcagatatgcccgtctatcggaatagagcgagctccgaacatcctcatagacagacaaaaccggctacaacgaaccttcgtgtgcggtaaagtgactaccagctaggatccttcgtctcggggtccctgggtttatccacggatgttcatccgaataccgatagagtccagtagtgttatcgaattgaactccaacggatactgcagaatccaaacattcgaacgacgagtgtcccgagtacccaggaagtgatggtgaggatgacccgtgtgagcccgaagaagatatcgagaacaaccaatagagtatacagatggaaccaagggagaagaacgagagtctgaggagtcttgattgctgagacgttagactgatcgccgggtgaaacgggagctgcatcgttgatggtcaacaagagagaaagaacatgaaatatatcagaaccgtcgggctgttgattttcgtttgtagtcacgtcgaacacactctcatcgccaacaaccatcgactctcgtggggatacaacatactcctggcctcttctctgcttctcactagcccttcttatctcaaatacactaagtccctctctcaagaaacagaagaacgagaaagatggtcaaaggaaaacgtggggatccagatgacctcccaaagttcaagctcacttcattctgtgtccctcctcagtaggtattccgtttcacgtctaatcagtcatatcgaaatctgatcctttcgtcctcttgcatattcctcatgtagagtcaacagcaagaacatgaattcgaactaccttcgaactgaatctcagactgtctggtccagaaagtcgactgggactgaaaagagaaagcgcgatgaacaacgaacggagatcaacgaagctgtggctgaggttggtacttttcatcacagtttccctaacgttcgagcgatcctcattgagtggaacgaaacttgtccttggtcccctctctgcagacactcgccggctcaaagacgatcgtcatccatccaggctctcaaacgcttcggataggtctagcaactgattatcaaccccttcagattcccatggtcatcgctcgtcgtcggaagccgtcatctaatcctgtgcccgaagtaagctcaagctcgaccaatggaaaaggcaaagaaaagacctcagagcctaccgcggaagcgatggatgtggacccagacgagcaggacatagacgcgcaattgaaagcgcctgataccgtacgttcagtcgtcctcccacgaccatcctatcagaagcaagactgaccgtttcccggtgtaattatccagctcgagtccagaatcgccaacttacggcagacccatctcaaacgaacacacgcgctcaagcttagacctatcccgcaaggccgttcgctcgtccaaaattacaatagtgatgctttggaagaagggggtgaaaagattgaagacttcaacgacccactgcgtgtggaatggtgggatccctctacagccaaagcaaagtcgaccaaaacggtagtcggtgaagaggtgggcaggatcccaccggaatcggccgactgggtgattcgtagaccgttcaagggtagagcgttcaacctcgaggcgtatgagaaactacaggtgttgttggacgacctcgagctcttctttaatgaagttttggaaaaggagatgagaatctccaaaaaggagtatgatgttcgtttggatctccattggacgtacgtcatgtttacgctttattggctgacaagattactttccctttccttgtgtgcgcaaacacacgcacaaaagtcgtactcggtcattctagtaattccagatcatgtatccaaatcgtacatccgagaaatgagtcacctcttgctagccacgatgggtttcaagcagatgtgtgttcaacaggtacatcctcgttcttactcgagagagtgcatgcgtaatttcccctagatacatctcatggactgaaacatctttgtctatcaggaatcccttggcgctacattcggagcaggcatctcggccgcctgtgtggtcgatattggcgcgactaggacgtccattgcctgcgtggaagacggagcggttgtcaatgattcaaagtatgttgttttgtgatttgagacaagtggattttcccttctatatgtgcatacggtatttacgactgcatcttttctgtgtatgaagaatgtgtctgaactatggcggggacgatatcacccggttcttgtcgacgctgcttgtctcttcgttcttcccttatcaggagttggatctcggcaagagttatgatttcaagttgatcgaagggctgaaggaaaagatatgtactctaaatgaggtacgttagcatcgaacctctgtttgtggttcatcttgtctgagagagtagcttagactgactgtcggatgtatattccttatctttcccttcccttcaggcccaagtaggagtcaatctaaatgaatttgtgtcgaggcggcctggaaagccgacgatgaagtacaggttcaaagtgtttgacgaagtgattcttgcgccgatggtaagtcgagtgtagaaagataaaaaataaggaagccaagatatatacatatctgcagacgccaacacgttaactctgggttgtttccttcatctttctcttttcttctcctattctcaagggcctgttcgagccccgagcaatggaaagggaatcagagccgcctgttgtggaaagcgaggatcttggaggggacgaggtggatgatctctgtggggagtggacgttggaccttcctgtatgtcctgatgttatgttctctcggtcagcgaagtgtgatgatttgcttacgcgttcttcgttctatatccgaccctgccggcttgattaaatctccagacggtcgccatgatttctgctactcagcatctgcgacctcctcctcctcctatcgatattctgcccaccatactcccgacaacagctacagcggaacccagcccgatggctacgcctacgcctacgcccgcccctacaccaactcttgaaccagttgcagcggaaactttaccgcctcctgcgttgttcaccgagacgtccgtttcggagagtctcctaccggtagaagcagcagaattagcgacgacagctcttgctgttgaggtgcccccagcagccaccattgtggtcgatccacctacggagcctatcactaaagaggcaacgccggttccatcaccaccgccttttgatgttcttggagcggctgctcgaatcgctttagactttggaatcgttcattcaataggctctgcaggaggtgaagataaagttaagaagttcgcgggtaacgtgctcgttattggtggaggagccagatcggccaatcttggctggggcttagagagtcggtcagtcatgtttttcttccttctttcttctctttttctagtgttgtatgaactatactcttggaagactgggagatgggtataaaaattgatgtgctgattctctgtgcgcttccaccagactccacccgttgatcgtcagtcggttcccgagtttaactcaatcggccactcaacccgttcagatcattgctcccccccgagagattgatcctcggttcctcatttggaaggggacggcagtgtttggtagactggagagtattcaggagttctgggttggccgagcagagtgggagatgtttgggatgagagctctcagagagaaaagtctagtcatctgatttcctttctttgagtcgagggaagaacccaggtgacgaggaatgaagagtctttacttctcgctgagtttgcaacatgaccattttctccttgcctgtttgttcggtcgagaggaagcatggaaaagaaataaatgaatagaacattataaagctgccgtccgaaaaaatccaaccggttgaaaaagttgaagttgtggtataagagattacaacaaggtctatgttgacatatagaccgatggagatagacagaacagaggatggtaagatgtagacattgggaagcgaatctagaaccgaacaggaatataatacagagaaacaacaaaggaaggacatgggccagatcgatcgaaaagccgcgttgtttccttgcggtcgtctcatgcacggagcctagctcgtctggcacgattactgcttgcggagttatcgtctaaggccgcatggaagacctggatggcaatcgaaattagatgcagagtgctcagttaatgccgtgcgggatggaagaaagacgtgatggacataccatgggagagttctgaacggattgttcaagcgacgatgctgatattgatcctagcgaaggatgaccaacaggcgttcttgccgacatcacgtttgtcattggtgtcatacccgatggaccaccactcggagaatcaatctgagacatgacggcggacgggtcggatgataaagaagcgggaacattggtgggaaccggctgactggcgacaggcggttgatagtatgatggtgagaggtaatccacctgagtcggaaagtatacggaaggatgtcagtctggatgtgtgatgaagaaaaagagatgaacgagaacaagaaactctggagcttaccatgtacatttgagctatgagtcgagaaggatgcataaagggaagagggaaaggccaagattaagaatacagctcgttcgtacggatacaatcagagacacgaggagaaaggcctactggatgcgtcccattggggtcctcgtctctttctagcccaaccgagcaaagtgttccatgaagcagctccctttgagctctttgtcgtcgccggtcctcccgacccacctttgatccccatgatcgtcctcgagatctctccaaccgagacaagagagctgccctgctctttggcgagctgccgggcgatctcctcgatccgtctggacggtggtttaagagcgataggtattaggccgggaggcggaagagtaggacctggtgccggaggtttagtaaagatgatgggatgccggatgtggagcgacgaaggatggttccgagtcggaggcatcggagaatatatatcacggcactggcgagatttgtcagtttagttcttgttagtgtaaacctggttagcggaagaagattccaagtggtaacatgataagagaaaaggcaagagtaacaccggatagatgagtatccacggaatgtttcagattcagaatcactgcagttagcttttaaacactcttaagacggacacggatagagacaagaaacggatggtggaagaaggaaagaaggaatgaaaggaaacttgccgatgcttctcgggtttatatacgctgctctgaagaacgaacgaacgtgaaagtgaacgggtgggttcgtttagccgagcgggcgagaaggtaaagggttgcacagcctcgtcacacgcgtggtaaagacacgtgattgtggctaacttttcatcgctcacacccatctgctctaccatctgcctgtctcactcactcggtcgtacgcacatacatccatacacattcacataaccacaagcacacactctctcgtcgcaatgcaggcttcggaacccccacctcccaagtcgagcataaagaaatcccagaaggttcaatcggaaccgtcctcgagctcatcgtaccaacagcagcaacagcaacaggtcaaactcaagatcgtcatccgaaggctaccggcaaacctaccagaagagcttttttggcaatcagtcaagccttgggtgaatgagcagacggtatcatggaagttctaccggaaagggaagctcgctaaatcgtcagtcactctttcgtccgtctcgccagtgctttctgtcaaactcacctcggtttgtctcgcatgggtcgaccgggaaatcgtgtgaatagggtcaacaaggaaaccgtccattcccgcgcttacgtgctcttcaagtcgacaccttccttggtcacctttcatagggagtacgatggccacctttttagagacaagcaaggtaggatcgcctttcttctcactttccatttatcatgacagtatgttcacgcctggaccaatcggcaggaaacgaatcgaacgcggtggtcgagtatgcggtctatcaaaaggttcctactgatagaaagaagggtgaccggaaacaaggctcgattgatataggtaagcttaaaagctgcgatgttactacgggcaacaaaattctgatccttctgccgatggtatctttgtgtgcttcaccaaccgcatcgggctatctatttcctatagacccagactacttgtcgtttttagagtctctcaaggcgccagcaaagactgtggtcgacggagaaatgacatctcaggcagttgctaccgccgctgctgccactctgtcctctggcgctggtaagcctagttcaaacgtttatctctctgtcacctcaacctgtaaagtgagggctaacactgcatatatccaactgtttctcttcttccgttctacctctcttcacccctgttttctgttcatacacgttatcttttcacaatcactctagccaagccaaagctcacgcctttattggaacatctcaaggctcgaaaggaaggcaaatcccacaagcatggctctcccgctctttccgggatgtccactccccgaggggcaaaagctatattagccccaccaccgaacggccagtcgtctggcaagtccaagaaaggtgacaagaaagacaaagggaaaggaaagtcctcggctggtgcggataagaaggataaggccaccggatccgaaggagcaggaggggccactgatgccaacgggtcatccaccaagcgatcaaagaaacaaccaaagcagcatgcacaatcttccggatcatcagctccaggttcaaggcttcaacctcccgaaccggccgctcttcaggctatggcagctgcctcgttggctgctcgtcaacagcagcagcagcaagggaggtcaggagaaggaggaggaggaggaggaggaggaggaaatagatcaggcgcacaatcacctgctgttggggaagcaaacgggactgggcctcctccgggggcttcgagatcaaagaggcgagagaaacgaggggacggaggaaagaaggaggcaaaggaaggaggtggtggtggtggaacagaaaactcatcgggtcctcctgtccaattcaaaatccttaagagagaagctacagccgagccatctccatcgtcagcatcaataccgtcgtcgagtactccatccgatccttttcatggacgacaaccaggcgcgtcgagctcacgtgcattgaacccgaatcttcaggttttcgaacctcagcagtcgcagccgccgccggtatcaactacagagcgagtgcgcgggccgagatcaggtcggggcggtctaggaggaggaggtggtggccagcagcagcagcagtctggcggcggtggaggcggtggtggacgtggcggacgcggtggtgggggcggaagaggagctaaaggagggagaggaagaggacaaggacctccgccgtgagaaactagaaactatgctctctttcttgtctacttttctttctttgtgccggacaaatagctaccagacttgtatccgtcggattatccagacttatctgtacatgcgaggcaggtgccatccctggcatcgaaatccatggtaactcatactcgtcatcatcatcttttcctgtagtctagctttgagactcggtctagatccaggtctgaaccccagttctacaactatccaatgcatcgccactcccatagtgccaccgacgactgcgaaagagatggatggattgaatgaccacggtcttggcgacggctgcacagccgccttacgtaatctataactcaacgcattaaccctaacatagcccaaacgcgtgcatccttacgttccaggaacggacgatcattaacttcctccaaacaccaccaggagtcttgctctcttctaaacacaccatcgtcgctggacaacgaacacaaccgacaaagaaaacaccgataggcaagtcagatgacgctctctagaccaccagtctatgtcgtcctcgccttggtgttcaccatcaatctcgtccttctcgccaactcgtaccgacatactgctcccgatggactactcgtccgtagatcgtcgatccctcggtcagttctttatgagccgccgtcgtcatggttgaccaagaatacgacggtcgaaacatcagcgtttcctttccctggcccaccacaagatccgagttggccagcttggacggtcctgcccgttctgttatcctacaccggcttgctactcgcgctcttggggatgattgctggagaatggctcgtaccaaacctcgcgacgttggccgacgcgctcggattatcagacaacacggctggagtgacactattggctcttgggaatggtagtccagacgtcctggtgagatatttcctccggattcttcctgtttcttctttgtatggagaagaggttctgagaatcttctttcggaagcgggagggggctgatagcaaattgtcatcattttctttcccttcgttttcaaaccaatctagtcgacttacagcgcgttcaccaacgactccggtagtcttgccatcggcgaactcctaggcgcagccaccttcatcatcaccgtcgtcgtcggtttgatggctttcgtccagcctttcaaagttcatcaaggtccattcctccgagacgttggcttcgccattgctgccatcagtttgcttcttgtcgtcatgaaagatgaggtgctgacactttgggaggctggtggtctggttgggctgtatgtgtcttatgtggtctgggttgtaggcggaagttggatcatgaggctcagaggcaaaggggagatcaggctcgaagaggatgaagaacaagaagcggaggatgatctcttggacagggacgaggaagagagtaagtctttggtcattttgtatctctctctgcgtatgattctacaggttgaatcgcgaagtggctgtatacgtccgttctgttcatgtattcacctctcatcctcgttctctcggatcaaggtctggcagggtataggtttccaggtggatctcactcgaacgttaggtctagatcgaattcggccgtttcgacaacaccctctctcctaatcgatccgtctgcgccaaactcccgaaagtcttccgttgatgtctcccaattcctccatccgtccgccgctctttcggtccattcaccttcaagacatcccactctccgactagaaaccgacaatctttccgtagattctcgatcaagcgaacctcgccactctccctcgggtcgtcgactgtcttactctcgaccttcacacctccgctcaagctctgccgcttctgtcgcgacgtttgacgtcagacggaccaagctttccctcctcggagctgtcgagtttagagatgtcgtgaattctttgaagaaccaagcgagtctagaggacatccagattgaaggtgcaaaacatttgtcacctagcatcttcaccgccggacattatcatccccacattatccatccgccaccgggctctcgaagggtttcaaccaattcccatcatcactaccaacaccatcgacagcatcactcggccgacatgacatcgccaagtgcttcccagaaatcatcgtatttctctcctcaaagacagactatccaccgagaacgggccggatcatcaccccgaagaccgagtgcatccctacctaggtggatgttcgggaacacagcagatgactcagcccaacagacaccatctgttctatctactccatctttcgcaagcgagtctggagtcgaagaggtaaatccgtgggaaacagaagggaacacacctagaagcgaggtggtcagtagtttgagtagtgatcgaacgatccgaccggggaacctgcccggttcaacacgagagttcaagactcttcgaccaccttctttggcgatgtctgatcgaccgagtcctcttcaaaacccatcacacctttctcaaagtatacacacacttgaaccccctgcaccctctccctcttctccgcttccgccaccatctattacccttcaagagtctccttcgataacacccatctcgcttctccgcccgactcaccaaaagatcaagcgtcggaaaatgatacacatagcaaagatgacgtatcatgttctgtttccatccctccagtcgttcaaactcaaatcggtcctcggcaaggtgctctccgtacttgccgtaccagcgatcttggcgttgacgttgacattaccggtcgtagacaaccttggtagaggagcgacttgttgttccgtgtcggatgatgaagaagagaaagaagacgaacaggaggagccggttgctggtggactgacggagggagggatgttgattagagtacaagaagctgagagtttagaaagtgagactggagatggttataccttgagctcgaggagaccaagttggacaccaagtcggagtcgaagtcgaagtccaagtccagtctcgagtcccaatgcgttggcagcagaggtcatgcactccaagcttttgagtctaggtgaaggaatcagaccgccaccctcgtcgtttggtcactcacataacccttcggagaacggcactccttccgatccttccgatccttctcaatcacatcagcacaaccatcgccatctccaacacacaacacatccaatagatagagaggtggagcatggcaatcagcaaggagagggtaatgcggagaatgaggaacatgagagcgaaccagacaggttgtcgcgaatcgaaagagagatgaggtgcgaggaggaagatgggatgaatgcgttggcattcaacaaatggttaaccatcacgcagtgcactttaggaccgactttctgtgggggagttctcttctacgacccggatgataccggttttgccgtataccccttcatcggtttcgtcatctttggtgtgatcctctctggattcactctcgtcttcgccaaagacggaaaacaacccttctggaggattggacgatgcctccttgggttctcgatagcgatgatctggatcatggcccttgcagatgaagttgtcaccgtcctcaccacgatgggccggatcttagggttctcagatgctatcattggtctcactgttttcgccattgggaattcttcagccgacctagtagccaacttgagtatagccaccttttcacccgtcatggctttctccgcgtgcttcggcggaccaatgcttaatattctcctaggtgtcggtttctcgggagcattcgtcattgtttcaaccggaaagtcatacccggtcaacatccatccatcgttggtcacaggtgtcatcagtctcttactggttctcatcatcactttcatcgtcgttcctttgaacggttattatatcaccaaacgatggggagcgttcctcatcgcgttctatgtcctttccatgacggtgaatgttgtggcagaagtcttgtggacagccgaatgaacgaatcgatggactgcaacagaccctttcttttcctctcacctcctttcgggatttctttacttttatatccatacatccacgaaccccttgacttctctgcttcttctcattgtacacacgcccttctttgcaactgtttcttgtcttcaattcgaacatgtatttctatacgctcaattggattttgtttttaaatattatccctttctttttctttctttaatatcttctcactcttggcgcatgatctagtttcttgtatgcagcttcctacacatcatgatctgccataactcgatttgtcatatagttaacttgatgaaaaaaaaaaccgatcaaatacgttgtgtaaggaacaagaaacgatatgtatgaacaaactcagggaaaggtgaagggacatatgacaatgatgaaacatgatcagaaccaaggttagagattgatgcgttgacatgctcggctgcaaagaattctcctcttgggttactgaatggaaccgaggcataagcggaataaataaagtgaatcagggttcaagaggttgacctaattcgattgggtgattggctgaggttgagccatccttcccctcgatctcctcgccgatggagttttctttaattggattttgacctgcctcgagacgtctattctttggctcaaccaacttgtctgacgttatctttgaccgatccaataatcctcgtttttcttcctcccttatcgccatctctaaatcggtatcattcccagatgcaggaacgtcgagcccctgatcgatcaacctatttctaaccgtttccagattctcattgcccaccaatcgaacagtgctcggactcttcactcctagatccttgagttttgcttcggcagaagatatttcagccgaaccagcctgggctgcttcgttttgttcacccgctttcatccagaacttcatcactgatgtggcagccccgctttgtcgaccgactctatcaaccgatttagcggtctccgctgcgtgcgtctcgtccgaccaaccgaccacggatgataacggtggtgtctctccatggaggttctttgtgagccaaccttgttgagaagcgagctttctttcggaggtctttatcgcttggaacgaagcaagctccttggaatatttcttgtcccaagcgtgtcgggaggaaagccatttctgtataggacctgcaccgtggacgatacctactttgttgagatcgaggccttggaaagtctcggactgggacacaggctccatcggccggatcacaccatgaaccgtcactctttctcggatcatcgaattgacaaactcgggctctgtcaacattgttaaaaggtcaatgactcttaattagaatctttctgtgaaggaaaaagaagaaaatagagacgaagaaacatagcgagcgtagagacacaccggtaccagtgacgctgatgtactttcccacatgcttcgatctccgatcgcctccagacccatcactcatctcgcattctgagctgtcagcttcactctctagatcatcagtgtggtcggtctcatttgccaatcgatgagcgctctccgtgatcgggattgctgtcgtctgaccatctttgtgaaaaactgatgtgctatggacaatggcttccggagggaaggacaaggaggaatgggtagacgttcgatcgaactcgtgatcatttccgggcttgtgactgtgttcgtgatgtcgatggtggtgatgggagtgccgattctcgttgtatcgagcagcggtgatagcccagatattgaagctaaataaaccagatcaacaggttagttactgttcttcataattcagcgcaccggtatgaaccgaggaaattatggcttacttggcagcagcgcgatacatccacttcgcgggctattctcagcggaaagagaggaaggattgctagaatcagcgttaaacgtatttactttcatttctgtctgcttgaacaagcgtacctttgtgaacgacagagtgggagtcacatgagcacaaccatcttgagttggttttccagtctacgtcagtcggagatttttatgggaacgtgaatgcaagaggttacttaccgtacatctgaagatgaactttcgtgggagggtattttccaattaagtctttctgaccagggtacttctttagaacactcgagctcgctattcagacaccacaccgagggtcttagcaagagaagtacagaaaccgtattgcggaatgaaagaagaagacagaaaggagagagacgaacgaggatacgcctcagggtccgctgctttatgagccaggaaaaccatttcatcccgaagcagctccccagatccccccatctaagagcagtgaatgggcgagtaagagccgatttattcagttcgcaagctttagattgttcaaaatatctacataaatttgaaatcaaggaacaataggacgaacaatcatcaacggacaaagtcctcctaagcttccctggttgataggcgagaccaaagggtgctgtagtagccttatggttgttgagtttccaaagaaaataaaataaaagtaaggacaacattggtcagttcgtgaaccaagttgttgaaatctcaattgcatcagaggcgagaagaaagtatgactgataagataactaacttgttagaagcatacatctgcacctgatcgtccagcaccttgacatgtttctctcctgtgcgaggattttccacgtcaaattcaattgaatctcctttaatgggaggccaagctaagcttggcttgtaatgaaatccttccgagggaatctgcgcaattagagcgacttgtgtcagcctcatttaacagaatatcgaaatggagaacgaagtgcacaagagagagcgcacataatctctagagtcatcacccatgatactcttgaaactatgggttaagtcaacccaaggcgagatcaagcaggcacctgcaggtagcgggactttgccgcccgaatctcgaataacacacagcaaggcgaggataagaccagctccggcggaatcacctgaaatgacactacagtagaacgagatcaccgtaaacaaagattattagccaacaatagaatctgtatatggttgagaacctagaccagaaagctgtggacttacatatccgaagcagcgatgggagcttgggaggattcagctggcgggtctattagataaagataactagctagggcatcatggagtccacaaggctatcaaacaaaatgtattaaattcacaaaggtccgagttgacaggcggcaaagtgatctgagaagatgacgcgatccttacaaatgggtattgcggcgacagtctataagaaggcgcgaaagctctaccaccaagttttcgggcgtgtcgctggatctgatacctatgtgtgtctagggaggagaagaagtatgctccgccttatctcggatacaaccaacggtgtcaggcgggtgggccagaagataaggagaaacaaagatagggccatcgactaaccgtggatatagagaatcacccggtcttgttgcgatttatctaacgggccttcactctgacccataactttttgaacctttccaactgttctattcaggtagtccttcttcatctcgatccactctccctccaatgatttccctctgatttgccaccatttctcgcctccgatctctttaagaccagattctccgtacacttgtttgaaatgggattggagaatctcagtagagtgatcgatgcttgattgaggtacaattgcaggagatagatgaatccagtcttgtagagaggagtcatagggttagttcgcataagcggagccgaagaagagatgtagagaaatgcagaacataggcaatcgagatcgagagaggaaaatcggactaactgggattcgggacgtgcatagcggtgaaggactggaaacccacaggttaagcatcgacaactgtgacttaacgtacacatacaaagaatcggttcttacctggagttcttcaacagagtaactcttcgctgtcttaaggaatgctttcacaatctgaaggccctcgtcgtaagcgagttcgtgttcgggagcttctgattcgagcgtccgactgtcgccctcgcctccatcgcccggctgtccatctgatccaactcgtctaggctttccgtctggattggccgaggcctcaagattctctcccgattgactatcggcaccctttctgggccttctgcgtttcttcgtacctgaagctctaaggacgtgtttgaagaacgtagagattacgaccggggtcgctgttgagcgggagagaaacaacgaggaaagaaacaagctgagacccatgctggtgtctttgagacctatcataataacctaaagccactacttactatgagcagcaataacgggaacacccaaagtcatgttgatggatgatggtagtgaggatgaaggaatgaatgaacggcagataagaatacaaggacaaccagagaacgattgcacgtgaccgagtgacgtcatgattagataagatcgacttgactgatcgcctgttgacgtactcatcctttttcttctttcttcgtcttttccttttcttttctatatctttcctacatcttttgattgagaacactgaaaggtatgccgtacatgtaagtaagctgttagattatgtgtgaaagggttgtatagctgacaagtccatcggttgaatacttcaagcctatccttgaattgtggatcgtcctcggtcaaatccaaattattttctatcccagcagactcatctccaccatctgcctcagaacacgatctcctctctacgctgaagcttatagctacagcagatgctggtaacatcggcgctaaagggaaagacgtcgagatcgagctcagctgggtggacaagaaggatgcaggacaaactgtaaagaagaaacaagacgaggtcgagtgtgcgctgttctcgcttctggcacagtcttacaccgcatcgagcctcgtcgcatctctgatcctgagtttattctctctatatagacaccgatatcatacccatcatcctcgaccttctcaccaaagagaacaaggataatggtccgtcactcgacaagaaggagctgagatacgtaacccatcgaatgtaagtacattctccgtgctaccaatcaattccctacttactatattcgacttgatattaaactaatttgattcaacttatcatcagtgttcatggatctacgcacacctcacctatcacagttaccaagaagcaccaagaaggtttgaaagagatggagaagctttccgagtttgcaccactacacaatcataatgccgtgcttgctattcaggctacgatagatgccctacccgagtcgacctctatcctcttattcgacacactgttccatcagactcttggtcccgagatctatacatatgctgtgccagatatcggtcacaagactccagtaccgctgagaaagtacggatttcatgggctgtcgtacgcttcggtgctgaggtctatcgccaaccacttgaaacaagatcaatcagatgtaaatgctgtagtttgtcatctaggatcaggaggatctgtgagtaactatcattttcatgctagattccaacgtgttctgatgagttttctacccacattcaggtttgcatgattcaagatggccagtcaaaggatacatccatggggttgactcctttagaaggattggtgggtggaacccgatcgggaagcatcgatcctactcttatctttcaccatactccggattgtgcagagaatgcattggacaaatctgacggtagatttatcagtaaggccgaaatggttcttaacaagtatgtattcagccatgatctttctatagttgcggaagatgagagtgaaattgaataggtttcttcttgtttcgatccctccgcagacaatcaggtctgactgctcttgccggtacttctgatttcgggacgatcactactcgaatgacgaatccttcatcatgctctcaggaagaacatgaggcctccacattggcgtacaaagtctatctagatcgcttgcttcacttcctctcattttacctgttcaagctcaaagcgcactctcatcaatcaggtggatctgagcccatcattgttttctcaggcggtatcggagagaaaggcgcagcgttgagggcggatgtaatgagatcgctgggctggatgggtgtacattacggagacgaggaattggggagaaataaattgaacaaaggagaaggcgtgaaggagattacgaccaacaaagccaaaggacccagagtgttcgcggttgagacagatgaggaagtccaatgtgctcttatggcggtgagtgtcaaccgcttgtctatgtgttctctctgttttcatgtcgttctgatcaccatcctggctacttgccgtgctctctcgttttgttctcctgatatacagagaaaggagctgggagtttaggtcggtttgtctgacggtcacttgtccgctcaccaacctataactcacaagccttgccaagatctatcaatattttctcctactctatttcttttatagacatgcgtcctgc

SEQ ID NO: 569 - DNA, 12480 bp, Xanthophyllomyces dendrorhous
  misc_feature (9812)..(9821): n is a, c, g, or t
agacatgcgtcctgctttgccgcctctttgccttgttatattcggcactatcttgaagcatcccctcaccctccatgtagccattctactctttctttcctagttcctaggacatccctatatgaatatggctgccagtgtataatctatacatgatcactatgcaatataaattgaacgtgaatggaatgctaatgtcaaaacggttagtcaccacaccgatcgagtcagcctggtttttcttccagaccgactttgattatttcaaccgacggcgacggagacaacgacgacgattatttcctaaccatctcatagatctcaccccaagacatcgccatggtctactctgtgagtctttgcttgtcctatgtctttctagcgctttctaatatgagtagagagctgatcttctcgctcgctctcgagctctgtaccctccctccttccgaatcttgacctcaaaaagttaaccccaaaaccttcgctagaggaagtctcgacccttctctcagatccatccaaaggaaactgtgtacctatctttatcacgctcccggccgatcttctcacacctgttatcgcttatttgaagattagcgatggaggcaagaacagcttcttgtttgagagtatcaatggaggagagaatatctcgaggtattcgtttattggagccggttcgttccctttattttctctttctctcctttcttctttggtatttccaaaaaacaaaaaaaacaaaaaaaacagaggaagtggtggatccgacagaactatagatgaagaaaaagaattagaagcttaatcaggaaggtggagggattggagcgttgtagtacattgaccagaccgactacggaactgactcttaatccttcacttctgatccttctgttcactgtgcgtcgtcacgattgggaacacgaatcttagatccgttcaaggtgatccgaagtggagccgagtacgacatcaagggagaccctctgattgaacttgagagagctctatcctcttacaagtacattagcatccccgagattcctacattcaccggtatgtgttcttttgtcctgctcctactgattcagggacgttatctaacaatgattgaaaacttgttactattgattctcttctgattcttcaaaaacaggaggagccattggaatggtcacttacgattgcattcatcactttgaacccaaaacggctcgaccacttaaatccccgttcgatattcccgaatcaatcttcatgttccacgatacgctcatcatctttgaccatctgtttcagaacatcaagttggtctcccatgtgtatattcctccatcagccgagtcctctacttcgactgtgacctccccagagatctcggcggcctatgctgaggctgtctctaagctcgaagcactccgcgccaagacgatcacggagcatatcccgcttcctgtccaaccaccgatcattcccaaccagacgggcacttccaacgttggcaaagctggttacgaagcattcgtgacaaagctcaaggagcacatcgtcaaaggagatatcattcaggctgttccatcccaacgaatcagtcgaccaacctcgttacatcctttcaacgcatataggcagctgcgaggtttgaacccgagtccgtatatgttctatatcgacttcggagacctccagttggtcggcgccagtccggagacgctttgcaaggttgaaaagaggaaagtgtacaaccatgcaatcgcgggtacagttaagcgagggaagacgcccgaaggttcgtcgtaacttcttctgattgtcacatagcaatttgaaatctatcagcttatcattgtattcatcttttggaaaacaaaacgaatcagaggatgctgctcttggagaggaactcttggcatccaccaaggatcaggctgaacacatcatgcttgtcgaccttgctcgaaacgacgtcaatagggtctgcaagcctgagaccgtcaaggtggatgatctgatgcgactcgagaagtttagtcacgtcattcacatcaccagtcagatcagtggaacccttagagaggacaagactcggttggtttcgtttcctcttgctccaatgcacattaaatacaatcgtagctgatagatacctcctcatcatccggtccgttacaatcaatttcttctcaaggttcgacgcgttccgatcaatcttcccagctggaaccgtttccggcgctcccaagatcaaggcgatcgagcttgttggcggtcttgaaggcgaacgaagaggagtgtacgccggagctgttggacggtttgactttgataaagatcgactggacacgtgtattgctatcaggacgatgacattcaaggatggggtcgcttaccttcaagctggtacagtttcctttcccttctctctgttatcgcgtttatcaagctaatccgggtaatatttattcatgggattgactgctggttaggtggaggaattgtccatgatagcgtggagaacgatgagtatatcgaaacgatcaacaagctcggagcgaacatgaactgcatcgaccttgccgaaggttcgtccaatctttctcttcctttcttatcgtataaatgtgggatatgtgtgctcactttctgatcatattcatctctgtactcaatcatgttgattcttccttccaatcagcttactacacatctcttgaataaaagaaaccctcgtcatcaaaatatagaagacagcggatgtggaagaatcttgttcttgcaaggaaaaacgttatatttaatggactctccagtctgagactataccttcaacccttgctcttctgtgctcttcctctcttgctgttttcgtccagatacttgtcaacgatacactgaaagaagaccaatgtataagatatctgcaaaaggacaagtgtctcgaaccgatcgcttcaaaggctaagattccaaaagaaggtagcgccattttcttcttttttcgtttttatcttatatacatacatatgctcaagtgactatcgctgaagatgaatcaggacagttgagaagaaggaacagaaagattaggattgaaacaggcgtatggttttaaaaagacgccaatgagggttcaagggtgtatagatcaaggagtaggagtgggagggaagtgcttgaacgaccagcgttcggaccgagcttttttattggaaataatctggtttcttgagactaatacacccaaaatcaaaagaacgagatgtcgttgccaaattgatatcaatgggaggagcattgatcaaagaggaagagagaaagacgactgactgcacgcctcgttcggctagacttgcgctcaggtcatccattgtgagaacagtacgattcttgtcctattatcgagaacaaaggccgacgccggaaagtaggatcacccagtcagaaaaaaatgagcttctatgggtacctctgaccttgattcggtgtatattcattgatttcgaagacctaaagatgaaaagccgacaaactttttgttgttgggcagctccggccggtcgacctcggccacctggttgagcgtttgtccgaatccgagcatagtgatacgcatccgtcgagatatccgagaggagcttttgcgtagtcagggagaacagtcgggtgctgatttcgattaaggaagaatatacaaaaggaggacccaagaaatgagaagatcttgaggacaaaagatatacagacggtaatcaatcaaggcatagaagaagagctgcacgaacaggcgaggatcggcggattcgaatccagctttctgaagaaagtactgagtgatctcctctggtatctgtcgatttttcccaaagtttccagagtccaacgatgaagacaaagagaaggagaggaaaaacacacggttagcacaacatgccgacgcacacagctcatcaaaaagaatgtatagtaagtatgaggttgaggacagaccaaaggctcataatcatccaacatcgtcataaactctgtcaatgtcctgtcttttcttgcgagctcttcttctctccttgacggaccgggttgaaggtttggcgtttcagctgtagacatcgtcttttgagcttggcctagagcggatgtcgaggtcgacgacgcgcccgccacttgggttgagttcagagcagaaggagtgattgtctttggagaatttgtggaggcagatgactgtggcaggatctcttgcttcagagaagaaggacctgccgtattcgaaggagcagctgattgaggttgcatcactgggtggtgtcgtttggatgggttggaaatgaataatggtcgagagaaggaaaggaaggtgaggaaattcgtaggaaggacaattacgttttcaattccttctcttaccgatcatcgagtcatcaatcattcctcgaacgacaacgacaacgacgataagcgagcgtagacaagggcaaccaagaaccaaatacccgtaaaagagatgagcacaccaacaaaaaaagcgatcgtcgtaggagcaggtcctgtcggatgcctcagcgcactctctctcgctaacaagggatggaacgtaatcatttgggaaggacggcctggtgagcacacaagtgaatgtacccgacatgtagtagttaatatcggctgaacatcctcccttttctcatcgtcctattcttcactgatgcactcataactcagatcctaagtccccagaagcagagaaagaaacgattcgctcggtcaacctcgcgatctccgctcgagggatatccgctcttcatgcaatcgagccagaaatctgtaaggtcccacggtcactgatgtcgttcgatctacctatcgtcgtctaatactcatcaggctgagcaactctatcaatattcctctatcacagccgatgagttactttccttggctttgcctatgaagggtcgaatgatctgggactttgagaacaagtcggtcgatcttctttcttcttccttctagggtcttcctctgcttctttgaatgtcatcggttggagccgtctcactgatgttctctctgtctattttattttttaaatgcatctttctcttacagacaggaatctcagctatacgaccctcatcatggatctgcgatcaactcgatctctcgacagattatctcccagacgctcctcgacaaagttagtgcccacccttcgatcaccgttgtcttcaaccgaaagatcgccaaaatcgactgggctcgacgacgactcttccaagagggtgagcgcggtgcctgggtggaggacggaggtgaagaaggttgggatctgttggttggagcggacggaaattggagtaaagtccgaagtgaaatcatgagggttcaaccgtaagtgatctgttcctctctgaattgtaggtggatggctaacggctgtctcttcccttggctgttggctcacctgcggacactcacttgacagatcgtcttattctcaacaccaaattcaacacatatggatcgaactgagacttccgcctggaccgccaaacaatgcgaccggggaggattcaacattctcgatcagtcccgaacatttacatatctggccacgacatgaattcatgttgatcgctctgcctaacaaagacaaatcattcaccatgacgctatacgcgcctatccaatcgatcgtcccacttaacagtcgagctaaagcccgagcgttcttccggaaacatttcgggacacgaacgcttgagaacccggttgatatcctatcgatgatgggtgaagatcaggtattggacgatttcgagaacgctagaagaggtggcctgaccactatcagagttgatccggttggctatcaggatgggtcggccgttttagttggtgatgccggtcattcgatgggtttgtcttgtccttttccatttctccttcttcagtagcctcttctttcacatgttagaaggcgcttgcttacctcacccacattctttctttcgttcgttcgttctttcttatttccctcttcaagtcccattctatggtcaagggctaaacgcaggactcgaggacatcagagttctcgatctcgtcttccaatcccacgggatcaccggtcaagcaggaaccgaggctgacgtcaagcagtgtctgaaggaatactcggttggtcggaaagctgatctggacgcgattctggaacttgcgatgaacaactagtctgtcctttgtctattggcttttgtgtgtatgtgtacgtttcgaagcacagagatcgctgaagctcttcgctttctcacctgtagcgaggaaatgcgttcccacgtgttgacgcctttacaccatatccgtcggaagttggactacgtcctgacgaccctcttccccagcccgccgccgactgctgcttccctatcggcactcagtcgttcctctggcgagccattccctacgcgaacagtcaacagatggacaacgttgtactctatggtgaccttcagaccggacgtcccttatgctgaagctcttcggagggagatgttccagagaaaggttctgggtcgatggatcaaggctgtcgtcgtcggaaccggtgccggtgtcttttgggcggtctgggccgggttgaatttggggaaaaagttgaagttgagaggtcatagaggtcgatttgtttgaggaggcgtgctgtctgtcttcaaattctacttctgtctttttcagcagagtgtgtatacatgtatatgatcgatggtgcgtatatggtcgtgagtgtatatatgtataacaagaaagatagagaaaggggagcagaaaagcgacgaaggaggaagaaaatggttgtaaagaacttcaaccaacaagtagacgagacagatggccagatcggaacgactaagaagacaagacgcagaccaatctcaaagagagatgagcgccatatgcgaaagataggagagagtaatataaaaaccagggaaagagagtctgaggctgaagtaatcgatactaaagcgtagcgcgacgacaagagatggaaaacaaaggagaagagaaaaaaaaggacagaagcagaatgaaatataggcggacgaactgatcgtctgggaaagtgataggctttaggagaggaggaggaagaaaacaaggattctattgttcgatacagtgaggatttggatcagacaagagaaaaagaaaaacagagatatgcatggaaagaggaaggcggagagataaaactacaacaaagatgtggccgagagatgagatcaagatagaaaagagaggaaggtagatgtacacagttagagaagaaaagatagcgagacaatttcggtattataaaatggtctagtagaattaaagaagagcgaagagagaggaaaaggggagagaagagcaaaccagtgtacgcctctgcgaaaaaaccgcgaagagttgtctgataggaagctgagtgcttcctatacttcatagatgccgacgtccctgaaagcggcacttctggcggtactccctctccgtggactgacaaccatttgttcgattgagctgctctcagcgatgctggaggtgctgcccattctgaatcttggatccctgttacgtcttgcgactgcagtgtttgctgcgtaggtaccaccaggaattttttcgagcatctgcatggtgtgcgcccagagttgctcggcataatcacctgtaggtgcgttcgggctcagcttgggggagagtgcgtcatctgatgggtgctctagttcggacggatactctgcatcggactctggttcggatgaaaagtaatattctgtgacatcattcatcagctcgtccgggctgcagtcatccattgcatggtcgtccggaacgtatggtccggcagaagaaaacgaagatgaagtggaagcgaccgagtgtcttttggaccgagtgtaggcaccaggagtccggtcatcttggttccaggctggtgcgaacgggtcaaacggggagaacagggtggtctcggccgaaggggtgagggtaggagtcaagccgggggtgctagtctgagagattccacgagagacgtttggtcggagcatgcccgagtctcctgtatcggaaccggaggtaaataacacggtcatgccctcatggttggccattggggtgttgatgtcgggagcggcagcggtagagggatgagatagagaggaggaaaagaattggagatcgaggttgacgcctgggtagctggacgtcgtcgactgggcgaacgagatgcttggcggatgtcgtcgaagtggcgaactctctgagagttgaacggaggatgaccgatgggagagaaagccaaggtggtggtaaccggatggactcgccgaggttgctgtgaacggagagacggttgaggtgtctactgagggtcccggcgtggacgagaaccttggacggatgggtgagaaacgactgtggtgtggatgtggcattcttcagattgtattttgaggtgtaagtgagtgagcggataggaaacgatgggtggagaaaggagctgttctgattgatgtaagagagagattgggcgacacggcgacgatctcggtatctgtaagagggtttgggaggaaggagagaaagaataaatatcccggtactgataggactcagccgatatgaaaaacggttactaaccttgttctgctcaaggtccgggggctgattcgatgtagagccgggtggatgaatcgaggatggagaagcacactgaagacacgagcgcctgagctcggacttggctgtatacgcgaagaagacgacgcaggcgtgccagggttgacggccgagagaatgcgaccagcagagaagagttgaagaagagacagttttaaccagatgccaaccaggaacgacaacacgcccagggcctttttcttgtgtgtgggagagagtgtgcgtgccggagaagcgagcacgagtgatcagaaaggataacgacaaaagagaaagcggtgagaaggaagaggaagagaggaaagggcgacggaaataagaaagagggaaaaggaaggagaacgaaaggaagagaagagatgaggaaagaaacagcaagaaacgaaaagaacgagggatagaagaagagaaagaagagaaggagaaggggaaataaaggaaacagagagaaaaaaaccccgaaagacatatgcgtatgccaccaggcagaaagagagagagtacagagagaaaaacggatgacgacgtcgttacgtaaggcgctcgagagagtggccctcctgtcaagagcagatgggttgctgtgcgggctgatccgaagatcgacgccacaatggaggatttatgtagagtaaacaagaagagccatcaaataacctttcttttcgtacttttttcagtctcaatgaaacggatgatccgtcggtgtggctgaattggtgctctttagtacattcgtctattgattcatctatcgctcgtggtgtagatcgcgctcgcagcacactcggtatctgtgtgtgattggattggggtgttctcacgtgacacgtgttggtagataacacgcatacgtattcatctactgatctatctatcgcctatggttacctcgctgtgtttctgttcctgttcctgttcctgtcacatatctatgtggtacccataagtttcatccataatttcatctatcgcatattacctaatcaacattcccgcgtgcacagctcgtctcccgcgctcgttattgcccaaacgagactttcccttttcaaacgcacacacacacacacacnnnnnnnnnnacacacgcacacacacacatccctctgctcaacgtgtagtgactattcccaactactcgtctgcatacatctccacccacgcctacacaatgatagagataatcctggcgacactgatcatgtgtctatcattctccatgatcggattgattgtcgtggtaagtcggccggcgtcgatctctcggccatctccatacgagtatagtttcctgaccgccttctcgttctccttctatcccaccctcagcccattgacggatcgattgtggttagtcgaaagtcatcctatcatttgatcacaattctttaagcactagtctctcattagataacctcggcgtttctttctgtatttctcagagacttcgtgcgaactatgctcctaggcaagctacccttctccgtcatctctcgtctttctttcttccaggctgatcttgatcgcgcttccgttgaactacatatctctatccacactcagaggactcgccttgtccgagatagaaactgaggcaggggatcccagagtaggtccggccgtcagaaaagtttggggcatgatctctagagtcagacgccttgagggttggaaaggtctttacaaaggtgggacccgtctttctttcccatcgtctgacgtgcttctccaatcggtctgctgatctgttcgtcgtattcggcggtcttgcacttcttccgcaaattctccctcgtcctctttgctccttcaaggcttcctgccgttcatattcaactcagtcctaatctctgtcttctcggtcgcgtttgtcgagggatcgagcacggtctctccaaaggggacatatcaagtccctgaggccggaggtgtcaagtgagaatttattcattctttttcgacccgtttcttccatgtactaatctgcttgcttgattgcaaaaacaacattcacatagaatgactttgtttggaatcgcgctcactctggtcggaatcccaatgacggtgcttattaatcggtgtgtctccttctttcttccgcctctgcctctcacctggctagctgaaatttctgacacgtgttgtgaattctgtctagatcgattgtcacacctcatctacttccttggtctcccaaaaaggctgcaaagatcattctgactccttacgagcgatccaaaccttggatcatctttctcactcctgggtaggattctctatattctttccctcccccctttcttgtctgatactgacgcgctcaagagcttctgccttttcatagccttctggcggccaccgctatccatgtgctctacatagtcgtggtttctaaaaccgttcgatccttcgttgtcccggaactcgcgaacggaatcttcaagaacccttcctcttctagagatggtccgttcgctaccatcagaaccggcagactctttgttttcttgattttccaggctctgtctgtcctagttctgtatgtggtgctgttcagttgctcttggccttctctcccattcgtattgatgctgatctgatttgccattcaatgaacccctctaaatcacaaacacacgtacacaaaagatgcccactcgaagtgatcgcctgtaggttatcggtccaacgacagaatgcagagggcgaacagtctacaggagagatcccctcgacttacgccgcaaaagatgaagacgtgatcacccttcgaggagaggaggaaccttataatggattgatcgttcgtcattcttcctctcttcttgcctctgtcttccttctttttcttctcttctcacaaggacgaaaacagctgatgagaacttttcttttcttttcgaaaacaggatgcagcgatgacgatttatcaagaagaaggagcaggaaggctgtacaccgcttggatcgttactctcttcggcgctctctttggcgctctctttgcctgatccaatcgatcgtagcctcgacgccttctctttctatctctctatcttttctttaatctctcgaacagaggaaggggtgaggagtttatttatgagcccggttgtgccaatatcttgcttcttctctccttctgaatcaagtcgtactacatcaatgtgaccatcgtaagagcaagcaagcagcccgttggttttgtgttcgtgcttctcacgtggttatctctagatttttaaatcgtgtttcgtttcacttgaattccattcgatttcatcgttccccgaacaataaagggtccatccagcctgatctaccgtcatcaacaagaatactactcttgatgctttggaatgaacgaggaaagtgaagaacggaagaagaagaaaaagggaaaagggggttattgacaaatcggatgcgtagatgagccagacatgtgcacgaccaatctggttgaaccagtgcttaacctccggtgggttggttcggccatgcgcttctccttcgatcatgcccaggaagtgggtcctaacttttaaatgcggaaaagcaacaggatgacaaaatagtagtcagatttcaatccttttagcacaaaggtatcaaaaaaagaagacgactgagaaagttgtcgaagcgatcaagaagcgtaggggaggtgtcgggaagaatcagatacatatatggtaatcaagtgaaattcacaagcttttcctaggagcttcgtag

SEQ ID NO: 570 - DNA, 2774 bp, Xanthophyllomyces dendrorhous
ggggggaggagacatcgactcaaggggattcgaggaatatataggagaatatcgcaacgaaaagacagtactgacctcgtgacttgacaagggatgattgaggggatagcgtctttaaagtcaaaagacgaacatatgaccatcgctggcgactgtaaatcaccgcagaagaatccaaagacagtcagtacattgggctcttatgcgagatgaaagctataacaaatgagcagaggggactcgggaaaagatccttctttcttctcaaggtcggaagggaaaagatttaaggaatcagatacacaaatggtaatcgaaagataatttcacttcgcttttcctaggagcgatcgtagtgagctgagttgatatgttcatcattttgtcctcttttcttttcccctgcctagaagaagcctctcttccccgtcgccgctcttctcatcaaatattgcagaattgatggaattatggaaaaaagtagaaaaaccaaactcacacaagtactgaggaaacactgtaatcgggtgtccccgtttgttcgtctgctcaggcggtcaagcagatgagcgagccaatcactcgaagctgagtttcacacaggaagaaaacgcagcagattcagagcaatcagaatagatctgtacgtagcatgataagagaaaaagactcactgtattcaattaggatggattctttcatcgaagaatccgaaagaaggagcccggtttacgtaacaacattgggcctctttgactccttcttcgccttcttctctttcttgtccttcttttcctcttttttcatcttcttgacatgcttctttaaccgctctgcatccttcctgagcttgcgctctgcctcgctctctacctctttgctggcctttcgcttcttcgacgacgacgacgaagactccgtcgatgcggtcaccgtcaacaaaacgggcggaggggtgacgattaatggcacctttgcttcttccaacgtagtagcgatcgttcggcctttgtagaatcgttcgtagagttcccgcttggcaagaacccgtttggcgtacgcaaagtgattcaaattaagagctgacgaaggttcagtcggagtggccggagagacagtggccaacttggaggaatgatgcgtcggagcataaggagagataatcccagtcaacgttcggtgaatcgtctgagggacgagatcaacgctggggctttcttccggagctggcgaccccacgtcagacgacccagacgaagaaggagaagggatgatgatggatgatgcggcagcagcaaacacatgatcccagaatggaaaatcttcgatccgatcctttccaactcctcccaagttgtttttgacctttacaggaagtgggcgggacaggtggccttgcttgaaggctggtggaagcaggacacaacgttagtcaagatcgatcaatcgtaggatcatcttgagattcgatgaatttgtcaacgaaccttcgcccttccctttccagccctgcttcttgaggtgagcaccagcgtcgaacgacatcaaacgaacgggccaaccacgatacaaatcgaaagagagaccaagtgcacaacagaaggaggattcgaaggaaatttcaaaagcagaaagaagcaaaattacttatatatcacgtgactcgcaatgaccggccctggtgagtcacgtgatatacatgtgtcgacgtcataccggttactaacagcatgcgatctcattctgttctcagtctatccttcctttttcatccacgcaatccttcttgatcaattctcgtcttttttctctcttggttgatcgatcgatcaagagctcagagactcacatatctagactctgagatgactgcaaacctggtaccacacgactctgacgtcaaggccatcaaagctcacaacccttgtggcgctctgctcaccaggactctgccttcgtacagcggatcgtactcggtcggtgccagagacgtcgagttccctgttgagactaggctcatcgggtcttttgctttggccgatccgatcaaaggcacgagagtaggattcgagctcaatacggtgctttatacgttgttctacccatgcaagccagcgcacgatcaggcttcaaaagtgatgtggttcccaaagtcagtagagcctctatactttttattttcggatactcggtgtcatcccttgctctaagcgctctatttttggaaactcttcaggttggctcagacagttgccggattcttgcgcatggcacatatcaccaactggttttacaactcgatagctcgtacgaaacctctctgtccatacgtatttcggttcaagctcattccatcttaccgggttctttctccctcgtccttgacatagggttcttcgcgggtatcgccatccgaggaaccacttttccagcgttcaaagacgccccgcttcttagagcacccgagaaccagccctggcctgtcatcgtgttttctcatggcgtcggatgtagcagattgatgtactctgcattctgtggagaaatggcatctagaggatacgtcgttgctgcggtagagcatagggatggaagttcgccctggagtatcattacctttcgtgcgtgaagctactgagttcttcggtttcgtcatgtcttcaagcttcccatcctgacctttagcgtgaactgaaaaatgatatctacagcggatgggactaccaaagaaatggagttcatgcgttacacagacgtcaagtctgtcccttcct

SEQ ID NO: 571 - DNA, 2327 bp, Xanthophyllomyces dendrorhous
cccctcctgatctcgaattctactgactcctgatatccttctcccctgttagttggccagaattgaaagaccagccgatcgatgatactcgactgcgacatgatcaagtcagcatgcgacttgccgagatcgatggtgtgatcgaaactctcaagctgatcaccggttccatcaaaattcgagataaccacggtgggataatggaagacttcagaggcaaggactgggagggaagtttggataccgacagggtcattcttgctggacattctttgggaggtacagccgtggtgagtctcccaattgatcatatttctaattcatcaggtaaaacgctgacagtatatactatctctgtgtttctccacagatctctgccggcgccgaccctcgattcaaaccgcgagcagtcatagccactgaccctgctatgcaacgtcttgacccttgggagggtaccatccattgtcccgtcctctccgtcaactcggaggaatttacagattcagacgatttcgacagactgttggatgcagtgcctactttcaaaggaggaagcactgtgttttctattcgtaagctgtgttccctccatctttgaagcgacgacaaacgagatggctgatgtgtctctctttgtcaattggggctgtgggtactgaagctggatctacccatccttcattcagtgacgtctttgtaagaagccaatttttgttttgtcaagattaactagtcaacttattctctgacatctttccccatcattttatccgttttaatttcatgctagctaatccttcccggtttgagttcgtccaaaaaattccctttttgcgccttcagtaatcttattctgactctctaaattttctttttattccttctagtcaaccggaagacaggattgacctgttctcccctcaaggttcttagcaataccataattgcttgcgaaacttttctcgagggaacacttcaatacgtagtcgatcaatgtaaagtagtcagtggaagacagtccaggccgttctcggacgatcgaggaccgatgtgggtccaaggtgatgtggtcaacaagcaggatgatgaggatcaagataggaagcttatgggtgatgtgtccgtcgaactagctcaagatggaccacaagttttttagattccaaaggcccctacagatacatatgtttgtttacacgttcgtttgtctataagagagacgaaaccgcaacctgttctttccttactcgatagatgattactgaaagtgcataagacggctccatcagatcttttcgaacgcgaaagcgagatacagatctggagacagaggaagcaaacaatggtcaataaatcggaaaggacggacaaaacaagtgcagagagagaagaacaatggcttactagcggcttcccattgatcctccgtcatcgctgattcaccgtttgaatctacgactttcatcctacctagaagatctgtgaactccggtacatctctttcttcatcaaataccctatcggaaaagtaaaaaggtggccggtcactcaactattaaacgacttgtttctgactcccctgaatggatatatgcaacagagaaaagagacttactcataaaattccttcttgtagatcagtcttagaccatactccgacgcaagtctacgattgagacgaaaaagaaacaggacgaaatcaaaacctttatccagtcgggtcggaaaaaggtatgtcagactccaacagaaatcataatgtacgaaccgctcaaagttctcccagtgaaccaggtattctggaacatcctccaccgcgtcttgcaagaagaaagaatacctatgaccgtagatagggaactctataagagacagaacaagtcagccatggcatcaactttgtccatgtaggaaagtctgatcataccttctcgagagtcaaactctacagaatagacatcgtttccgaaggacaaagcctcagcgtcttccggtatactctgcagttgctcactaaatcctccgcaattcatcatgccatgatgagcttacagctagcccgttaaagaatgagagaagaaataaaataagacgagcaaattgctacttacacaagtttttcagcgttgggtacggtacccatgaacatgcctcctaacttcaagtttttcgtcacgtttctcaacatcattcttgtcttttgctctgtctcgaacgcatagtgaatacagaactgcatcgtcactagatcaaaaggctgtctgatagtgattacgtcggttattggaacctgtgagtttttagttttttttttttgggggggg

SEQ ID NO: 572 - DNA, 27577 bp, Xanthophyllomyces dendrorhous
tttttttttgggggggggggggcaaaagtatcttgtaagattcacgatcgttcggagagaacatagctagagcataacccacagtgaagcaatcaagggcatggaaatcataattaaagttccttgttcgaatatctcgagcacgggtagtagcttgttgaacagagacctcggcaatgtctagatcacaaagccatgatccccgttgaaatgaaccgcaagaatcgtcaggtcaggcaaaacaccagagttgtagaaatgatccggagcgatgcaatcgtgtgagacgtaccgaatccaatatacatttcgatcctggcagaattccacttcaataaatctcctccctttccacatcccagatctaacactcggccccgaggtcgcgcattcctcggtacaccccctccaccaggaatggcgcgccgagcaaatttggcgattagaacggatttgatccaattgttgaaagcttttagcccaaagatcggagagaatttgcggttctcgcgaccaacttccggacgatggttatctgaggtttgaacgatggtgggagatgaaagcaaaaggtttagttggctgagcctataaagacgaaatgtgccaacgattcagtagaaaaagaaagacgtacaatgtgaagcgacggcagctacatctccattcctctcctccgtcaatctccctctcttggcatcgccgccatcttcctgcctctccttccccatactcctctttttgtacacatcatccttctcgccctcttctggttgtctgacccatcctctcagcatgttcttgcttccgtctccaggattcctcagcgcgtggtcgtactctgactttcgtagaggtaaatccaccgctctccctcccccccttccataatttttgatgattggatcgtatggctttgtatacgaaggcagacggaacgttggtggcgaagaagatcggttggaggatctatcagaactcgggctaccaggaaatgccgatccacttggtagttgagcgtttgctgccatcatcattgacgacaactctggtacggatgcagataacggttgcgaagaggaggatgggacaggacggtaaggcaacatgtcaaactcttcttcctcagactccgagtcagagttatcttgggaagagcttccactacgactagagctcgaagaaggagactggttgcttcctacgtaatgaccatatgcatcatctggataactgatgggagagttgccgttgaggatactgatagagttgccggttcgatctcgatgcgcgagcggaggactggagggcgccaggtgggacatgttctctctttcaaaaatgaaatctatgatgtccctttggaatgatcttgaaagatgatggttgtgatagataggtaatttttttgtcctcagacgtaagggggtgtacacaggaagcacttctcgatgtgatcatcgctgatattattttttcttttttgttaacattgtgaatgtgacgacgacactggtcctgcttgacaaccgaagtctctcaacttctccatgaagcatatttttcgctgttcacccatcatcctcatctagacaagtgcagtagaacattattttgaaagaaaaaatccccgttgagaagagaaaagtatagaagcggatacaagtacaatacgatagcacggatcgcaagatgaaaccactcgacttgaagaaacaggagtcaaaatggaaatgagacgatggcgatgacaacgataacagagcaagtgcagaaaatgaagatcaagaaacacgtggatatactctaagaaatgccaaatcaagtagaggattcgacggtcataccctctccagcagcagcagcagaggcagcaggagcgaaccgcttgatctcttcaggtcctcgttgcctgttatccggagcttgaaggccggcagctcgtgcagactcctccggggtgtgagccggctccaaaagggttttgcatcgacgcctgagtgaacaggaagcacaagacaggaattgtagatcgaggaaacccttggatatgttagaatcgactcaaattaaacaaaccaagaagaatatgcgagaagaaggagaccgacttgtgaagcttggttgtccaatgggtcttgagagcagcatccgtttccatatatctgtaagtcggaatcaagaggttgttggattaaatcatgcgcagaaggcctggaaagatagagcttgtacgaaccgagcacactcaacacagtactgtggtgttgaagaagaatacacgattgtcaataaagagactcctggcgacaaaccaaaaacaacatggctggtcttacgtgctgtcccaatccgggcttgtcctcatcaagctcctgggcctcgagcttctttcggttcatgggatcaagatcatgcttctgaattaagtcgagatctctagtcctagctcgggttcgctacgaataagagatgcaagaaaaatgataggtaagtgacagtcaagagcagacgctcaaggatgacttatagtagggatactaacagcggctcggtgtacatcacgctgggctgcagatacgaataacacaaattgggagcatgtgttaatcacgaatcagaaagattggacacgagaatcaatgtatcgcacaagtgaaacaaacctttgtgagttctatggtaaaaatccggcaagtgggtaaaagtgataagtgagataattaaattttctcaatgatatcaggcctgagaaatttctggataaccgaaacatgccaatcgagcaagaaccaattaccttgatcttcttaatcgtcccatgttgatgtcgttctatttaacaaatctacaagaaaggcagttgagagtggacgttggtgttcgacgattgtgttatatttgaaggagttgggtgaatcaagagcagaaacttgtgtctcacagctgtttgaacgccacgcacgtgacctttacctctcactccgtcagccatcttgtcgctcccaactctcgattctcaactcctagctcactcaatcggcacctcaggttgtcttgaagagaggtgaactacagaaggtcttccatcgatacaaagctgctgagtctttggtctacgagatattcctgctcgtcagtgctagtagactgtatttatacctatcctttggcctgcaaatcggccataccgcatatacccgtctctcgactacaccctgcctttggtctcgatcgggtgcttggccatcaatcaaagaccaactgtatctttccgggcctgtataccagtaagaactttggtacaacatcttttgaaacggtcgtgtttcactcaacagaaggattaaggtcagaatggactgacttgcgtctggctatggcagcatgtatccgtctctgaatctctgtatccaaagaatctgagtagatagacaatcaagagatcaaggatgtctcttgaatttgaaactaagctcgaaaacgtgctttccgatctccgctcggagaaaatcaagactcgggagcagggtgtatcttcccttcgcgaactcttgttagacgctcggcaacgatatgatctactcgaagctggtcaaggccaacaagcaatattctcgagtttattcaaagctatattcttctgtgtgggagaagaaaagaaagcctgtgtcaagaaaggcgcagtagaatctggtgagccactccgtgatatcgtttctcatcttctgattccgattgctaactgtcccaacatgtgttgtatctcattcatcagcccctcctgtatctttgcgtcgcttaaccgatattgctttcctgctccgtcagttggttcagttctcctccccgcatcttgctaaaaagaccgttcgctccgtatacacacatttgatcgttctccttgaacatcaagggacacttttctcccccgtagccttggactacatcaaggcccttcaacttctgttcatacacaagcatcacatagaggccttcgaaccgacagaatgggaagctctcatgaaattctgttttgcagctctcttcgatgaggagctggagctatcgaaaggctcttctcaaagcttctctgaagccgaaggcagaggccaagtcctgttctcttatgcgcaagcgggcagaggaacagcagaagagagatataccgtaggaggagacgatagtgatttttcgagtgaagaagatcgatctatatcagcctcaggaaggaagaggaaaaggcatcaatcacaaggatcagcctctcgcactgtctcctacactccgtctctgacattcggaaacactcagtaccgtgctcagtctgtatctctcacaaacaccagatccttggcttcgacaccaatcatcaagcgaacgaccactctagaaaagatcgctctggcctctctcattcatactcttcttgtcccagcgcactctcttccccttcttggttcttctctgaaaccacgatacgaccaagatgaccgacctctcccagctgaaacaagctttgttgcgagtggggttttgtatggccttcttcagtacctcttaacgtacacctcggaaacatctgcacatctcgatatcctcaggtcggttaatatagtcttcagcgtcattcaactcaatcagctctgcaatatgaaactttttaccgtccgagcgtttccgatcctactcaagctctgggctaacacaagaagtaaggagctcagagaacagattttgatcagctggaaatggatgttcccatttatctcgaagatacaggacaagtacgggaaagacctcgcttgggaggattaccgaagcgagttagaagagcggatatcagaaagagagatcctggaagctttactaggagcgctagaaaatgaagtcaagaatagatgggggaatgaattgttgatgttggataacttgaaactggaatttgtgaaagaagaaagcaggcggagcgcattcgttgctgggagtttttctgtaagtcattcatcttgatcatatctaagctctgcttcatgcatcacatgccgttgttcactctctgtgttgaaccctgtcttgtaccagtatgggcataacttcagctcggttcaggccatgacttgggcaactcttgaacttcaggcggatacgatatcagccgttagtatcaacattttcatatcacacttgatactcgctttagtttaccgttagattactcattctccgtttgaacataatcacagatcagagattcaacaaacggcccatctctttctgcaattctgagcccctcagtaagcgttcaagtaaaacgtcagaagattgagaaggaccctttttcttctcttttggaggcgattcgagatgcagccttgccttcagttcgaattttccatcttcaagtcttgctgttcttcatcgaccgacacgagaaagagaccatgcaagaacaggatggtatcctcaagaccttgattcttgtgctcggagcagaagatacaggagttcaatcttgggcattcgtatgcctcgcttccgtagcttctgtcgcaaagagcgttggtttgcaagaggacgtcctctcttctacccctacaagtcgaatatacggagcaaaatctcctctacaagatagtcttactcaaagtcaaggaaatttggatctcgcgcaagcctgggagcaggtttggaaatatgcgacacgacggattaatatccctctcctctgtcgagcggcaggtcatgttgcatattccatagtccgtcaccggcagatacccaattctgcacttctagaaaacgtcgggaccttcttgaaagatatcgaacttcaaggcccgttctttccttatgacactgtctgtcaattcatctcaagttgtctggatctggcttgcgaagatctctacttgttcaggcttgagtacgaggagagagtgttgaattggctggtctccgtatggaacgtagttgacggtacgacaaaaggcttcaacataaacacaaagctcgaaaatcactctccaaacgacctgctcgacctgttgtcctctttgtgccgttttaaaaccagggttaaggtcttacaaaacggggtacttcccgattcggatatcgtcaaccacttggttgaggaaaatcgaaccaaaaccatccgcgaatacgtgatccatgctcggctacctcttccactatctgattcgatacagcaaggtagttctgataattctgacgcaaattcttccagcatagtctcagagagggatctcattggccgccctcggaaagtttctagctttttgctcaagtcaatcgactcttttcatctagagtggaaggacatcgatctcaagactggcgttactcccgagaaggttcgacgttcattggatctcattgttctatctctctgtttcgagaatctgctacagatgaacggaattacaagcaatcgacgagcagtgaaacgatcatgcctacttttaactttggtagcacccgccttatcaactcctcagtcatgcttccgcgactcactaatcatgattcagggattagaaccgttactcatggactccatcgaccttgatgaaccgaaggtaatgcttttgaagccaggtccaatgacaggaataaggaaggatcttttagctattgaaagagaagaaggcgggccaagtgaagaggcaaagaagcgagctcaattgcattgcttgatctggcgcagctcaggtgtaagtatggttcgcttgggatgtgtgattaactgtcttatccgtcaatctcaaatatactggagttgattgcgcgcatgtctcgcttattgatagaattgctgcctttttttcctcctgtttcgccaatagcttcaagacacattcgctactcaagtactcggtgctctaaattcatgcctacacatttcacttagcctctccgttgacgctagtggagcggctgatatcgacacgataactgggatatcgactgctcttgatgaagatgggttcggaacaataaacacctcccaggatgggatcctaacttccgatatatcccaaacttcctccttctcacctacccgagtctgccgatctttaatcaagacaactttcacttgcatgacccgaatctcaatcctgcaatctggaagtttggagccgtctcgacaacgagatatatttgacctattagaaaactgcgatggtccccaattcatagccttcggtgatgtagtgtttgaggctgtcaaactaggccgtctacacctcggggctactttagcagaagacttgctcaactcctttgaatattttttgaggtcttatgcttacagtaaagacataccaatgcttctcttaaccatctcttttatagagtccactctgcctctttggattggtggttcgactgtagaaacatctctgggcgagaaggtcaggatgttacgtgacttcttcgtagcggaggtcgaggagggtcgtctacatgcaggccctgtccgagcacgactgatcgcctttctcgaagcctactgccaagcagaccctcaaggccgggcctggagtctccctctgcctaaccagaagcattcacttccccttttgaatgtcatgaagaagtttgcaaaggatgtagacattcacgttcgatctcaagctgcggtgtctctagccaatttattcagcttcaccgcgcctgttgtccaggattccttcaagttctatagtttattctaccaagagttttctgtcagcggtcatgagcaaagcatcactttgactctcttccttgccaacatcaccattgcttcgactaccgtccgacgagcatcctacttccaccttctcgagcttccatcaatgatcgcggatgccagtgttacccacgttgagacttcactcaaatcagtagccacagttttagggctcagttcactcttcaaactatgggaggtgtacgcaccagtggtattaacacatataatgaagctcgaggcagaggatggggaagttccttcgctaatgtcatctcttcttggctatgcttctgccaggcagaactctgagatgattctccggcgcttcggatcagtctacctcgctaaagctaggattgatgtgttttctactctatgtcgatcagcaggaagaaagccggatgatgctatatcaagctatttaccacaaatgattgcagggttagtcagcaacgccgtcggtcatggacagatcaatccctcggtcgagactatcaccgaatctgtcaagaatgttggtgttactatagaccttctttctcttgtctcaactcgaatggacaccatactggtttccgtcttccttcgactttttgatccatcgactatattagaggctcttccaagatcaaccgatggggatcagcggagtaaagcttatgcccgactgtctcaaccggtgccagagctctacaatgtcgatagtgttcttttcccaagatcctcggcagtggctgtcatttgcgctcacgactggtttgtctctcatcaaggctcaaacaccatgcctctcgaatctgtcgccttcaacgtccttcatgaactggtcagcgaagtggggaagacaccgctggtagtagaacagattcgctgtatctattctatcgccctatttgtttcgatctatcaccattccttccgtaggtctgctctcctggtcgcactgctacgtctatccgtcaccctcatgagccaagccgaattagtgcctttggtacaaggctttgtctcctggggattggatcaatctttccatcttcaggctggctcgtctgatttagcagagacgttcgtccgggttgctcatctctccaataaccttacttctgggtcttccgacggaactatagcagccatcggggagacgcttttaactaaacttggagccgtccttttcaggctatccgaaacagatggtttccagtctacagtgcagaaagttttgtgcctctggcctcggccgttgaccggtgacttagctacaatccatacagagatggatgcttcagatgtgcttgtgagtgttgctttccttcgttctcgtctttgtttcagaattagttaactaactaggaccattatgtacatcacgatactctggtcttgcttcagattgacagacatcttttaactgcaaagtttacccttgccaaagaatttcaccaccaacttcctttgatgtcacccgcagaccgagcttccttcactgcttcaactttctggcacatcctgtcctcaatgaatgctccttctatcagccaagaatcgcgaacaagtttcgtcgaaatcttacatcttctggatggtcagcttaaacctccatcgatatccgccattgcttcacttccctccaccaatccacttcacaacttgaccgtggatcttcgacgttctcaaggagtttatgactcaaccaaatgcgctcttgtcgttggtctagttgcactcctaaaggaggacgatctcgcggtcatcgatttagcctatcgagccttgagaataaccatcggactgtcttcgcagctcttctctacgatcaagtggggatctgatatatccctcgtgaccaaggatctgattgaccttatcggaacttccagcagcaaccgtgttcgacctaaaactcgttccctccaagatatccttaaggatgatagtgtcgatggcgccaaagattatgatgaatggatcaagaatctcacttcttctctagccgggtttcttgctagtcaagatatgttctttatcgaactggaaactgtgctatcgatcagctccagattctccaagcgcgttctccctctccttgttcaggccatcttggccttcagaacagagaaggactcgacgtgtgcctataaagacgtcctctcttgctacttcgagacaattctgcaaagctactcaatctcgtaccgagtcaagcaggctgtcatcgatgtcgttctccatcttcgtcacatcagacctccaggagccgaatcacctttggcatacaaccattggctcgacctcgattgccttcttctgagtaaggctgctgttcagtgccgagcctttaccacagctcttttattcatagagctacgaaacgatctggatcctggagatcattcgaatgagacaaacgatgtactctacaaaatctattccaacatcgaagatcccgatgggttctatggaattcaatcttctgatatccgctcgtcactcgtccagaggtttcaccacgagagtcaatggaccaaagctttccaattccatggtgctgatcttcaagcctcgtcaatgaacgaaaatgctcgtggacttgaggggacgcttcaggctttgaatttctttgggtttgacaaaatggctatgtgtctgcttcgaggcagccaagccgagaaagggaaccttcccgatgtaccggatgatcttgagtacgaattagcttggaggaatggaaattgggatatacctgtgaatgtttcatcagctcgcaatgtgcctggatcgtcagtatatgccgcattgaaggctgttcatcaagttcgagatcccgtagcagtctctcggatcgttgatagcgctctttgtaaagagatcgcgcagatgtgcaatctcagcattgaaagcatgactgatcttcgatcggccaaaatatctctactttgtctacgagaaattcgaacatggctggccgaagaacgagctaggctatcttctgaggatagtactcatagggcctctccgctatttgcctctgttgagaaaggatttgagtgtgttttcttctactcgagttgctcgttcgtgcttgttctcgtcaacacatgacttaatttatttctctcctctatcttctacacagattctccgacatagagaagattactgctgttcggtcttccctcttggactctatcccagccgaacaaccactgggcgtcatcctcgaaagtgatttgatcaatacacttcgagtgaacactcagctacaacttagcgataaagctcggtcatctggtcaactgcaaatttcagtcaatgctattactactgctcagagactgagccatggacttccagtggcggccgaagtatctagggagtttgctcatgtcttgtggcttcaaggagaacatgctctcgccatcgggttacttcgaaagcttatatccttgaacgattcaactccgagctctgaagtagatagtcttgtttcggataattcttctagggcagagctcttgtccttactggtgagtgcataaatttggtcatgaaggtgagcgactcgctgatatactcgttctcttacatctcattctcgtacagggagaatggctctcaactgctaggcttgacactcctgaggcaatccaatctcgcttctttcaacctgctatcgagctactacagggtctgaacacaagctctgatcaggctcgaatcttccatcgatacgctgtatttgcagaagatcaataccgaactcttcaacactcgcccgaaatcgagcgacttcttctttaccgggatcgtcaagaccgagagattgaggatctgagaactcaacactctcgttctgctcgttctcaagatgatgctcggtactataacaaggtagtcaagaagcgagagtctgacgtcaagaagattgaagagcacaataaattgcagaagacttttctccgaaacgctcttgtcatgttcgccaaagccctggctggcactgatgaatttgacgactctctgattcgcctggtctccctttggatgggatattttgctgacgatgatctcaacaaggctatttcaagtcctttagtggcaattccctcctataaattccttccgcttatcaaccagctctcagctcggctcgatcgtgttgtcgaagaagatccttcttcgtttcaaaagagtcttcattctatcctcatcaaactttgttatgaccatcctttccactgcctttatcagttgatcactcatcgagattcatcatccgtgccggaggagagaaagtcttccaaaaggaaaggtagaagctccttgacctcctccaaatcgaccgccactcctccccgaactggtcgagccctcgccgccgattatatcctccacaaatatgcgaaaaaggatgagctcagctccgatcgccttcgagatgtcagccggttttgttcagtggccattgaatggtcctgcttcaacacggaccatcagaaacctattcctccctctacttctacatttcccgtcgatcagtcttgcgcaatctctaaaatcagggacctccatatccctgtgccgacaattgatctccctttggacttcacttgcaaatactcgacctttattcatatatcttcatttggatcaacatggaaaaatctagggggaattcaccggcccaagtgcacgacttgtattggtagcgatggtgccagataccgtgtgttggtgagtctggtgttctgccagggtatcttcgaatatctttgatacctccatattctgactcatattagcgtgataaacagttcaaacacgatgacgacctccgtcaagacgctatcatggaacaggctcgtttgctctctatatgcctctcttgaatttttcctttccgggtcaaacactgaatcgacaaacgtttctttcatctagcttttcgatttgattaatacacttctgcgtcgagatcgagaaactcgttcaagatctctctccatgcggacgtacaaggttgtggtacttgctcagacctctgggttcatcgagttcgtcgaagatactagtactctaggcagttggctaatagctagtcataagaggtatgttcttgtttcgttttgaaatgcatgattgattgatataacgacacaaatctgattatctgcatcgtgctctctatataccacatgaagatataatccgaccgagcccggaaacaaggaaatgcgagtacgagttgatgaacttcagaaaacctatctcgatcggtctatacttgccaaggagtatctcaagacaatggacaactttcatccggttcttcgacatttcttcaccgaaaagcaaaaagaaccactcgcttggttcgccatgagattggattatacacgaagcgtcgctgtaggatcgatgattggacatattgtgggattaggagacagacatttatcaaacatcatgttggttgagaagactggagagttggttcacattgatttaggaatagctttcgaccaggtgagcgtctgttgagctccgacatgggatatgttcttttctgattgcttcctcttgataccatgtcaaaccaagggtcgagaactaccgatcccagaactagtccctttcaggttaacgaacgacgttatcgatggttttggaatgtctggtatagagggtgtattcagacgatgctcggaagaaactcttcgtgtcttgcgtgaacaagccgtaacgcttatgacggtccttgaagtctttagatttgaccctcttcaatcttggttcgtctgttactccctatcatctcttttcactttggctccttgagacctctaaaccttatctggtttgtattgctatcgtggctgggtcaaaagggtggccgatgctaggaagatcgctagagttcaaggcgaaaaagaaaatcggccgttggcgaacccggcgaatgagattcgctcatcaactgatgaagatgctgatagagcattacagggcgttagaggaaaactcgatcggtcactttctgtggaatatacggtgaatcaattgattcagacagcaagggatcctgccaaccttgcttctatcttcactgggtatgttttcaaatcctctctcttcccctgtttatcgttaaatcttgtcaaccataacgggctgatgacttccgttacttggtggaaaattgagcgaagatggtcatcttggatgtaactcaagtattccagagtcgagccatgtacttcgggtatcaatagtttatagtcaggtcattcaatcagccggatggtctaatacttttataaatccctgttagatgtgatgcgcgttcctaattgatatctcgaaatggaacggaagaggtaatctagagagggctgcatcagacagttcgatctgtcacaatagagcgacaaaaaagaaaagaggggatgtacaaggcttgttgagttggaaatgacataaagcagtcattatagaaaacagaagttacaagcaagcgcgacagtgtcagcactttatacgccggcctcctgggctgtctcttcctgttgagaaccacaaagcgcttgaccttctaatttgtttcgtttataatttgccttttgaactttcctctaagcaatcctgtcggctttaagtaattcaagttctcacatcgaccaaagccatgtatacaggtgtgtctttcaataatgaagcacataaattcattcgggtgaaacacgaagcgagaaagcgcagcgatgacgcgtgacttctgttttgggggagtttgagccgagtagacgtgctgggtggggataaaggaaaaaaaagtccgctcactctttcccttcatcgaccatccacacatacacacaagatcaatcagccatacagaaacgctcggtgttaagatcaacaaaccagagacttgatctgtccctcatacattccaagaagtctgcgtcgtaaagccatatgacgacgcccggatccgcgaatcccacggctcttggtgttcttgccagagctttcatttccaatcgcatcggagccagcacaggaggaattaattcaccttgcatttcatcaggccatgtatttcattcttccaagcgtgtcacctcaaagattccgtcgagcttgaatgaaccgggtcctcatagagcggtagtcagcaaggtcggctgtctttcttcttccggtcggacgctccggacaagaccggcgcgttcggtgaagaacaagagtcaaggaggtcacctattctgtatgactgccgccacggttgacagaagagcagtaatggaaggggggataaagatggaacgaaaacaatcagcaatcagacggtcgacgtttgcaccgttttcttctcggtcagcctcactcgggactgttcgtctccgacaaactggtttgtcgcctccgaacctttgtactttctccaaacgagccaattcctcttctagccaatcccagcctcagccgacatcagtcattaaagaactcatgcggtcgcccgacatctattcgcccaattttaagccgccgaagtacaaggttgtattgtgtcatgggttgtatggttatggagtcaagggcaagccaggctcgcagattcattattgggcgaacgtgcaggacgtgttaatggaatgcggagtagatttattggtagtagaggttccttcgtacgtgcttatcttactgtctgaacaaaggcgatatagcaaatgcggaagtttatcgcgctgactgacactccactcgatgattgtatgttgttcacccactctttcggccaataacacaggacgggctctatcaaggaacgagctaagatactacacgagacattagaaaagagttgtccgggagaagaggtcagtcatgttaattttgtctactgtttcgaggtttgttgtgcttgtcctgacattctgtatttgctagatcaacttcttggcccattcgatggtacgcctatcgacgaacgttcattctggaaaaaaacgtgcacaactcaatatacttggttggatccgtcgattgaccaagatactctttctatcattcttactcatggctctttttaaacaaaccgactcttgaagggtggactagactgtcgatatatcattactcatatcaagaacaggtcgtacaaaatcaaaagtctgacatgtatagctacccctcatagaggtttgtcagatcctgggttttgtgattgttctttcctctcatagctgaagatgtcttctactatgcggtctttgtatatggtatacaggtagtcccttcatggactggtgtaatgtaagcttaacaatttgaagctctgtcatagttcctcggtaggctgatataaccgtctgaacaggccacaatcggtcttggtgttccggccgctagcgagcctatcactatcaagaacccatctcccaaactcgttcctgcatggtcgcttaaatacccgctattatctcctcttcctaccatacaggctgagcctaaagaacctccgtcttcaaacgctccatgtcctgaatcaaccgttcagacgacctccagctacttttccttcatcccttcatccctgatgtcggttaatccggcgcagatcctatcgtttattagggacaggctactctacctgtgtgactccccggcatattacaacctgacgacctcattctgtaacgattattttaacccgaccaccccagacgacccggacgtcaggtacttctcgattgcagccagggctatatcaatcaacccgcttcatccgttgtggtggacaaagcttgtgttggatcataccgctttggccggagaggcagaaagagatgggttcgcaggtgaaaaatatgaggggaacgatggaatggtctcggtttccagtgcaaaatggggggagtgtgagtactgggtgttccactctttttcccttctgctatgtttccaatcatcttgcctgattgtcctcgcaccctttctcaatagttcttggcatagtagacgattgtaaccattgggaactacgggcaagaaacaattttttcgagcgtatgatctttagatttccagtccttcttactccaaatttctcttcggctctctcatcggtctacgattcgtcttcaacgcccatacctgcgtcctcgtccccctcctcttccacttccattccgactataccatcttcgcacgcctccacttctatctcgtcaacccccacctcgtctgccgctacgttcacgacttcacagggaggacaaggcaaacttaccttctcaccttcgacatcggaacttcactcgatgccaccgacggatggaggatggacattaccagatataaatgcttcggtctcttcatacattgagagttcaaagtcgttgtttggtgctaacgcgactccttccaccgaccctacttcttcgcccaaaacgacttcttcttcgctccgctcttcttcatccgacaataagatcaaacaggtcgaaaagcagacaaactcgttctatgaatcacaggtatcgtcagccctaggaaaagtagcaaaatatcttccattcccatttggtgggcttgggaaaacaccagacggtgaacagggaacaccggttgatacccaggctagagagaagaaggaaggagtcgaagagaagttcgagttagggagattttatagagcggttgtttcgcagtgaggttttcttcaataagcttcttttcctcgttagaataggttactcataaagattaaacactctgggttctatctgtcttttactcagcttacatcaacggggcctctgaaaggatgaggaaaacagctttgttttgcattacccggcatatttttataatcacaatgaacaaattatggaaatcttcacatatttatctagtttccgaggatgaggtcctcatatattctgctcactcgtcagactctttcttctccttctctctcttggatttgtctgccttctctttctcccttatccgagcccacatcttttcaacctcagcttctacaccttctacatcaacgactttgtacgtcctcaactttgcctctccacttttacccggaggggtgtcgggtgaggtctcgaactcaataggaaagacacctgattttagggaaagtacgaagtcggtgagagcgtgccaagacttgagtcgagtttccatctgagtttgatgatgggatgagttagacaggacaaccttggagggttcatatttgtctcgaagagcattgaaaaaaacaaacgtaaagaatgggagaagatgaggacttaccgagtcgcgcactagaccggacgtgctagacacctatcagaagatgatcaagggaaagaaaggaagagagaacggaaaggtcgaaccataaggttcagtgttcagcttccaaacgatatgcagagggataccgaacgaaccacccagaaaaacgtctctttcttctcttttggaatcccatcgacttcgattgccggatgaacaactttccattctctgggtcctagttcccaaccttcctgctttttctgcgctcctctttttccctttgtctctttggtcttaccggctttgtgggaccgccgattttgggccagatgtcctagattgagcataaactcaaactcgcgccagatttcctttccaacgaaacagacaacgctaggacgaaatctctgaatcttatgtaataacgcgggagctccagctcgcatgtctttctggacgcttaattcggatgcctagaataagacgtaaagtataaattgaacagaagagagaaagactagtaagaggtcgatttgataccaggacgaatgtatgataggaaaagatggcacatacagatgctgtcgctcgacttgttaagtttgtctttttttccaacgaaaacgattttcaggctacctgtatactcttcaagggtgggaaatatgctatataaggtaaaataggcttacaattcctatgttatagtcacccggtaatcggtgatcgtctgcgtaagtgacagtgtctttagtcaaccctgattgagagaggcattgccaaaaccgctttgtcattgcaggttattacattcaaatgagacaacacatattgagcaattggctttccgtatcctcttagagcatatctgaggacgatcaatgaacatacgtttgtggatcctcgataatgatgtccttcccgtgcagatgatagaccaggattgattccgcagaacaagactggtaaaaccgaaacaagtaccagagagtcagaacgagttggtgtcgtatcagatatactagaaggaacagatgacaagaggcagaggaagaaattatctagacacaccatcattaccttcagatatatagtcgctgatcggctttagatgctcatacactgaaggatcggcgtattttctagtgatattcttctttttcttaggcttgataatctctagaggcacaactggttcctcgtctttcttgatagctgacccgggaagggatgtactcgagcttggcttgcgttttagagatatccttcggtttttcgtcttcaaatcaggagaggccgctcttgatgattctcgagagaccgattcagagggcgcgggagtcaatctaacaaacaggttcgatgtgatttagggccagtatgtgtgtgagtttgtcgtgcatagagattcactcacgaagacgatcgactgcctatatcctgatcctcccgctttatattcatagcattacttctatcagccgggtctgaggattcatataatgtctggtcttcctcttcctcttccttaattttgactttttgcatcttgatcgactggatccggagagaagtcgggatcgcctgagattttggaacagctaaacgtgctggtgagtagctcaggtgagcaaacaggctagatatcttctgtggtttggtgagcgtcatcggtatctctagatcggagagctgcctctttcggcgggatatgataccctggacgtttcatagcaggtgcaatgtataaatcaagtattgggatgaaagtgatgacgtttgcattgccagtcacgtgtctcatataaggcagtgtcaaccctaacatatgttgctcgcttcatcttctccgttcatcttccttccctgggctctttctactcaaaacatcggacacacaaacagcttacgatggataccgacgagtgagctttagattgttcttctgtttagctaggccgcgtcatagaacaaagcgttcttatatagactgattcctttacggctgatcagatccttcatccctcgaatcatcggcctgttctatgcagagatggttcccgcccaaagcggaggatctagagtcatatgtctgtctctactctcttcaatatagacatgatcatttcgcactacgcacgctcaaacgctctatattgatggttcttactgctggggatgattgggaaaccagatcaagtgcccaacaatcttatctcaacctcgacatctgctcatactgcccgagttggaggaccaggcgacatgtctggctccttatcttctcttccttctgtgacatctgaatctgctcctttcacacctcaacctaatagatccacctctcgtgttcgctctcaacggacacgctcgcctggaacatctcctatggcagctcctagcatcactagcacttccaatccgactcataaatctgctcgaagaccgttgctcaagttcgatccgatagcagagtacattgttcctcatagtgcgctctgtaacaagctagtcactgtgacatccgggccgtacaaagtgatggggtttccagtttgtcaactggacactcctgaccgaaagaagggatacgatagaggacagttcaagtggaatgtgtgctgggtatttgatcgatggaagtatcagggaggcgagtttgacgcggtcgttaggaaaacagcaagagtgctgagtgagatggaggtatgtgtgtttcgcgtgtattcttcatgtcttctcgttcgcgtcctggatttggattcggttcatgatgaagggagtaaaggctcaatgagcactgattcatactcctaacggcgcgtaaaaggccgaatcgtcgttcttgtcttcttcggaaacaacatacaaaatttactctatactggagcagctgtttgaggatcttaactcctatggagaaaccagtattcctatagatcagagcaattcgattgaaatcaagatctttcctcaattaccaaagtaaggtttataattatcttacgcaggatcgcactttggatcaactttgctataaggcattactgatcatcctatcaacaatctacatattcaactactcgcgtccagtcctgtggccgttgaggattggcacgttccactaccgttgatcgatttggaaaagatgaaagaaccaaattgggatctcgctttattgaaggtatgtactcctcgagcaaaaacgtttcccatagtctatccactaggcgtttttaacctttctctatccccacttttgctcctagattgttcctcatataggttagttttgcccttctcgagatcatatgaaaatatgttctcatcttctgtaattctccatgctgatgcctcttaatcgatcttctccagacgggatagcgcatgtaaagtaagtatgttctgctgtgtcgttcttcttaccagttcttcctgataaacctctctcttgactgccccagaaaaattgctgccgctgcagatgtttcaacgtattatgcaaagatcggtattgaacatctcatgtactacgaagcatgtatgctcgtagacatattccaattcgcgaacatgtacacaatcaagcccgcgatcgctcagttggccgaggtcgatcatgtcattttagaatgcgcgccgtactgtatgaaggatccagatggagtcatgcctccttggcccacacttctcaagctatatgcggctcttcgaccagggctcaccctgtctgactggtcagagctgcacaatgtgagctcccttggcatcgatattcgccgattcgtttccttcggtgtaatcaaagggattctccgtagggttcaccgatggccggtctttatccaacctggattcactccgtcgaacaccgatccattctttgacgagtcggaaacacccatgggtccaggaagtcctcgtgagattcattcgaatttacccaaactagacaatggtttctacggatacgcacaacaacaacaacaccatcatcatcaacagcagcagcagcagcagcagccgccacaccaaacactctcccatgactatgatcactatgcacataacgactttcatcccagccctgtcagctattcttctccacacaatgttcctccaggaactatacccggcggtatagtcggtacaggtacaataacatccacaggaacgtccggtcttcccaaacaaccttcaacagacgggttcaactcttcaggcatatccggtcgttcactttccttgcctgcttctcaagggcgttctgtcggcagtctacgcggatcccaaggaaggtctcggatgaagttgatggacgagtttgaagatccgtggggttcttttgggtatccagcaggtttgacgatcgatcatcttgatggggatcataacagtgatcagttatgcgtggaattagggatcccatggggtggagaaagaggactggagaaggcgttggaggcttttggaaaggtcaatggaggaacgattgcgctgatctacaggtgattcatgttttccttcgccgtttctctaagcgttattcctttcgcttcaatacgaagacgtacatgaatcatgaactcgaacgaaacgagaaaaatggcaacaaaagacaacgttcaaagtgtcgaaagagtaaaacacaaccgaagggagacaacaacaaacacaacaaagaagagaagaaaagccaaagagttcaggaatctaaatccatcttccttgcctctatactatccacgccaacgcttaaccggagtgctcaacgatagtcgtgatcagctttccgtccttgacgaccgtcttgagctgctctggcacagctcgttcaacgaacaatccttcctcatcagtctcggggtcagggatcgagacgttgattgcgctacatttggaagtgatgatttcggtagctccgtcgatgcattctttcgagaggtagacctgaccggaatcagtggtatcgatcgtgacggtgggagttcgaccgaggacttgaatggtgaacgacggagaagacgtcacgctgacagaggaaacgaccgagtcgagcaggacagaggtcttggagcaggcggctgagaaagagaaattcgttgtgatcggtcaaggggggtcagtcgggatagagaagaattgagagcgaaaaagataagtaaaccgtactaagagagatagcgttgacttttcccttgacctggatgaccgagtttttgcatccatagatcgagacgatctgcttgatctcgacgtcctccaggatgatgttgttattattctcttgatactccttttgacacgatcaccagtgaacaaggcaggacgaacatgctcaacatcagtacaatgctgccgcgactaagcaagaggagtacgaagaatacggcgtagacgtacgatggcccatttgtttccctcgagctcaaacttggcaggcttcttgcccgccaacgacggaggcttagtcggccgggtcggtcgcttgggagcggctgtgttttcagcgagccggacacaagaatgctctcggtcagcgtttggtcttgttctctcgcgccatcgatgacacggtaggaagatacacgcttaccatcggtagcagggacaacgctactagcccttaactctgggttcttgtgcgtcatctcactcttatcaaccttcttaagtcctttggtgacatccccagagagctcggcaaaaagccctttggaaggaccgctcgcagggctcggggtcgaagttgtgccgacaggagcaggagaagaggaagcagcagatgaaatcggggtgggtgcagagggggagaaagagagaggatctttgccctgtaatcaaattcgaaacggcgattgataaggccaccatattctccttgaatagcaacatgtcgaacgccacataccttagggttccatgcaagtccggtggtgtggtactgcatgatgtactttcgaagttcctctaaagcgttgatgaaacttctgacccactcgacctgggtcttgtcactaaatagttaaatgaacacgtgtgccaacagttgagaacgaccaagtgagcaactgcaatcggcttgtccaaaatagtcaagatgtcacaagaagggagcgaacgattctttgtattctttgatcacacggtttccatagaaattggcggcatcctttaggtccccaacatacggtcccggcttgttatcctgtttgaacaaatgctcgtgcttagcaacttgctttatgatttatgggtagaataataccccataggtttgatgtacagcaagaacaactgaccagagtgatccagccagcagaggggattccctcagcgacggtgctaagatgattgaattgtggacttcctctattggcgtctttgatatcaccaacagaggtgagatgggtgaccatgggtcctaacagactgggcagcttgtcctgactgggcttcgtgcattgggaggcaagctcgatgaagtctcgctgagccttgaagagcaaagctacggtcttggactgtagaaatgaggtttcacaggatgtcaattcagttgtcgcaacgaagacgatatggcttgaatgactgtatgaatgaacaagatggagagaagaaatacgaacctgctcgaatgcgacatctccgatggtctcactcagcttcaagtagggctgtagatgatcatcaaaccatacatcaaacgcctttacgacaggggaatcttcagaggtgatcgtgggacccaaagaaggagcaggtgtaggcgcagaaggtgcgatcgaaggctcttgagccacgcgagccccgacgctgtctgccgcgtcaggcgagggctgtcggaggttggctgaggaggccctatagagataattcgggaatgtccaaggtttcaatcagagaaagagactaagctgttaggattcgaaggatcgaatggatatgattgagcaagcaaagaaaggaaagacggacgaggcgatggcgaggtcttccagtcgagaagtcgctgcttcgagtcgcttgatgatggtggtgagtgcgctgtctgaatcaaacaaacacaaacgaggtcagggccttgatagctaatatgtttccctccagaggcaaatgaagatgacatactctgtacgccggccatgatgaacgatacaagctaggtcgaatggacgagatgggtgagatgtggaaagtagtgagatggtggctggagggattgagaaacaagagctgcccaaaaaaaacccttcaaaaatcggattatctttttctcgctcgggcagatgcaaacgacaacattcaggcttcaaataacattcctctgaaaccgttgtgttctaattctttgtctgtaaatacaatatcatctatcgttcataaggaagtttatattgttcacttttctctcaacctttttcttcctcctgcgtcacctttcctaccccaccagctagcgcccgtatccggttcgacccagcctatcttcagcttgtctctctgatagcctcttccttcttgatccagctcaagatcccaattgatgttgtatccgtatgcgtaacctctgcatttcccacccaagtcttccgaaggacaaaagaacattggctgcggccgttcctgttgtgggtttgatggtctgattgacgcttccgacttgacacctgccggaagcctcttccgctgtttgcgccgtttcttgagaggagcttcagagttgagtgaattgagaggtacagcttggtattgggcgcagggtaggtgaccgcctgggcctcgctcgggcaagtcgggaggtggaaaatgacgggtgcgcgggttcgtccccggacgaggtgttgttgtgagaagcagagttggtgtagaagatgaggatgaggatgtcgatggtggtggaggtgccgttcctgttgaaggggagttgggaatgtagtatgttggaataggacgggatggaacgaatggggcaagggtagcttgggagaggacccattcggatgagaccgcagcagaggacgctcgactcttgagtagagctaagtcttgttctgtgagtggtttatcatgaggattgctgataaaataaaataaaaccaagcagagtatgcgtataggcttctgtgttagcaccatggtgtgtatgatgtaatgaggcacggacagaacctacgggactttgaagtgtatctcaggagggcgaagcgcgatgggctttacttccgaggctgtaagccggaaatctaagagagaatgaacagatccgaaagagattagcatgtctgtctatgtgttgactgaactcggacaaacgggacgaaccatagacctcgttcgaattgtcgtctttgctttctgctctttttcgcttgccctttgtcttttcagacaccggattctgatcggcatgggatgatccaaaggaagtcaagatgtggtcgagcatagctttcagcatgctctccccttcctggtctcgcacgaaaggttcctcgtcctcatcctcgtcctcgtcaccgtcactgtcaccgtccttgctctcttcatgctgtggctttgatgctacggtctcgtccgacggaggctgagccagagcatggtgcggattatgatacagaggataaatagatctacgtttccacaacccaaacccggtcagccctcaagtcctactgcaaccgaccacactgtactcacctccacactgagctcatcatgatgaacgacgaacgcggctgatgctcatcaacgacatgctggatgattctctctatagggaagaaaggcagaaggacggtaaccatggcaccggctgatatttgaatatccttaactaaacccacacttagacaacattgggcatgtaaaattctctccccttttccgcccaaagagattttttttcctctcactcttttcaccccccaaaagtccaacagctttcatctacacacacagctacccgtagcgatcaaccaaagctaccatgtccaaccaggtccgctcagtgaacctcttcgatttgctcggaggtgtgttcttggttctttttctttgaattttttttcgtcgtcttcggatggcctcttttttttttctttccttctgccctaggggtttggtgttggagggtgatcacgaatgttagaagcaaaagaagagcatgatggacatcgtgtactcgaacagggaggaattcacaacagcattcaacacagataccttgctcaggtagtggcaatggatgagatggagaacaatgtactgatcgcacgactatccttttttttactcttccaccctcatgatcatgcatctttttttttctctgccaactcttcgactcatcttttaaatctggtctcgacaacaaaaactctttgttcggaacaccacgattcctttctggttcccatctctttcctgctctcctctgtcttgtctacataccaacggaatagaggatgatgatggacaaggagtccttcccacccccaagcc

SEQ ID NO: 573 - DNA, 1346 bp, Xanthophyllomyces dendrorhous
aggcagaacaaccgagctcctcgagccccccgaacccagggtgaggagcctggatcttccaccggcgagaaggtcgacagtacgtttttttctctcttatccgtctacgcccaaaaccgacggaaagatctacacatgtgcattcagctgacggctacgttatttcctcttcatcagaccgacctggccgaggacctccccgaggtgaccgaaacggtcgaggtggcaagcgaaccggaaacggtgccgccgcccacggaggattcgacaggaagtccggaggacacgtcgactcccacaagaaggtcgagcagggttggggacacgaggacggttcgtagagaccttctcaagtgtcgacatctttttgtctctgtggctcattcgatatctcggtaatgattcttttaggtgccgccgagctcgctgatgagacccagggtgccactgacgccaaggctgatgctaaggctgccgtgaaggaggatgccactccccttgttgagggtgaggagcccaagaaggagcaggctcccaagaaggtccaggaggaagaggaggacgacaacactcaggtgggtcatggtcctctcatatcttctctccagaatatgtgaagatcacaagaaggagattttgtcggctgaaacaacccatctgtctattttctgcttcctcttcaactctcagacctacgctgagtacctcgccgccaaggcctctgccgctatcggtggtgttaccgagctcgctaagcgagtcgtcggtgactgggagggaggaggagaggtcgtcaagaaggatgccgacgaggctttcttcgccgccaaggtatgtttccttgtccatttttcgaaaagacgacaccaactgtgctgaccttcatcgcttcatcgaacttttcttccacaggagaaggagcgaaaggccgccaaggcccgaaaggagaagaacaccgtaggttccgtcgttgttctacaatactgaatgtatgtgttgattctgacaccacatctcccctgatcctgtccgacccattcgtagatcgccatcgatggacagttcgcctctaccgagcgacccgcccgaggtggtcgaggaggagcccgaggtggtgactcccgaggccgaggtggcttcgagcgacgagagggaggtgccccccgacgaggtggtgaccgagctccccgaggtggtgcccgaggaggacgagctcctgctcaggcccgacctgccgctcctgccgtcaacttggacgacaagaccgctttccctgctcttgcttaaatgcatcacttttcttcttaaacaacattttccttctcgccttctcccccccccccccc

SEQ ID NO: 574 - DNA, 58862 bp, Xanthophyllomyces dendrorhous
cccccccccccccacaaaactctcgtccttccttctttccttgcccttttctcttttcgttcttttatgctgtatctgatcttcgattgctcagtctctcccgttgacgactattccttcctacccaattgcaattcgatttgatatattcatctctttgaaccaccccaatttctgtttgaaaccacctaaatctccattctctcccagccttccttcccttcccctccccacacaagcaaacctcggcacgtattctcattctcgagttcggctttggtcttgttatatgaagaacacaaaggaccgtttttctttcctgttcatcagttcattctgaatttgaacctgaaccccgggacacgcacacttatgaatgtagagcaaacatgaccgcaagacctgatctgtaatgaaacaaggcgcatatacccaacaaaaacacgcatataccttatcgataggatgcatatacccatggctgagagtgtgtgtgtgagcgagcgagagagacagtgaggaaagaagaacaccgagtgtgacgagtgaagcgtctctgtaaccttccccggtctgttcagactcattcgccttttttcccttcaagtcccacacagatcgagcgaactttcgccatctctttctttctcaccctccttcctctcctctctctcgtcgtattctctctctctatctctttctacatactctttccggtcgtgcatggggctcccagtttcctatgtcaacctctagaacgacggactcatctattcccgctcgtacaactcgctctcaaacaaggaggtcttctttgtccaacaccaacaacgctagtaacataaacagttctcatctcgagtccgcaccctccactcctgcttccaattctaccttcaccactatcaataccgaacctacctcaagctcctcagtcaggtcgacagctagtcagaaacgttccagaaaacaggtcgaacaagaagatcaagctatcgcgaccaccgatctttcgtcgtccagcgctctctctatcggcaaatcgtccgtagaaaagggcaagaagaaggtatcgaccgtttcgtctgaaggctttcctgaatcaaaaaggttcgttctgttccctccttagagatgtctcggtctcttgaggatgaaaagtatgatgagatagacctctttgggtcgtctgtcgtgttcattcgactgaccctctcttttgctatgtggtctcaacacctggtccctcgacgttatgcatctctttctttctctctctgtcgacccggacatagacctcgacgctctacagcttctctccagaaccgtgccactacctcgacctccgcttctgattctactcccgacctcaaaggtaaaagtcgatcttcaacctcttcgtcttctcagaaagctataccctcacctcgaacattcagtctcactcgtaaacgatcccttcaatccgcttcagcccgtacttcttcttcttcatcatcatccaaacagactaaatccaaaggaaagaaaatggctcgaaagcctaggtacgtctcacggttttgtctccttccttctaagcagacaatgagttccacacaaccgagccgttcatacgaggcgcctgcatcccgagtctagttcttggtcgtgtgcttatcagattgatcctcccttcctctcctcgtcaggtcgtcggcaggcaaagtcggtcaaaagtcatccaaagggttcggcagcgccagtggtgagcggatctagaaactaattctgtccatcgcgcatacactcatccactgatgccaatctttctttgggtcttcctctacctcggatcaaggctctcgaaaaggtcatcacaatgatatcgaaatggacgacgatcacgacgagtccgagcaagtaatttccgagaatgatgaagacgaggatgaagacgaagatgaagatgaggatagggaagaagatgatgacgaggaggaggatgaagaggaggaagagtccacggacgcaggcactactgctatcaacaccaaagctggttctcgagccaccggcccttcattatctaaccagcctgctggctctaactctcaggcagagtcttcaaggtctgctgctcaatcgatggcagacgccatggcagccgccatgtacggtggagggttcggaggtcttggtggcggtggcctgtttggcggtggcggaggtggatatgcatccgggttgaccactcgactcaaatcaatccttggatccatcaggtcaaaaagtatgatcgtcaagctagccgctcttcaagaggcttccgaggtgttgagtgtgagtacagaggacaccctggcaggatactttcaaacagatgccttcgtcaaggaatttgtcgccatcatggcaggtaaagaatctccggcgagttcgccgaaatcgaaatcaaagttgtcgcaggattcaaagtcttctggtgcccgagctggggaacagaaggaaggatctaccacccatagagatgacgacgaagaccaagacgatgtcgaggaagaggaagaggaagaggaagaagatgaggatggagatgacgatatagatgaagtcgatcatgacgaggaggacggagaagatgaagatgatgacggagctggatatggtatcgagatggatgaagactccgaagacgcccaacttgcccggattcttgccttgagtgctcaagaggcttttggtgaggcaggagcgagcaatggtgccaacaactcgggcgccgactccggtgctggtgccgtttcaaatgggggagctttctcggctgctgaaatgggccaaggcgaaccgacggcggatcagttggaggctcagctgctcgcttgtagatgtctggctaacctgatggaggctttgcctggatcggctcacacggtggtctaccacggagcggtccctgtgttgtgctcgaaactattagatattcagtcgatcgatcttgcggagcaaaccatgagtgtgagtactttcgtatctgtttcttcttattttggccatgctttcctatgggttgtatcttatcctaattctttttttcctgctctttaccaaaaacgaacaaacaaacaaacaaacaaacaaacagacgatggaaaagatttcgcaagagtacccctcggctatcgttcgtgaaggaggtcttggtgctcttcttagtttcctcgactttttctccacgcacgtccaacgggtagccgtcacagctgccgccaactgttgtcgaaacatctcgcaagatcatttcaatatggtccgggacatcttccccatgctccgtagcgtccttggttacccggaccaacgtcttgttgaacaggccgccctcgccgttgttcgaagtgtcgagagcttccgtcacaaggccgagagcctggagaccctgctcgacttggaaactatccgtgcactcaacaggctcctcggtcccactgggggatcttccctcttgtctccagggacatacactcatctcttgagagcactctcgacagcggccagaacgtcacccaaggtgaccgtcgctttcctcgaagctggcatggccgagacgctctatcaaatcttcactggtatccttccgggctcgcatgacgaagaggagcaagggaacggaccgagtgggcagggcgtcggtggaggtttagcagacatggttgtcctgcaggctttggctcatcggccgaaggatcaggttgaggaagccttggggttggtttgtgagctcctaccaccgcttcctaaaggtaagtcatcattttccaaacacaacctatcaagcacatcttaatcaaacgttctctgatgatctcttcgttcaccgtatcttcacagatggggtcttcgatcacaagccgtacactgagagagcacttgctcgacttcttcggagtcaagcaaaggaggctagagcagctcgagcggctgctagacaatcacaagccacttcgtcggagaatctgctcgagtctcctgcgacatcaagtccctccaagaccatgccttttgcggctgatgacgctgccgatgctctcaccggtgacgctgatgccactgagacagccacccctatcgagacgccttctgggggaacggacgaccttgctttaccagccattcgggcaaagactaaagaactcgctcaggcgaacgaagctcgagtaaagttgctaaaatcccggtcggatctaacaacccggttcgtaaatgttattgtgccagtgctagttgatgtgtatgctgcgtcggtcgctcttcgtgtgaggagtaaggtcttggtggcgctgctcaagactgtgagccatatgacacctgaggagttaacagctttattaaaggtttgttcagtgatttcttatagacatatctctttgcttgggatcgccactctctatcacataaatacatctgactgtctggtaattttctggggcaatattctcagtttgtccctctggctagtttcctcggatctatcatgtcctctcgagacaatcctactcttattcagggtgcgcttcaactcatcgagatcctgctcacaaagcttcctcaagtctaccgatcttctttccggcgagagggtgtgctctatgaggtcgagacattagccggtgaagaattaacgaccgcgaaggctgcagctacagccatcaaattagagcaggatgattcactctccgtacctaaaacaaccccctcgacaccctcagccaccccggttgctacggctgcttctcgtagcgcttcttctctcttcacgcccaccatccctagtggttctatcatctcatcttctatcaagcctcccacaccagttgatcttcaggatcttaacatccttcgtgctcgggtattgaaagccaagacgaccaccgccggccctagcgagaaagcaggcgaggatgaagcggatcgagagctagagaagatgaagtcgctggtagagacaattgtggacgaggacgcaggggtgacggtcttgaaggagacgatctctgagctagctcggttgtttggatctgacaacagctctgtctcaagcttcgagctgctcaagagtggactagtagacggtctgttagagtgcgcaatcattgacggaaaaggtatgttctaagtctcttttgtcgagctcggatgaatatcggatacgcttggctaacccattgataatgtctacctgttttagcctcggcaaaagttcgccgaagcctactcttcgaaatattcgctaaagaggacccaaaaacttctgtttcacctttgactattttggtcaaacgtttgcaggaaagtctgagcaagatggagtcattcgaagttactaccgctgtccagggatcggcagcagatggtgagttatcttcgtactttcacatctgaagaacgcatacttaatcaattggttcgttgtcgtgtgattctccagattccaggcgaggatcgactgcgcttctcgcgcgacagattcgattgaaacttgtcgcagaggacaccaccgacgttcccaagcctcactctgtcatggttgtttccattcaggccattgcaactttccaggctctcaatgattatcttcgtccaagactatcagcgccggccaatagaggtggcccaggtgggcttggaagtgggctttctgctatgtacgcagcctacgcagccgctgccggtctgtcaggtgaccaaacatcaggtcgaggacttgctgcttcaaattccgacaacccgtttgcggccggtgcgcttcgatccactttggcttcttcaacagccccgaccagttctgaaagcttctccgctcccactgccggctcggcgtcatcttcgaccaagcctgataaagattctgaagagactgacaagcccagacggcgaagtgcccgattgagtggacgagctccggacgaggaaacttcggtttctactcctacccctaacccagcttcaacatctacccccgcaaatggatcgaactcagccagggctaggtttgatcggttactcagagaatcggctcgagagctgatcgcctctggagatcttccatcggcgcttgaagccgccttgcaaagcccagatatggactacggagatgatttcgatgatgagggtatgtattcagacgaggattttgatgacgaagatgtaagtcatgaaattttatcattctgttctttgccacagctcacttgcgcgcggtggtagcttacttcggggttccctgtcttcttctgttcttgttaaaactagatgtttgatggtgatttggaggatgctcttcctcaagtggctgacaaggctgttgatctgaatgttgtcgctagtaagtggtagatgatcctcattgtctatggggtttctatcttgaccaaaatcccgtttcttcatttgtcacagacggctccaaaattgaggccaagactcccgatggcacccgtgttgcaacgcccactaatcatgattctggttccagtacgtcgactggcgcaacttcttccgtcacccgtccccctgcctccggtgggccaggaagctcgtacgcctctgcattaaaggcaaagcctaccgattggcatctcgagttttcgatggatggcaaccccatcaatctcgatgccaccatctacggtgctgtcctcaaaaacgaaacaaagaacggcgtccagaatggtcttcagaaaggaatctggtctggagtgtatatggtcaacttcaaacgggtgccaggtgccgcacccgtcgaaggtgagttctatcttgtaggttatctcttcatcccttcttgaacttccattctgactgtgttttttctctcaacgttcagatcgagattcctcacctgagccctcgaccaaggagccttcttctgctacagccgttcccaactctgttccttcagattcaccccaagccaagattcttcgacttttgcgagttttgcacgccttgagtacggaagctaaggaactatcagcatctatctcgacatccaaaactttatctgaaacggcgtttgtcaataacaaactgaccgcgaagcttgggcgacaacttgaggagcctatgatcttagctaggttagcgcatatttagactggtttctgtgttattagcttcacgactcaaagcttacttcgagcgactttggaattggattagttcttgccttcctgattgggcgttggatttgcctcgcttcttccccttcctctttccgttcgaaactcgattcaccttcctacactcaacctcctttggttacgctcgtctcattcagaagtggcagagtcagcaatctcgtcagaacgatagccgagccgatgactcttacggcttcctagctcgcttgccgagacagaaagttcgaatctcgagaagccatcttctggagtctgccatcaaagtgtttgagctttacggcaagccaagttcaattctagaggttgagtactttgaggaagttggaacgggtttgggtcctacattggaattctacgccttggcgtcgaaagagtttggacgacgggatctcaagatgtggagagatgcagacgcagaccttccaggagatttcgttcatcgaccgcagggtcttttccctaggccttacgctgccgatgaggcgagtaagactgatgtttacaagaaatcgtacgtttctcttagttttccttctgtggctgataggaatctgaccctattcgggatttgtttataggcggtcacaaactcaacttttccgggtgttgggacaatttgttgccaaagctttgcttgactcccgaataattgatatgtcgttcaacacgatcttcctcaagtatgttctcggtcaagaagttgtgccttcaatcgaaatcctcaaggctgtcgatcgacgtttagggatgtctctgaacaaagttcaagagtttgccaacgccaaggccatgctagtcgacgaagacctatcagaaatcaagttagccgatggatcacggttgagtgacttctgtttggacttcactctcccgggatatgatatcgagctcaaggagggtggggggaacatagcggttgatatggataatgtcgaagagtacatagaaaaagttctagatctcacccttgtctctggaatcaaaactcaagtcaacgctttccgagagggattctctgctatcttccctgttcgcgatttacaagcgttttcggcagatgaagtatgttatgtcttatatcttttagtgagcgctgctgccgattgtctcggattgaccttcctttcctttcctttcctagcttggcatacttttcggaagcgcggaggaagattggagtgtcgaaagtaagggtttctcttctcgttcatccgttgatggtgaaagcctttatagagatcctgaaaactcatctttgcttttattgatagctcttacggaggttatgaaagccgatcacgggttcaacattgaatctcgaacgatatctaacttaaccgaggttatgtctcaatacgatgctcctactagacgagaatttttgcagttcgtgaccggtgctcccaagttgcctattggtggtacgtatgtatctctcgacttgttcccttagcgaccaaactgacatctggctttgaacatcttcatgtatctccataggcttccgtgggttgaaccctcctctgacggtcgttcgtaaaggccatgaacctcctcttaaggcggatgactaccttccatcggtgatgacctgcgttaacgtgaggactagcaatctggttttgatttcatctgtcgtctcccggatttagactaaatcttgctttgtgtctgccttaccgtgatgattcagtatctgaaactgcctgattattctaccaaggagatccttcaagagaagctattcacggccatgagagaaggagggggcagtttccatctttcttaaacaatctgattctctcattcttatatctctctgccatcctctactatcgtcttgaaactatatatctgctctgcagccccatctgtatcgaatcgcttcttttttctctcctcttctcttctctattttccttctatcattccgtactcctccccgccattgaatacagctgtatggtgtctctgtcatgactgttatgcgtttgatgtatcccagagcctcgaaagaatccaagaattgcgcctaggataagatagccgaaagatgaacgtcgtccgtaaacggatgtgtcacgactggccgtgtctttccattccatctttgattgcccctcctactcgatctcaccccatccgacttcaacgacatcgcatacacccatccagattacttgtcctcaatcacttcatactccccaaagctatcagccctgcatcatcttggtttgagcacgacgatccaatctcgccaagggtcaatccgtccttatgtacacctatcatcgtacgcatgattactccttttataccgtcgccaccagagatctcgaccggtctcggtctatactacatgatatggcccttgatagctgatttggtattctgcatggttgttgtgggaaatattgtctctttgttaagaatcatatggtcagatcaccatactcgtagaacttcctccgggaactaggtcaagagatgttcaggtcgatctgacatcgaacaccatccgggcaggagtccaaggttttcctgctctgatcaaagtgcgtatgaagaaacagttgctcttggctttgttcatttctcaaaacctttcaaagatctttctcatattaactctttgttccttgggtcatctgatcaaacaagggacgactggtggcaccgattcgaacagaaatgtcagagtggtttctagaaggccgatcaggcagccgaaagcagcgaaggaggatgacttctggccctccatcgaacaatagtagtagctcagaggactccgttcaggcaaaggtatccaaagtatcaagagggcctgtgacggaatttttggataaggaagatctgaagaggacattgtcccctctatcggtaagtctatgtcttgggtcagagcatgatgttttagtatttctcagaggactgatgcttttgatcatatcgatcgaaatctttctttgtgtatctgcttgcagtctcattccgcttcatcgttcgatctcttctcagcggcatcccagccttcatctcaacagcaaaggtccggcccggttcatcttgatagaccgggagcgagccgatcgtcttcacaaggatcttcagatgaaatttggacaacccatgagcgacaaccctcagcttcaaacatagcgagtgatgagggcgaattgattgatcacccgctcgcctcttccgtcggctctatctcgggcttctccgatccttcctcggacgactttgtcagaacagacccagcgttattaaatccccatggctctcaatcgatagcgccttcgtccgctaacgtcacaccgtcgagattcaatgactttcctgcgctatcctcttttaccagatcctccggtcaacaaccctcctccacccttcctctatctgcgcgttcgactgaatcgtcagagtcctctgcgtccccctcgtcagcctcttcaacaggaagcggtccaggcgtcttgtcgaatgatggagatcttactccggatgcgaatgagcctcagtcaaggctattgacgatccatttgatcaaagccgagggagctatatgggcagggttagtcattgtagggcctgtgggagatgggaaggatgagggtgggacatgggccatggactggacaagtctggtggcgcttgctgtggagtggagtggaaccgatgataagagggatgaagcgttcgaaatgctattgttcgttcctttctgttcaatcccagtcaaacctttcaatgacaagtccaatttatggcctattatgatgcaaaactctgaccatccggtttatgtatatggctggatgtgcctcaaccagatacgcgcatcgagcaagccaccttcctctggcgacgttccatcttttgcagattttctttcctctcccccagctgtctcagacgacgtcgtctatttctactctacggcctcagccgataaatcctattcacctacttcgtctaggcggtacccagacgctcgctaaattgtacgtcattcaagcagaacgttatctgtccaaaacgaaccctcccgatccgttgccccatcagcggtatccactcgatcgtcccaaacgagactttacatcttcccttatgggcgaagcgagcagcgcggagagtaaggctggacttgccaagagattcatccgtgtagcgagggatcttgaccctgaggtcgagctgacatccgaactggaaggcttcggcgaggaagctctcagggaccatcgaggtggggaagcagaagaatggagcagcggtgcaagcggaagcgaagagggtaggaacagaaggaggcgaagacggggagccgcaggaagaggccatgctgaagggagaggaggcaccaagtcagacaatggggtcggcgtcggcgtgtacgtttttggaggtgcgaccctcgtgttggtcgttgctgtcggaatcagctggtggaagaaacccaaagctgattaagctagccagctgtcgactttgacagcaggagtttgacatttctcttattcactctacttctttccccctcgatacaccttcttgcgattcctgtcattttcaagatcgtccggacaatcttggggggttttactttgtataagctagcccttgtactgtttaccaactttgcctacgacctcgtcttttctctcattcgatctgtctatcactgttgttttccttaaatttcacttctctctgttatatcaactcgttcattctctcttctttctctcatcttttgttcgtcggtggtttcatctcgtttacatatccttatcaaccgatctgtaactcatcctcgggggtttatcatctctttcacttgtttttcttccaatactattttgtgcctacattcgatttgacctcatgaccaatcatgcctaatgcgagaaagaagtcgagaaaaaagcgcacacgagaacccaatcttctcggaaagttcacaaattggcgacatgatccatggtataagacgaacgcacgaaggacgagagtatatcaaaccgacgggctcagtacctcggtcgcttctcatctctacctccgtacccgccgggtcctccgctatcgtactctcttttgtatcctccatccgaaggaggggcacctccaccaccgaatccagggttggaatatccaaggcctccaccacttcctcctcggctgttttacgtgttggtttggtttccgagcgatgagcgatgagcagaacgaacggacaagggaaaagtgatttaataatgagaagaaaaagggaaagggaataggggataacaagtgagttttccttttctcttcttcggatgctcagtgcttacgatgggtttgagcaaaacagagaagaaatcgaagtatcgaagcaaaacaggggggagtgaaggaacagaaagggagaataggatatgaggggaagaaatacttcgcctagtattttgttttgttctctcgataagggcgtgataccggtcaggtagaaggaaataaagaagatgattgagagggcacatagccggaggacaaggccgaaaggaacagcgtgaggccttccggcttcgcatctcccaacaacaagagccccaactttgattgatctccccgactcgtgaaagagatgatagggagaacaggaggggcctcgcgcccagatattggggtttttcttgcggatttgcttcggttctctcgtgtcatagacaggtttcgattcgtagtatcttggcgaggaccttcccctacgcgtgtggatggtaggggtgatttggttttacctttttcccgggaataggaaaagcctcttacctctccataggcttcaaaaagaggatagcgatattgtggatagaaagagagggaaaataggaagaaaagcgaaaagagcggaaagagaaatacttaccttcctccaccatagccacctcggccggctcgatcgccatagccactatctccacctcgaggttggaagccacctcctccgtagccacctcgatcgccgcctcctccagagaaaccacctcggaagccacctcctgcaaatgtcaagaatacactaaagtcagttcgtgatacttatttgagggaaagaaagaacgttcttgcaggtgcaaagaagatgaccaaccagatcctcctcctcggaaacccccacctgagccacccatgccgcctctgaagccgccaccagcaccaccaccgcccattccgccgcggaatccacctcggaagccgccccttggcgcaccgaagcctccgcctggtggacctccactgaatccgccgccaacagagtgatcgacaggcttgggcttcccgccgagaccaccacctattcgagctggcttccaacccttcacggtccgtcctcgctcgacgtccactcgaatgttctttccttggatagggatgttctcggcgtccttataggcagctatgaaaaggaggtggcattcagatcaagaaggtaagttagagagaagctccttagcaaaggacaaggtaatatgagagggaaaagagcaaagcaagaaccgacctttcatgtctcgttctcgctcgtacacaacgaacgcgtatcctctgctagtgccctttttggatcgaacgattcgaacacgctcaatagctccgtacatttcgaattctcttcggacgtcaacctcggtggcttttttggactacagaggccaattgggtatcgcgaacacgaacatgtcagtgaagtaaagatacgtatggaaattagatgtcaagatctcaccagacgtgagatgaacaaggttttgtaaggatcgccgacagcttcagaatcatcttgaggatggtctgtatttaaataaatacgcacgatgaattagtatgccgactgacgaaaacggacgagaacaactcttgaaaatacaaaggaagagaaaagaagaacagccttacaagaactctctgcgttcttcttccactcttctttttgcttaagcttctcttccctcttgagctttcgcttctcctcctcgcaaagggtaaaggcttccttctttttcttgacaggcttctgtcctccgttcaacgcgtcctccacgtcctgttcttcgtcttcatcctcatcctttccggtctcgagccgctgctgctctttcttcgcttcctcggcctttagctcggaaaagatggcaccgacaccggtgagggtgtgagatctgacgacattaggatccggaccgacacctttgatgtaagggattggtggacggggggcaaatagcttgagaagatttgggggaagaagggccgtcatggatgtatgtatgtggactagagtgatggatgcaagcagcagagcaagcgaagaggaatagcagtggtgagtgaatggtgggtgtgtggcgggctgaagagggtgagaaaaagctgtgtaatacaaaatgtatctaatgatttccgaaagtgaatagaagatatttgtagtatcttatagattacaaacccttgtattcgacgtactacaaagttgtctaatggtttcgtgtggagctcttcctagtgggcccattacaagagtttgtagtcatcgtccgagaaatctgtaataccaacaatcgagaacatccattaggaatctttgtagtccgcctattagagaaaccttctagatccggccagacacccaacccggccagacagctcgcgctcacatcagcgaacaccacagaattgacacctcacagctgacacaccaacaaaggtctctgtccttacacatcctttagcgtcgattgatcacatctctactcatcctatcattctcttttgctccttcatacgcatcattgtcgacagctcttcgtctctggcagctaatctcaggccatgtccacgccaatctcgatcatcggcctcaatccactcacacttcatgcggtatccactttgtacttttcccagccttcagtcggcccctctatcatcaggccggtccttcaagtgctctttctatctgatccatctttccacccagctgttccctcatcgaatgagccatctcatcttccagtcattaagttagtttcttctctctccctttcttctcgttcactcggcctgccgcggcatttgtgggctactagatagaagcggctatatgcgcacgtctgtcttgctttactgaatctcctcttccttcttcctcagttttctactctctgatagctttcaatatatgaagaccactctagatcgagcatccgttccgttatcatcatcattatcctgtgccctgacagctctcgaggaaaacacgatcgtcaaactgaacggctatcgtgttgagacccaagcggacggtcaaaagtcagtcacccccttattcgccggttctgttcctcgtttcccatgcagacactttactcgcagtgactgagttctctcttgttctctttcagatgtatcatcttatcttctctcgaagttctctctacaagctctcctaagattggtcatccactcccggtcgatgccgtctcccacccgacagccgtcacaaatactttatcgtcttcgcagcgcactgctgacatcagccattatcattctcgatacgcattcgggaatctttccttcccttccatagcatcctcgtcatcctctatgatgcatccttctgttcctccatcgcttgcatccgataggtttgtggattctcgactgtacactcatcaacccgacgttctacccttgtctgtcaaatatcgtcccgaggctgcttcatcttcggtccaaccttcccaacatacggccctgctcattcctcgattaccgcttgaacttcaaatgatgatcatctcggaatgtgttgagtcttaccgactggacgacaagctgacaaaagcaaccgtcgcgcgaagctgccctgaacgagagcgaaatgaaccatcattagcggaaaaatcgaatgtactcagaccgagcggaaaccagtggtattctgttggcacgagcagcacttcaaaattgagttcaaaaccattggcgccaggctctaaaccaagatggttactgcccatgttgctcaaaacaagatctgaggctagagagtttggcgagttcgatgaaagccctgagcccatcgagttctggaactcatgggagccgaatagattcaaaagggtggcagagccgagtccggaagaagtactcgcccgacgacaggaagaattaagaagtagaacccggtgggccctatccctggtttgcaagacggtcagtaccctacgcgccagatcaagtgtcgtaacttcattgttgttgctcaacaaagcatatgatttgtctttcttaagtggcacgagatcgccactccgttgttgtatcggcacattcatgtgacctctctacaggcctatgcacttcttggccctgttctgtcttctccgacccgtggtcccgccctggtttcctggatcaagcgggccgtgcttcgagaagtaccggctgactggaggaacccggagtccgtggtcggtctcgttctcgacaatctgaaggatctggaggtgctcaaaatccggttcgttagctcggagagtgcgatgtcaactgaagaaatcattgggggtagaggcatgctcatgctgggcaaggccgtctgggaagcatatccaaaactgaatccgaaagtgtgagtctcctgagatagctgtgactccttccatactctgccgaattctgttccttgtctgatcatttggtgtatgctcttgattgatggatgaatcagctatcaccaacatcatttgccgacatttattttgcctacagtttccaaagcatggcctcgtttacggtcgacatcgtccgagttcatgttttgcttgactcatcctagtcgggcgatgagcaagtttcctaatcttcctctaaagtcacatcgttcgtgcctttctttgtttattcgattgcatgtatccaaaggttcttttcaacatctaacgttgctcttctttttctctggaaaacctactggacattagacctcaccgtcatcgtcgcgggcgacccttcgagattgtaccgtcttcctcgacttttgctccgtatgacggcgaatccgcacctaaagtcatttgcaatcaccgtccggtgcgcgtctcatgggatggccgacctagtagaacttttactgggaagggaaccgacgttgaggtcgaaatcctcaatggacgtttgctggcacgaaaacaaccagtgggtcagtcggaagatcgagtcgagccccctagttctgagcggccggcaggataggcgcagggatagggacagcgcaaacggaatggtcgacgaaccggaagatgaggtcgatcacgaggacgaagaggagggagaggaggaagagcagggcgaagagagttcgttggatgtgagtgatcttacgatgaaccagggcgaaacggagcaaggtcagttggaagtcaaagaggaggaagtatagagtgtgtccatacacaccgatctagccgtctttcatcttctgttcttgttttctttttcttcttctcttctcttttcttttcttctcttgcttttcttcttgatctttgtgcgatctgggttacgcgtctacatatttaatctcgagaaacatttccttccttttcttttcccctcaagtcgatctccaatgtagccatctactcatatatatatatattcgtcttcctgttgtgtatctaacattatgcgctttgtcttcgtccttttcaaacacatcgttttctccgctatctgctacctttctgtctggtcgtctgtctattgttctgcagagtccttcatctttcttgaacgctatgagctatatatccctcctgatacctaattttcgagtaatacatatatggccacattcacaactatagctcacaagccatcaagttctatttgaagagccattttgggatttccacacgccgctgatgacgtgctcgacttcaatcaattcaagcctctcatgataatcatcgttatcaccaccgttgtcgtttgtggtgggaagagtgggaatcagtgcggtggtaaggacgacgcctgaaggggtctgttgaggcggtacgatgggcaactggatttcacggaacatcatctcggacagaggcggaaagatgcgggataccgatccgtggacactcaatatcttgatggccagttcggatcgagactgatttgaagaagaaagatcaaatgggggagggaggtcgaaagagagatcagagaatggaagagaggcaccaagcccgatgagtttcgagagggattctttgtacatccatagtcggactaggtagattctttcctcctcttctctttttccgggctgttctgaagatttattagcaaggagcgagatggtagttctttcggaaggagaaagctttttgagggagtagaagagagtgaatagagatgagtcgacaagcaagaattagagagaagtctaggtggacatatggataaacagaatcaagcgaacctgatcgtagagagcttctctcagatcaaaagtactctctatcccgtctggtagatccaacgacatgacgtccactcctacttttcctccaaaggtaaaggcaccgatgacccatggtccgtcgtgagagatgttatagtcaaatggggaatcggtcgacggggttgccttgtgtttcagacaggatatgcatgcgcgcaaatcaccggaacgtcggagataacaaagaatgggaagaagaaagaatatcagacttgattatcttgtactttcaccatatcaagacatcaaggaatgactatgataagagagaactcgctatgtacggacgaccatgagatcccaacttgaactcgactggtgtcttgacaggaatcgtatgctgcaagacgtatataggaagtaacctgccgacaagtgatcctggatgaaggaaccgagccgagccacaggtcagtcattgcgaaaacaggcctcccgttttcaaggagcgagcgatgaatagtggattcactcagcgcgtctgatctgtggcggaaacgcttgatcctaacagccgaaggttcatccacgaagtccaacagttgattgaatgtctgtgtttgtattgttttaattgttgtcgtatatgtgttggggtatttcgttatcatttcgggttcaatcatcagatcgattcgttatcagacagtataaaaccccagagcaatgcattgaaatcaataaacgaaatacatttataggcaacactcaaaaaatattgcgttagtcatgagaaaacgaatcgtcacctcttgagaaggatcccatctagagacatcgacagcgattagtctaagcggccgagtgagcatcgcttgtcagagaacaggttagtggacagtctgctcaacgagtatgacctcggacggatggtgagtgagggtctgtaggacgaacaagcaggatattgactacgagtgaatttcaatgaatttcgaacaatctatataaatttacatgaatttcaaagcccagtccaaacacaccctgcccaaacaccttctccctctcgccttcgtcccttttgacgtgagcgagtcgacacttgtgctgttttgttcttccttccttccatcagctcgatcctttctttattggttccacagacagacagatatacagatcacttcggtagccacctcgccttgctgaactgtctttgagagcttgctcttctgttgcttccgtcccatcaccttcagctcgctcgctctgccctcctttggttttttcacttcgagcaatcatcttgaaggtcccctagatattctctatctttttaccttccctatagtcgagtctcatcatgagtgcggttcctgatgatccaaaccaaggtggaacaccctacgctccatcgttcacctccaatagaccacccaacggaccagtcagatcactctcttctgctgcaccttccataggtagaagacagagtgagggccttgctggcccaggggcatcccgtcaagtgagcgatccaaacaagagtcgtactcctctgtcgttcaacactggtgccaccaacggtcaaactctagggcaaggttctcatcagatcgtctattcttcctccggatcctctacgcccatcaccacttcttctccctccgcgttcattccatctcgtgctccgccgccgccgccgccgtcgcagatacaaacccaaaacacggcgtatagctcctactcttcccgaccgaccatccaacagcagtactctcaatcatccggccctcctaccaaccatggagctcttcaaaccggcccgtatgctggacatccggaggaattttctacctccccgagctcgtactcggcacctcctccgtcatccacttcgtatcaggacgaaaagccctttggtccctcctcgccctacaccaccgaaccggcggccctgcccatatcgacaccaaactcaatgccgccggtatcggaaaagaaacagtctagggaacggagtgcgacgttgggcaaaggctcaggatcaaaggaaaagaaaggagggtttctcggagcctttcaaggtacgttcttgtctcttgccgtcctcgcttcattttgtactttgttctatcgtcgagaacaattgaaaaaagcgattcaatgagaaagtcgtttcatccgtcccgtataggctgacgtctgtttttcgaccttcttgcttcaatacatccgtcatccctgtcttcattcttacaatcggtgtcaatcgacggtacattcatcttttactccataaagacctcctcggaagccacaagcccattactatttcgacgccttacgatcctgtacatcttacgcatgtcggcttcaacaacgacacgggagagtgtgagttcaacccatgtttctatcagatccttctttcaactcgagctcatctgtccttccttccttcgcttttatctgtcgcccattgttcagtcaccggtctgcctagggagtggcagcagttacttcaagaatccggaatctctaggaccgagcaggagcagaatccacagctcgtacgttctcgtttcattttaaaagaaagaaagaaagaagacaatgttcattctcacatgggcaaatgccgaactgatcttttcctatcaattctgttggttcctctctagatgcaagacattgtcgaggtctatcagcgagtcggcttgggagatcccacacggcaggattcagacgtttgggacaagatgaagggagccgcaggagacagtcagacgtgggaaccggaatggcaaggcgagggtcaaagtcagcgagagcctggcaaccatgtacgttgcttgaacccctgtttttctcgtctgacctctcgtgctaatgtgtttcccatcaaattctggggtatcaacccaagcgatcggctccctctcctcccggaggagccatcaagaagcaaccttcacagcgatccgacccaccccgaccagctccacccgcgccgacaaccaagcagtcgctccctcctcgtatctccccctcttcaggtcctgcacccgcgattctcgaccgatctatgtcccatcgagctgctccgacgcaaaactacgcgatggctccttctatgctggatcgatccaagagcacgcgatctccacctgtcgcttacaaccaccctggtttacaaaagtcaatgtcgtcggctggcagggtaccccagagtacatcgagcgctcgaaatggaagagaaacatcaaatcagccgccctccgctggctcggcagcggcagctctgtcaaggcaggccagtaaggccaaggaacatcagttacagcatcagcagcaacaacagcaacagcaacaggcgtcttccggaacggcgacacctcgacgaagagacaagaaagacaactcggatgtcatcgctcggctgaacgcaatctgtactgatgctgacccgacaaagctctacaggaacctcgtcaaggtcggacaagggtacgtgcaagacatctcatagctttgtctacttggtcaagatatcttgtctatgaacttcaactgatatcctactctctcatcttgactgtctatacttgacagtgcctctggaggagtctacaccgcttaccaagtcggaacgaactattctgttgctatcaagcagatgaaccttgagaaacagcccaaacaggatctaatcatcaatgagatcctcgtcatgaaatcctcccatcatccaaatattgtaaacttcattgattcgttccttcacaagggcgatctctgggtcgtgatggaatacatggagggtggaagtctgacggacgtggtgacatgcaacttgatgaccgaaggccaaatctcggccgtcagcaaagagacttgtgcggggttgagacatctgcatagtcacggagttatccatcgggatatcaagagtgataacatcttgctcagtatgacgggggacatcaagctcagtgggtcttttcttgtggttttgtcgacgtttctctgttttttgttttacttccctctcgctcacacgctcctctcgccacgttgtcctctctttcagccgatttcgggttctgcgctcaaatatcggatcccgcacatgccaagcgaacgacaatggttggaactccttattggatggctcccgaagtggtgacgcggaaggagtatggaccaaaggttgatatctggagtttaggaatcatggcaatcggttcgtcaactttctcacatccttcggttctctttgttttactatcgagtagtgaaccgcagggtttctgatttccggggggtcttatatctttgtagagatgatcgaaggagaacctccatacttgcaccagaacccgctcagggcgctctatctcattgctactaacggaacgcccaaaatagagaagccggaagatctgagtagcacatttagagattaccttgctcagtgtttagaggtcgatgcggggatcaggccggacgcagttggcttgcttcaggttcgttgacaaaagtttcatccttacgttcatcttctcgtagataaagactgaatttatcttgcttcctttcgtggcgtttacgcttcgtgtctgtagcacccattctttgcaaaagcagagccactccgcacgcttgcccctctcatcaaagccgcgcgagaggcgtctaagaagtaaaaggcttagatattttctggtgattatcttttggagcttcaaggaaagctacgacgtgcttgagagacttcttctctttgttcttcgggtcgctccctgccttctttcttttctctccggccgctgaatggttcggaaacgccttgctttcttgtccctttgcttccttacttcgcatgcattttctcgcttggctttgcttccctgtggtttgttgcaggcccttctgagcttctctgtttcgtcgctgctacttttccttttcttcttctcttttctcgaactttttcctttctctcttctacatacccatacccatacccttaggttggtcggtccattggtgaaacgcttattattcgaaccaacctcttctttcctcgttcttttctgactttcctatatccagtgtcggttactttcttctctccgttgtgtcattttgttttgtttcatactgaactatcccttctttatatgaactcggtgacctcttctactctgaactctgttctctttggagatttcttctgtctttttctttctctttccttcctgcgttcgtctttgtcttctctttcatattctgtttgagtctcccgccttatcatctctttgggttccctacgttcgttcttccatgatatttccgttgcttcctttcgttcgatcgatcaggggttgatcagtggcctcctctctttttgattgcctggtttttgtaccttttttgtgtttcttccaatataacagtagccgtcaggtccgattgcctacttgggtctttattgcgttctcaattatcacttgcgccagacagaaacatcgaaggacatctggttagatgtctctgaagatggaagagacagagaacaagtttgagacgcgtcgatctcgtccgaagagattcactgtcttattgaataccagatggatctaaagacatgtccccttgaatgatgaaggagcatatcgtggtcggggtttgagcagagaacagatcatgagatgctcaatcctcggtcgattgtgtagtcgacgagacgccatcaaattaggcccagccctgactgaattggagaacacacatgagcatatcttatctgtcttcttccttctctgttctgttgattcttcaattcccttctaatttcagttaggagaacacaagggcgttcaaccacgctttgcacgtaaagcagccttctttccatgacctggttgataggaattgagtttaaattcgattgtgaaaaggaaggaggtgattagctttggttttttcactcaattcgttgatagatccggcagagaaaactcttgaatttggtcgtttggttggttgtaaagaccgctcgaacgaccatgaaggaaggaagcataggcgtaggtgtagaatgggaaggatggaaaaaaaggcaacctcaaacgtacccttcctggtcgccaactttcctctggcagctctagcagccttgatctgttcccagagctgatgtcgttcgttatgccatgttttcggcagatcgagaatccctctcgtcatcttgtccgtcattcgaatagggtaccaagagctggtttccggtcctcgaagcggctgggtcaggtagtgaagacctgtccgaagattgagcgggttatacggggtctgaaggacggttgacttcagacgggccaggtcggccagacgagtgagtgtaggtggtctcacagacatgctggcgaggatgaggatgggtgttcaaggtgtgagtgggatgatgaatggatggatagatagaatgtagaacaagtcggctgccaagataggaattacagaaaagattacaaacctgaggaatgtctcctaatgaaatgaccgagaattctctaatcaaattcttggctgttttccctcacctgccatctttccgtcccttcccattttgacttctgcttgcgcctttcgtcttctctccatcctctcttgatctgcttaatcaagaccagaatctgaataaactacgtacaacggacaccatggataacgatactggcctttcaaggtctctagaagatcaacagcagcagcagcagcagcaacagcaacaacagaacaagcagtatcatcatcaggatttagaccgaagtatgtctgctctgttgctcttccctctctgctctttctttcttctctctagtttcttgcctccgtccctcgtcactctcatctctatcagagatcgatccttctgctgtaagagcactcttgccggctcttggtccgaaggacgagctttccaaacgatgggtaagctttggatcagattccatctgatcatcccgcctgcatggctcggatggaaggaatcagtgatggtagtgcttgcatgtacggtcttcatctgtcatcaaagtctaccgcctcaagctcgggctagacatcacttagcacttatgatgaaggtgtagactatcagagcatacggctcttggcccgatagctttaaagatagctttgttcctcaaggagtgctgggttgatcatctcccctctcccttgcttcgttgggatacatcgtgtgtacttggaaacgcttggtgtaacagcttgactgatcgtgtcctctcatctttgtgactcaactagttatggatcagcaacaacaaaaacctaaccgatcatactctcacacgtctcagtcgtctgtaacatcacctagtgggcaatctaacacgagccattcccattctcagtcaacttcgtccaaccgaggaaacggctcattctctcagtcagattcatataactctgagtcaccatcttatcaacaacaacaacaacatacgtccaactctttgtcagaatctccttcaatttcagatactctcttgtctcctccaacagcttcttcttcagtcgcgcaaatggatccctcgactcatcaaccataccgaccgagtatatcgtccaccttcaattcaaatttcacttctagtacttattctgaaaatgctagacctagcttagaaaccagagggtcttcaagctcagtggtcagtctcaaaacgagcatcaacgtggtcggagttggtcatccatcggcgtggcccgagatgggggatgggttggggcttggtgttaattcaggagtgggtggaagcggacaggggcaaggtgtgccggtgcaatttgatgagggtgttttgaggcaactctgcgatctagatgtaagtctcaataggtcttgtcactgaagagaggaatgttggaaggaaggaaggagaatgttcatctgtgatactcttttcgggtaacgtcagtgcgcacttccgttattaaccgaacgaataaagcagtcgcttgcttcgtgtaaagtgagtccttcttgttatttttttttcctttctcatttgatcttgtacaattatgaatcgtcctcattttgccccgctttgtctttctttcttcttcctcatcatcttcaagcaaacatcgacgttcctcaagtcgcgcgcgcgcatagaagaaacctacgctcgatctctgggcgaactcggacgagatctgatggatcaatattcccgaagtgaaggcaaggctgggtaagaattactattcgctttcctcgttctagtgcatcacgtcggaaggaatcgtcaagactgataggttcttggatgtgctggatctcttgtcatttgatcatcgacacttcggcggaacttttgtacagatcatttctcaaagcatacaacgatacattgcgcgtgaatgacttgatcgctcaacagcgattaaagtatgcggccaagttgaatgagatgggagaagagttggtgtcgttgggtaaagagattgaaaaggcccggaaacaggtttgttacctctttacccctaacaaagaacggcatgatgctgacaagattgatttccatcgtttgctcctctttccttcttgtttgatgtctttgcttttgtagcataaagagactggttcgagatatgaacgacagcttcaagacgcagatctcgctatggagaaggttcgtcatcttctgtgtcaatctaggcgtctgttacgtcgcgcatgaacctggctaacccatcctcgctaaatttttgtatacacgctcttcaggccaaaacccggtttgatgttaacgtagaagaactcgagcggatactgattctaaaagagggtggtaccatgaaggatgcaggaatgcataacgcttcaaactcgaacggccattcgagtgaaggcagaaagaaactcgggaaggcaatgatcggcaagggggcgggcttgttcaaaggaaagaaccctgctcaggttagttcatctgctcgagtcaagtcaggctaaatatacatggtttgaagtcctttactaacctctctcttctgtatagatgcaacgacaagaggatgaaactcgacaacgcatgtcacaaacgtccgatgccttccgtaaagccgtgttggacgctcagagtatcagacaagagtacttcaattcccagctccctaaaatcctccgagttcgtcttgttcacatatctatgcttactcttccgagctacacttactctctcgttctttttgtgggcaccttggcctgtttgttttcttggtcatgtctcggtagcttttgaagcagtgcgcggacgaactagacctggccacacaatatcatctatctagatatgccttcctcgcggagagcgtaacattacaggaagggatgacattatcaccaatagacagcactgacggtaagcttctcatccggtcgctaaagaacgggagggaatgacagacgaggtgctgacaaatatgtcgtatcgaatgatcgtctcggccttgaattcagcaggacctcctgggttaaaagcaattgcagagacgattgataacagaacagacttcaagacattcatgaccaactttgtggttgctagaggaggcgtacctagaggtccaagacgggaaggattatacgaagaaggctacgtatgttgttcttgctttcctctttcggtgtttgatatattgctcatccggttctaaattcactatccacatttttatctgattgggggagacagcaacctgcactgcctcctcatgtacagcattcgcagacccaagtcgtacaagacgaaggcgcaaagagtggcaagcagatatttggattcgaccttacagaggcaatgttaagggatggggacgaagtcccgaaaatattggtgatgtgtactgaggcaatcgagagcaaaggtaggtccgactgttgctaaagaaccagatcgactcagtttagtggacatcgatattgatgtttattaatcgttcttttctcataggtctgacgtctgtcgggatctatcgattatcaggaatgacctcgtccgttcaaaaactcaagtctgcgttcgatagaggtcagttgattatcgtctctgtaccttactcgaaccatccaatgcttatctttgacatgtcttgtcccttcccattcagatgtggatctggtcgatttggaaaacgatgatgcgtacgcggacatcaatgtagtatcaagtgcgctaaagttatggttccgagagctaccagacccactgttcacctactcgctctactcgaactttatggaggctgcaagtaggtgttttccttcttgtttctgagcctatcttcttccttcatggtcgtcaagaagtgtatgttaatacttgagtcatcttcgtcgccttcacttaatctgtcttctcaagaaatcgaaaacgatcgactaaggcatatccgattgcacgaacaagtgaatgagctaccggatgcaagttatgctgctctcaagtttttcatggctcatcttcacaagttagtctctcacatctcttccggatatttcttcctccagtactcgccaacctaattttctttctggattgcttgaatgaacaaaaagggtgcgctcccatgaaaaagtaaaccagatgtcggcatccaatctggcgatcgtgttcggtcccacattgttccgccaaccaccagaaggcggtgggggtgatggaatgtcgatgcaggacttgatgagcttccagtgtcgagcggtcgagacgatccgtgagtctttgttacagttctattttatctcgatcctttcttgataaacatcaatataatcttacatttccttcgtttccctgggtggtttttggactgcgtatgtgtatatagtcctcaagtacgaagaaatcttcgtgtgatctgtcttggttcaattctaggttatccgctctccgcttctctattttcgactaccttatttgtttccagtctgtttcttctcgttcttctttttcctctcttggtctctcgtggtcatcgttgtttctatgttgttctgtctttacaacccagcaaacctccattgtatactcctttcggtttttttttccttatgtttcttctggacccggctacgtcgaagtatccatacgaacttttcataaccttccttgtctcgttcatgagacgactctcgtgttcctctcatattccactttttttttcagcccaagtacaaaccttccacctattctatctacacctggatatccactttcgattcttttttgttcttcagactgccttgttcgcaaaacggaaacagcgagacttggctatcaggagacggtccgactagtcgtccaacctacccatcgagatatcggttagcgcgcgcgctctttgttcgagctaggtcgagcagataatatggttgtcacatcgaaatcgcttggagcaggcgatatggatcctgatgggagacttaggtagaggtaggaaacacatggtcatgtcatagacgagtctcattgccgttttcatggcagcgactcctttgtaaattgctcggcattctcgcgttcggtttggattataaagtgtattttgtaggaaaggatctaggaaaaaatagaagacagtctcataggcagagttgactatgcatgaagtcggatttaaggactgaaggctatggttgaagtgaaccttcgatcgaggtcaatttagagctgaaatcatgatatcgttggaaacatttttacgtcctctagttctttttaatattaaactgacggatgcaatagaaaggtgtgtttatttctggagaggtgatggtgttgggtagaagaaaaggggagagaaaagaagtaagggaggcaatggatctttaccacatcgccttcctgacgcctgggaggtttcctttaagggcttccattcgcatcgaaaactgttgatgtgacgtttggtcagataatgaaattttaagatactctcttagcttggccttttctcgatctgatttttttgagcagagtacagaagacgcacccttgtaagcttgaaatcccggtatacagctgattcaatcgaagagggaagtaaacaccccaagcaggaaagaatttcatgtcagttctttgaaagcgatgacgaagggattctttgtacttgttcatctatcctccgacagacttattcagattcaagatctagatccataacaagactaacccttttgctttccggtcatgatgcaagtcgacctgattcgagcaggcgagctgttccccggaagtaacgacaatcgctgctgagctcgaattcgaatcgtgtctggcagggttgtgttccgggcgatgaacaagaaggctcgtcgcatggcttctgtccgctcaaacgtctgtcgggtcttcatgtctcggaccactcgggccttcaacccggtttggactttttttttcagatagagtaggaagagagggagaaagcggagagaatacggagcggtgagcgttctggtggcaatccggcgagtcacaagaccagaaaaataaccccatgctcactcaaaccgtacagacgactagctgtaggaaacattgtggtggatgagaactgtccgaatggttggtcgtctagatggaaggagtaggtaatgggcaggtgtgggcataagcgcagccggtggttacgcggtcgtccgtaaccaccacctccagcggactggcccttccagcctagccttgctggaaggccaccgcccagatcggtcgagcacatatcctccatcatcatcatcatcatcaacaccatctctctaggttctctctcgtttgtatcatggtgcgttctctctcgtctctcctttgtcttgatagacgtggattgagggtgcagaatagtacgtcgtcagaaacatctggtgttgcgatggcttcgactcttgggggatttggttccttgtccatcggctcaatctctttcattttaccatctctcattcttttgcttcttactttcgcctctttgttctggtgtatctaaatcatcttacttttgtgtcttctcctttctttcctggttggcccctcgttgtgaaactcagtttcgaaattcatacgactccgacgctaccacgttttctcctcaaggaaggtcagtcttagttctcggttcggatgtttgacctgatgagcgtgaatgatacgtaggccacgtaggtgcacaagagtttaacaatcacttggttcaatattggtgacaactttgataatccaggctccatcaagtcagcaatgtttactgttatatgtttgctagtggacacgcgctgatatgatccttacgcttcacaggttgaatacgcccaagaagctgtcaagcagggatctgccgctgtaggtctcagatcaaagaaacatgctgttcttctcactcttaaagttagtctcggacctattcttcggctgcgttcattcagatcggtttgattggcgtcggcttcgaatgcttgctaacgtcatggcgcagagatcgacaggagaattggcatcataccaacagaagatgttccgaatcgacgatcacgttggaatcgccatcgccggattaacgagtgacgcccgagtgctgtcgtatgtctctattttatctttcaaggtgttcgggtggtgtagctcgaagagtgtcgcagaccaaacaggcgtcaaaactgacttggctgtgttaaattggtttctgacaactcagcaactttatgaggcaacaagccatgtcttcaaaaatgatgctggatcggcctatcccggtaaatagattggttggagctatcgctgacagtatgtcgtccattctatcaacatacacacgcccatcttttgacgcgtctcctgtcgaatatttctctctgtagaggctcaggtgaacactcaggtttatggaaagcgaccttatggagtcggcttcttagtaattgggcaagacgtatgtcaaatcaatatattccttatccagatgtatctcaattgactcgcgcttattttgacatctcatcaaacacgagtaggagttaggacctcatcttttcgagttctcaccatcgggtaattctttcgaatactatgccatgtcgatcggtgctcgttcccagagcgcaaagacgtaccttgagaagtcgtatgattcgttcccggaaggtctgttcgcactgtgtgcctgatgcttgtcatattgcctgtagagggatccaatcctaaccttacacctttcttctccttagccgaccttaacacattgattgaacacggtctccgcgccttaagagagactttacagcaagacaaggagcttactccgctcaacacttcgattgccatcgttggtcctgtatgcaccgacgagcctgtgcctgctcagcaggcaaagggcaacttccgaattatcgaaggagacgatgtcaaggtattcctcgatcgactcgagcctctggtagcaccaggacaagcggccgcacctgtctcggctccttcagccgctgaagcatcactaacggataacgcggaggcagcggcagcaggttcagctcctgcctcggcaggtggagacggagatgtcgccatgcaggattagatagaaaaaggtttctcagatgaagtgtgtttcagtgttgtttttgggaagtaaaaggtacacttttctttctaccgatcccctattgttatagttctcttgtcttgatgattcgttccccagactctcgagcaaagaccaaacatcacataggcgcatttttgagcacgtggctaaacatactggaagagaaacgagacctttgtaatagtagaaagcgatcatatacacatcgaaagagacgttctttgatggtgatcgaccgatgaaaaagtttggtagggaaaagagaacaaaatcaaagggtatacgatccatcggtcgactgaagacaggatgtgtagatgagcgaatgagcgatcgaataaggtatattctaagtgacagaaggatatacaagaggaggcatgggtggaggaagtagagaggtatcgataggactgtgtagatattgaagttgaaaggggaaagtatgtggatatgagtggggatgcaagtagaaaggtaagagcatgcagaaagtagatgtaccaagagtgatgtgatttgagagagaagatcccaagaagagagaaagcgaggccaagaacaagaaaaaagaaaagaaaaagagtcaaacaaagcaagaaaaggaaaacagaaaaatggagcgatagaaaaagagaatgaaatcgagatagtgtgaacatcaaggtgttgaacaagccgctctgactttcgatccatcgccttcttccgtatcggcatcggaatctacccccaacgtgatagtcacctggcttccgttcttttccggattgaagaactcgagctcgaatgagccatcttggtcgtcagactcaaggtcgtccccgtcagaagaaccaatagagagcgcaggcagagagagtctgtcgattaacgaggtaggaaggtcgaaaggcagactcggacgatttatcaacggtggcggtgaaggagagaaagaagtgtgatggttggtagcataggaaacacgttcagtcaagagagtgtcggactttgtttcagtttcatcgtcaggcagatctgtttcatgaggacgcttgagtcttcggagttcactcatcagccctttgagctccgaaacgacgtcatccatcccactcgtttcatcttctccgtcaataccttgcttcgagttctccctctccttcttggccaacagaatacgttcttctctgctcaactttgatggaggtcgatactgagagactggcgcggtatcgcctatgaagacttcctcccttcctggcgggggtagtcggagttgagattcaagatgtagagcgacatcgtctgctaactcggtatctccttgttcagcctcgtcgagtcgcaacagttcacgtcccggctcgtcagcacctgtcatacctgaaggcgccaaaacgtctgggggcgatgatgattggttctctacgatcgagtcaaccaagccattaggaatctcgatccccatcgaaattctccctcgttcccagatcctaatcaaccctccaagttcatctctcatgtctaaccaccatgagtcccactctccatcagtgccggacgagtcaaatcctccagggataaattcatcctgggctttggcagctaagttggtctccagcagatctacttctctccgaagttgttcgatccaatctcgacgttcttgcaactttgtttttgatcgaggagcaaatccctcgttgtccacgtccttgtgttcagcccaatattgttgctgacggtagattcgaagctccttcccaatttcttctcgagcgatcacaaatccacgaaaaagtacttcgacctgggtttggatgtcctcccacgacgtgtcaactagatccttcttgagcgcaagcaaagaaactagggtgtaccttctattggcgtgcaggccaaagaagtgagtcaacaaatgagcgtgagagagtgggacaagcattcggtctttctcctgcctttcctcttctgctgtctcctcttcttcctctgcatattctgaatgagacaaccgaggtcgatagtacgcaagggatgaaggggaggaaagtgtatgccgatggcccgaacagaacgatagcggcgtcggtcttggtctcggttgactcaagtcggcagagtttttgtggacttcctcacgtctaccaagcttttcctcttgaacctgatccattggtcctcgcctgggagtgtatgttcctcctcccagtcttttaggactcattcgagcttcgtactctttcgagcgagacaccgtcattgacggagaagaggtcgacaattctgagcggttcaatggatctacaagccccgaatcgtgtaagtcggcattgtcggtaatggtggaggagatgaaagaattgtcatgtgaaggagagtacgttttgtatggcaaggtttgtaacgaacgacgtttgaggtagtaaggtgtcgagcttgtagcgctgccttcgcgagaagacgctgacgcagacgagcatgatcgcgtcaattcattcagcgcccgagatcccgcagagttcggagaacagagcggaacagaacaagtagtcaagtcagcggagacatccatcgcgggaggtcgagcgagccgcgtcaagaacggagattgcgcatcgacagggatgatggttgctgctagtggtgagggagacaacgtcggtagaataggagaggccgatgcggatcttgctcctcctttgtctttagaaggcgtcatatcaagaacgatagtaccggacgtctgggttctcaaccggattcttggtgaattttgaagatgtgcgctcatccttggatggacacctcctgaaaaagaccatgtctgtctcttctgagctcttgacgttcttttgggcattgctgtgaagtgagaggtatcttctaatctcctttcagtttcatcttcctctccagagaaggacaacatcgaatgtcttttccttgaggaaccagccctggggggtgaactccagcgatcaacgatgtgtcgctcgataggttcaatagaatcggcagcggaagtggcgcaagaagggaatctcgacgaacgagttggtgtgttgagacgggtaatctcgaatggacgtaacgacgaaagacgaggtgacgtcctaggatcatccagatcggaaggtcttgtctccgcatccgttcgagatgtcggtggaagaagagggggaggaacgtcgaggccgtacatggttgagagcgtgcctaactctttagaagagacgaaaggcatcaggtttgtgaatgcttcggaagagaggtgggtgagggtggaaagggtagagagcaaagtttgccttaaggtgaggtttggaagagaagacgttgatacatccttagacattggtctaggaagatcagagtttgaaaagaataacaatacagcgtcagttgtattcaatattactcgtaaaaaggaaaatgcactcacaaatctcgatctagctcgtagacactacctaaagcggcattcatgcttcgatcataagcttctgcttcagaaacaagcctttccagagacatcagcgcatccttttgtgcttgagagatagatgacgacagtcgaggagccgggactgccgcctttgcatttcctgagctcgagaagacaaacgtaggtgaacgtttgatgattgatcgaccaagaatatagagacacgaaagaaggcctatggccaccattgacaatctacacaccagcgacccaggcccaagagccagccaaaaagctgcggctaagatgaaagcaagggaaagcatagttctctgggaccgattcaaattcagattcagtgatgccgccgacgacgacgagtatgctgaagaagacagagacgagaatgaagtggaactggggtcgttgggaagctccacactttcttctcgatctgcttcagtctcttcaataggatgttcgaccgcccgaggtaaggatgaacccatcaatgaactcgagcataagatgtattttgacatttctgctagatctttacggtttgccatcatctttggtggctctatcgatgatctctcaagctgacccaaggaataaccaaaataacaaccaccgctgtgagtaatcatggcagagactgtatcccggatatctagaataagggcaatgaaatgactgagtcgaatgcaatacttacaatattccgcggtgaaccatccaaagacattcccaacaagacactccaaccgactattaactcgttccctatcgagccaatcaatccagacccaacgtttcttatctcctcggtttgttgagttttttcttggccatattcttcttcatgattggcatctgtttcagacgcaagatccatcactcgttcgacgtcctcttcgatctcggatgctgtcagattaggacccatccccgcacacgtgttgatttcggaagatagccgtcaagagggaaaaaaaagatgagccttggagaagagcaaagactatgagtacacaaagatagatgcaaacctctgagatattgatccaatggagacccttcataaatcacagacattgatgaatggctgtaaaaaggatcatccgtatgcagcctgacattcgacggagcacacaccgaaaacaacacgagggaggcaatggtgacattgttataattcaagtttatagggtaacgacaaggttacggaagttgtaaccataccagactcttaggatcataaggacaaaagcaaaagacaaggatcaagattaacaaaagatccagacttggtagactatgctatgggtggcaaaggggacccgtcttatatatcatccttagactccaacgattatgcataatagaacaggtcatagaaggtgctagaagcacctgcgctgggaggtcatatacctgcatgttgatgtaatgagagagcataaggaataccgaggcaggagaaacaacagaaccaaaagaaggttaccggggtgtaacatttaggttgtaaggctcggtgtttgagttagtaacccagtggttacccatggttcacgtagtgtcacttaggctcatactgagacagaccagactatccgcacgatatttgagataagaggtttctgcaagaatctcagcttgaagaaaactcttatccaagaaggcgcgagagtgtcctcgttttatatcaggacccctcgcgcgtttggtttgtaactaaagatatacatatgacgagcctagagaggctcgagatcacgagaactaaagagaatgaggcatgaaccatgcaaactagagcatgatggaaaatggacgaagaggcataggggcttgagggaaggaacagcctgtaggggtaacccacgaatcagatcacgtgatacttaacccgtatgtcatgtcagggatgtgacctgagtgttacaccccggtaatcttcttttactgctgtttcttctcctgcctcattattcctcatgctttcttattgtatcggcatgcaggtatatagtcatgtagcgcaggtgcttctagcacatcttatgatctcttcttgagcgcaacccttccgtgtggtttatctagtgggcgtgccgtctttattcagtacctctagggttttagaaatgtatacaagacgggcatcattccccgtccatagcctagcctcttaagcctagatcctctattgattctcgttacccttgtccttatctgttatccacttttgtgtctcactatcgtgatctataaatcttattgcctccagcttctgttctcgatcatcctagtcaaagagcctgaacttcatactaccaatcctggaaaccatcgcggatcacatagttcgtgaccttcctttttacgtgcatagctcacacccccaacagttctctagatcgaccaaactcttgaagagaacatcatcaaccgagcgctatgtcaaacttcaagcccgctccatccgtctctgtaaatagcacatatctcaatctctgatagcaactctcgatcagtacctccgtttgggaaggaaaaaggaagtgttgtgttctttttttccttcgtctgaaactgtactcttaaactctgaaatgtgaacggaattagaggagatgattcattcgttatcggtacatgcaaaagatgggtaaagaagcacaaggtaaagcaaaggtagcaagcaaaaaaaacaagaacggagctgagcgaagcgaaaacaatgtgagcagacgagaagagcatagtgcgggaagatacatgtgggtggaacaaacagaaatgtatgatgtgacgaggaacaatggaggttgaaagttaacaaaatgtgaaatgaatatagttcatgaaggagggaagggatgacgaaaatcagggaagggactgcctgacattcatcaagattgcccttgtttttaataaagtgaaagaatagagaaaaagaaaggagatctacttgtgaagatatggtcttacgaaatctatacattcaactctcgaatttgaatcgatgagatcctatccacgagagtagtcttgttctgaggatcggatcggaccatatcactactgacagactcaaaattgtcctcgtcaaagatagcgacgacaggtgcagacatagagaacgaagggtacgggtattcctcgacctcgtcctccccatccgatgaagatgcgtataatgagctcgttggtgacagcggaggagcacaggtcgagtcgtacactgacatgatcgacacagggctgaaggagagctcgaacgcggcgactgattctcgcaaaggcgatggacccctagccttcttcttagcgagaaggatcgaagatggaggcaggctcttctcggcttcggcctttttgtgctctctgtcgaacttgcggatgagcttctgaagcttgttggcctcgttctgggtgaactcgagattggatagatgtcgggtgtacgtaggcccaagatggggaggcaggacgtgggccgaggggtacgcagattcgttacctgctgagatcgatgacgggcatgccggaaccgagaccgctcgagtgtggataggaagagtcttcgcacgcaccggcatgatcggagcggacgagtgagaaaattgtgaaggtcgaggaagaagaccggcaatcgacaggatgactctgatctcgctttccgtcttggctagtagtgctcgttgggctttgaggattgaatgggcggtgaaaaggaggtacgtcggaggaagactggaagcaaagaaataacgatgataagtacgcatacagcaaagattgaaatggagagaaagatacacacagctcctttagaccagtaagaacccatcttcggtagcaatcgacaagtttggacctggcgagtcgcctgtgatgcttggccgtcaccgtttgagcccacacaggctctgctagctttcgcacgacaggcgcaactggcataatgacctcctttgagaccgatctggccatgaggggggcaaggagggacatgaaggatgatgagccgttgtctctctttaggcgggacaagctttcttgttgagcgagtcgagcactctcaagaacgtggtctctgacagcatccaacattcgaccggccttgctctggtgaaggggcatggtgacagcggaaccatcgatgagaagcacctggatctctccggcaacggtaggatctgccgagggcaggaaggtaacttcctcaacgatggaagagatccaagaggacgagtcgccggataagatagtcgagcaaggcaagtcattctgggcacaagtgttggcgagcgagatcagggccggaggggcgggaagggagtggtaggcatacgggtcggccggtcgatcgttgtgctctgcttttggaggaggcagggtgaagaggattgtgggagggtttggtgccgaggcagaggcaagggggatgaatctaaggagcattgcttgtaagattgagaagattggggaaaggaaatggctttcgagcggatagggggactgtcggaatagacaaaggatgtttcttcagagagtctggatgatccacaaccacaaccagatgtgcagttttgaacaggaagtagagagataagcaggtgtccggaccaaaacgttatgggatagatgaatagtctgatcgtctgatacggatcgagaagtctaggaggatggtgaagcaaacaaccaagattaaaacacaaaacgagacaaagaacgcaaagaaagaaagaatgaatgaaagtggtccgaagaggaaaagaagaaaagatatagtgtcgagataagtatattcagggtttttgatgtcgatccgatttaagcatccaattctcttccaccccggctacaaagcccgggaaggccaggtctcacaaagttaaccccgaggaaaacaaaatctgagttcggaccggccgggtcaaagagatttcctacgtcagggctgagggacagcgggacgcgagacggatgtgtcctcacaggcgaacaccgcggaacacaccagcgccgatcagttacccgattttgcggcgattcattcattcgggtatgccatatgatggtcaatgtctcacccatcggatgaaattcaagaagaggcactacgcgccaggtctcggcaagcgatgcggcaaataacaacaacatatcacatcgatacaaaaagaccgtaatctctggaatccgtccccgagtgcctgcaccggagagcacatgggtagagacttctaaatccgaccgtgtccacacgtcatcaccagtcccttaatccacatataactgaagatcttatactctacggttcaataatcatattcctaatatcatcccgtatcccgcaactctataagatgatgggaggtaaacgtatcaaaaaaagaaagaaaaaaggtaagaaagaatagagaaaaatggaatggaaaagaataggaaagagaatctatgtgtatcaaatcgtgtgttgatcatgctaccctgtctcaaaaaccctcgtctgctttgacgccttctttggtccgctcttccaacgaagagacagacgtgcaagatgatcctgcagagttgttcatcgtcagtcttcctccagacgggatgtatgatgaaccggttgagctcgaccccgtgcttgacgtgctcgtatctaaactcgaatcaacaagctgaatcctctgcggcagggcaggcttcgtagaagaaggtggctggctcaactgacgaaggcttgccaagtaagctgggagttgtgctcgaggaggaagcggggcaacagcttcgaacgagcctccatccgtcaatagttcatctagttctcgcttcgaccgaacgctctgttttacccgaagaaagagagaagcaaacacggttccgccgtcgtattacatcagaatttaaatacccgaagccgcctcgaataagaaaaagagcgaagagagatgaaacaagcgaggaaatagacacacgtagaaccaccaccagtattttttatcgctccatggaaagagataaacactcgtccctagttcgcgtaggattctggcgcggtcgtcccgagatttgcattgagctttcagagctagcgatgttaacgggacatcggtgataatcgacgtgatcccccctagtttgttgttgttaacgttaaaacccattcccagtttaagaaaataagccagtcgcctttcctctgttctctctctgcccaggtgacctacattcagcagccatgatcatctctcgaggattgttgacagtcctactcgttacaaaggaataaagtagaccaaaacccaagtaaatacgattactttgtaagatcccgaacaaggcttgggatataacaacagtaaaagttccagataacataccaaactcccaattctttacccgctttcagcgcgtcctctctaaaccttcgaccggacgcgtcaactagacaatcaaacatcatactgaacccatcgacatagtcccaaaaccattctcgggctattccgacagaagcaccgatatgcattcgtttgagctcagcaggcaagtattgccaggatggaagaataaaagacggatgccaaattccaaggatcaatcgtggatagattgttgggtgttgcgagataatcttggagattgcaggaaataccttgaccggatctgagtggactttgatgtcgatctgaatccgaaccaaccagccttttccgatagatcaagcttctgtctctttcaccccatcaagagtgaaacccactgaaacgtacgttgaattttacatgctggttctccggctaaacccaagatgagctatttctgttagctccaatatcttttcgaatccagacccaattaggatacactgttctcaccttcatcaagagctcgatgatctcatcaaacaaaggaataggctggatcggttccttcttcgtccgggcatgcttcattccatcaacaccttgccagttctgttctccgattaaccctttccccgtggttgttctgtccaactttgcatcatgaaacatgagcacatatccgtcctttgacagatgaacatctatattgagacacggttctcacacactgtcaatcatcgagcagatatagaggaagatcaagaaagaaaaaagaacaaaccactctcgatagcatcagctccttctctgatagcagcctcgaatgaagcgagcgtattttccgctttattgtgtgaagacatagattcaccatattagcggataacctcgttcttggcctcttcaaagagtatcgaaatggaaagaaaagccactcagggctatcttcctgaatgaccgagggtgacgtacgaaattcggcagacgctctacacaacattcattccaaccagatcaaacgtaaaccaaccttcaacatccgaacaatagaaacatctcccaaggagagaaagaaactaaaggcaaaaagaagccgctatgcagatctcgactcaccctcggtggccccatgtctctgggtagtagctctcactcatcatcctgggtaatggtccaacggtggtgtatagcctggacagaactacgtcggaacggttgctagccagccgacgacaaacaatcaaactgagcgggatcaacgtgattaggatgaggtatatggtatgaatgaaataacagccaatgtgtctcgggtggagaagacagagcaaggagagatgcctgcaggatagtttgcaaggtactgaaggtgacggctgagaacagaagcgaatgtgtctatcttcggttatgagcgataacatgatgactaagcaaggcgatatgacattaaaaacatcatgtataacaagacgaaggagaagagaagaaagatagaaagggaaaagaaaggatagatacaagatagtaatgccgacagagtgaagatgatataagaggaaagaatgagaacgacagaaaagatgaagaacatatcggctatgttttcttcttcttgttgatcttcttttccgacacgggtgtgctcgaacgagagaccgatgctttgacttcatcgataggtcgcttctacatttggaaaagaacacgacaagaccagttcagaagcctcaatcagacaaacgaagacaaggaagaactggctgagcagaagagaacaaaccttggtcactttcttaggagctgtcttcgagtttttctcctcctcgtccttctccttcgaaatcaacgtcaggagggtctgacaacgtctttggatctcgatcggggttcgagatttaaggaaccaatcgaatctgaaagaaatataccaagtgtctagtaagcatatgtaaacataggattggggcgaataagatgaggagaaactataccggaagagcggccagtccccgatgtctcgcttgatgagttcatacacgtcctctcgttgaatgccccaatgttgaagcctgacaaccaagaaccgatcctcctcctcggtgtactgcttccctttattctggccatatgacagatgaagctcctgcatcgggaaattgtaagatttgaccttgttcgtcaaccgacgaccttgctcctctcgctcggcaatcttgttttccccttcttcgatcttgtggagaagcttttcccaatctgtgcgcatcaagcaaagtcggtaaataaagccagcgatcacctcaggaaggaagaaaagatgaatgatactatgtacggaccagagatttctttgtatcgctcccagaacactctggcataatccctgacctcttcgacctctttgttctcaatctctgtcacgattcgatcgatgtctgctcgaccgtacttggcggaaccattaatgaattgctggaagtgtcgtttcgtccagctagagaatccttgagcggcaagctcgtctttctcagcttcttcctcttcggtcaatggttcggctaaaatcattttgaaggaaaaaatcaaaacgaacgcaatgtaagcggctctgaagacaagaggaatgtcaaagataaaccataaaagacctaccagtgtcgatgaggttctgggcttcgactcgtcgagcctctcggctatcgtgggtttcattcgaattaagcccatccggaagtggaacttgcacttcttgcgatcgctgcgtggtttcggtcggacgatagaagagcaagaaaagaggaatacatctttggtgagctatgcatacatccacgagaacgaaaaggacatgatcagacttctcaccttgaacgcgttggtctcttgctcttggagctcctgtagacgaggagggtagaattgatgatcaagactaaacagagaagattatttcgagaacatagtcagcaaaaaatctgaaatgtatattcaatcaagaggaacttacatgttcagttgtttgggggctcgaggaacttttggcttgtcagccttagctggtccgacacgcatagcctccttgtaatatccatcaacggagtagtttgtctttcgttctcgcttagctggctcaatccaaagcattccaattccctttcgctggagtggtttgatggaacaacgacaacggtcaagcagaaaagcgacaccgaatgtatccaggaagagaaaggcgtgatcagagccccgatgaaacagaaattcgaaaacagagaacacgaaccttgttctggaaatcttctccctcccagttggttaccatactctcagatttaaagttgttcaggtcatccaagtttaatccgtcatacttgcttgcaagctcggccgtcctggactctcctcgttggatgatctcgtcgatgtcatcatcgatgaccatactaccaagttgatatgaacaatcagatggtcagtgtttacactaagaggtttagaattgaaagagctgtagtgcacgcacctcttgtcggatttgataatcttttccgcaccgtgctgaatcatatcgagcaactcttccttgttttgagcgactgttccagcccagataaacaagaaatcatcaaaccaagcgatggacccaagagctcagtaaggatcacattcacacctacaatcccaagcctgatttaacaagaggattgataaacaaacctttggcagcttgctgggcacgaccttgttgaataacaagctggtcaagcctcaatttctgagtcgccctctccaagattcgctcttcgaccgcgtcctaaaagaagtcggatgaagaatataagacaaataccccaacaaaccggaacaagattcgtggttgaatagaggaaggaatgacctacttcggttacgaaacggaatacgtagacctgcttggtctgtccaattcgatgcgctcggtccattgcctgaagatcagcttgagggttcctattttatctcaacgccatattgaggagagacggaaactttacgatcagcttctaaagttcggttgttccaaagaggagggagaaaggacgacaaaccaatcactatcgaacaagacgacgacatcagcagtaaccaagttgatacccaatcctccggctctggtagttaacaagaacgcaaacttttcggacccgggagcgttgtattcatcaatcgcagtgattcgatcttcgtgggctgttcctccatcgattcgagagtactctgtaggacaaaatatgggttagggttgacgattcaatctagtttagttgatgctaactacaaacggaaaatgaagcaagaatgaggaggaatacccacgatgacctcggaacatcatgtaatcctccaagatatccaatactcgactcatttgagagaagatcagtactctcgatcctttggctttcatcgaagtgagcaatttatcaagaatgaccatctttcctgcattattgatgatatgctcgtcggtcgtgtacggcggtccgggctcggctccatcgaacactacgtgcagaacaagacgagagcgcttgagttttctctcatttcggaaacaatatgcgaaaataaaggggcaaacgaacaatatgggtggttgcaacacttccgcaactgcatcacgatgtttagtaacctagtcttcccttcttttttacccgtagcacctgagatatggaaagacgataccaatcatcagcgtcggttcatcgagacgcgtgaacagtggaaagaacaaggaaagaaaccccaccattgacggcgtcgatatccttctctaagatcattcggtaccactttcgttgcatgtctgtcatgcccacgtagatgtttatttccttctttggcagaagggaatgctcgacatctgctttgactcgacggaggaggaaaggtcgaagtactttatggagttgcttaacgacttgatcggcgtcgtcttcgcctcgttgttggaaccacgcgtcgaaatcctcgctgttaaaggagaagaaacacgaattggtgggtcaattaataaacagatggaagaaataagagtgggaaagacatacctcgaagaaaagacatctgttacccgtgagatgcatattcaaaagcttgattgtcagtcttatgagatcatgacagaaagagctcttgggccagcaatatcatcacgaaaccttttcacctaccaggtaagatgaaatttaacagtgcccaaagttcctgcaagttgttctgtagtggtgttccggtgattaatagtctacctctcgaatcaaagactctgacgatctgactgagtaatgaatcaacgttcttgattcgatgagcttcatcgatgatgatgtactcccatgaaaactttttgaacgtcgacttctcccggagacacatctcgtaagaagtgatgcagatatcaaagtcgctgttcaagatttgatcctgaatcaactcgacctatggacaaatgatatcggaacaaatgtgagcttagaacttagatgacgcacgcccaagaatttatttatttttataacaaatcgggacatactcgctcatccttgtttccttggaggagaacggtcttgaatccagggacccacttgtggacctctcggtcccaattctgcaatgttgattttgggacaacgatcaagtgaggtcctttgataccctggtggaatttgaggaatccaaggaaggaaattgtctggagagtctttccaagtccctgttttcatcgagtataaatacgaagaagaggatcttcgttgaatacacaaatgacatgcagatgcgaaagcgggagtaaatgaaaagacttaaaacgaaccatctcatcagcgagaattccgttgattccgttatgatgcaaagagaccatccagtttagaccctgaacctgatagtctctcatctttccacccttgacgactgtagccgatccatttatcagataattcgttagctcaggatgtacagcagatgaaggagagggaaggggatgaatatacatacaggccggtgattcttcaaagacaatcatgtcatcgtcttcattggcatcaccttctttgagaagctcttcatcctcctctttctcggtctttcgccgtctattatcgctgttcttgcccaaagaggtagatagattgagtgaatcatcccattgacaggagaaggaggatctccacgtacgcggcctttttctttccctttccagagttgtgcttggccatctgagcgtcaagcagttttgcaaattcaggatctcgctctttctgaactcagaggacaaattcagaatgacgacaaagaaaagagatgaaagaagtcagatgagacgaccgatcgaaatatcgtcaccggggatagagcgcaatgaagaatgacagaccttgatctctaggaaatgctcgaataattctgtttgtccaagcagatagttaaaccgtttcatcgaatcggcggtctacgggggtaaggaacggatggtgcggcaagcaggcgcgtagtatagcgacagggaagcacgagaacgagaaggcgcatactgagcactcttgtttcgaagaacgatatccacaaagacctctcttgtatccaactattcacaagtgggaaaccaggccgaatgcttaccttgattctgctcatttcctgctttctgccttccaattttgttttctgctccgacttttcctgtcgtttcttctgattctcagccttagcggcctgtgctctagattttgaaggagagagcgtcgactatacaggcccgtccgtaaggaagagaacggttgcaaacaggcagtggtcggataagaaaggggtttcaagtaagagttgatcggaaagaatataaaacacagtcagacatcatataatcagtcacagtactccggagtgaaattcaagagaggataggccaaatacgaatcacagatcacaaagcaccagactatgacataaacaagagggaatgctcttacggaaccagcctcgagatcatcagcggcatcctcttcgtcctcatccgacggatcctcatcctcgggttcgtccaagatgtcatattttggtgtgttctcctgcgtgatgtgttgtacgatccagagagatacgagtgacatcaaacgtgatcagcaagggacatattctgaagtgcagagagaaccaagagagatgagtgtcataccggtccggttgagggtacacgggagggcactgcgtccgaaaacatgtcgtcgtccttaacaggtgcggagtcgattggcgtctattcgtggattggtcgcaagatgttgcacaaatcgcaaatcacacaccacgcacgcatatatcagtcacgttgtactaaaattccagagagaacacgtaaaagtgttgtgaacagggatgagagaatcgtaaggttctccaccgttggctgacacgcgcctagagatcatcccagttggatcataaagagaagaggaaagctggctaatgaaggaagaaaggaaggaaaacacgcacggccatggttatcctttaaggctatctctgcctttattaagaaagggatggttgttctaaatgagaagctctagtaaaggacagagcggtgaagaacaggaagagagaagcgtaagaaaaagatgaaagtgaggagaggaaggaagagaaagaagaagaactagaaaatggtagtccaagtcgcgcctgtcgcgtcgaaatgcaaactcttgttagggttacttccttggttacagtcgatggtatatctacgaccttgggaggcgaggactcacccggccagatatacggcgagggagcatgggtcttttggatagggccatcggaatatcagagatcgattgagtgttagacatcacggaacatgtacatctgggtctaccggctcgcaccgatgttcgtcacgacgcgttttctcgtgtcgccagcgccgccaaaagatctatctaccacaaaagctaacgagatgatttttggagacagcgcatggttaagagacagtcctgaggacgtctttcaagccgcttgtgtatagtctgtcaagacgacaactaccgttttttgaatccagacttcatcgatacatctatctacaggcttgactgcccaaggtggaatcaactcgagcgcccgcgacctaggacgcgtcaaggaaagtctcaagtggacgattctcaaggaaagctcagcataacatccacggatgacaatcagaacagataagacagaacgatcctctggagctggcatgtcgaatatattcatatagaccggcagtcgagggaataggttttgggacacagggtgctcgaggttagattcttgcttacctaatcggtactcttacgtcatctcatactcgtctgaagtccctgccaaacacattctgcaatctcaaacgatgacccagaagaagaacaagaagagtgggaaacaaccaggggcatcacctagcacctccaaggttggaacaagtatagatcaaacagattcttcagtcctcgtcccggtcccggttggagcgcaaagtatacgagagatccatgcccctgttgagcatccatccagaagtcttccaggttctatatcttctggcaggccaacttctccccctccaccacctcccaagcagctacacccatcatctaagactaaaaagcccttgaagaagaactccaagcaactgtggatcacatctgtcatcggctggatcattaacaccatcattggactgatcaagagccaggtgttcttgccactctttcttggtcttgcctgcactatcccggtgatattcatatcgattgctggatatcatcaattatccaactgtatgtatcgttctagtttttcttcttgtattttcaaaatagataaatactgatctttgataattctgtctctttgcatacatgtggtgccctttgaagtcgtccactatttctcgggctcattggactcatttgccaatcttccacagatcccagtagcgctatactcgaccgccacagcaacctattgcagattcattggtcttggatgtggaacatcccacctctttccttccaggcaagctactgtaggaaaagtcgctcagcagcttcgtcaacaggctggcacagcgagtgatatcttccaaagcgtgattgacctgagcgatgttaatagcttgggacttcatcagacagagatttgggagttggcgatgacggtcaggaggggaacccatttggaggatcgagagatgctcgcggcagaactggaggatttaggagatctcacaagggatctgaaggatggactgatgtttgtggtttctcttatcctcttgcttgtgaattcttctcctgcacgtatgatacagaaaggctgacgatcttgctgtatctacatttcctatcgatttagtgggatcaattcccaagggataaacgcgttcagttggattgcgcatgaattcgctcgcatcgaagcccatttacaatcacttgctccaccaccaccatcgaccccttcagaatcctactcgatcgaccctgttccgatatccgccaaatctcaaatgatccttcaaacccgtctgacggcgttactgaacaatctgattcgatcactctcatcactccaagcttctatcgagtcgacccttcctcaagcggatagggcgtcccgactgggaggaaaacttcaagatcgattcctcacagaagagctcgccctttccgcagagaaagccagcgaaccggtctgggcaggagcggtagcaacagcacgagccttggctctgggtaaatccaatgaaggagatggatctttcaagcagtttagaagggacgtgatcaagaatgatcttaaattgacgaaggaaagcatagggaaattacaacaactgagaggtggaatggaagatcttcgttcagaactgattagatacagaggtctgttgcattctcttgtctttgttattaggtatccctctatctatacggtatctcattcatactaaagtcatacatccacattttgtacgatcatcgagcagacaacgtgggctggttccgagcaggtgttatcggttggttcgccggcgcaccaacatcagatcttgaagatggatccgcaaacggcgaagaagatgagcccattttggatatctttgttgaaatggtctgtattacgtcttcttctttctctcactctgatataatctatcgatcttgaccactaatcgatttcatattcctctgtcgttgacgatgatcggaatatagagcgggcttagtcagattatcaatcagttcagtcgttccgtcgctgatgcaaaggcgaggaatcgacgtcagacagtagggataattcattcagatggacagccaaggatgatttcagactgaccacaagagtacacaagcaatgcctgtagcgctccttgagattcgacggtgtttggacatgtctcaacatttccttcatcgtttgtgatactccttaattcctccctttgctatgtataatatgtcattgtattcatatcagatagttctgcatgctcttttataacaaaccgaggttgagaacggcgcccatgaggaaaaaatcggtcatgagtacaagagacaagaacaaaaaaaacaagatggagaaatcacaagaatgaacgagtatacagaaacaagcgttcatgaattcatgttgtttaaaccgtcagactacttcgatttctcttctcttagaaacattccggacttctcaacataggctgattatccgttggctcagcttcctttggcgtagcaggtgagatattcaccgtcaaaccagccaccgatttggacgctggagatgaagcggtatgaggaatccgaggcgaggacttctcaggtcgggagatagctgtcatcgatttgggcttcagcttgctcccctccttatcctttgcttttacctccaagacgtcttcctataattccaaacaaacatgaaaagcataggaggagaaagaatgtcagagttagtctttcctttgtgttcatagataaccaattgagtaacaagactaagaggagagaaagtgcaacggacctctccaaagtattcacgcggagtgctaggaatcgagaccgacttggctccattcttcaactcctggtcgatcactccagaaagcgcagcgaggtgaggcttgccgacctttggggttgttgcaggcgaacccttctttgagccttgcggcttcggtcgatgagtatccacagccgggataggaagagggtacctatcaacagaggtggcataccattcagtatctatcgcatgatctgctcgtgatacaatatgttaataaatattgaaaatcatacctttcttcatcacatccataagccttaggaaccagcttaataagcgtgtgtagtgggatcgggatgtaaggcagttcctcttgagagtagccctggaagtaagcatatctgtagccagaaatacaagcatagaaattgacgttaacattagctctatttcgatcagtttcaaatcagagatgcgacaagtatttccaactcacagagaacgaataatggcttggtggccgataatgagaatattttcttgtcgctctaactccatgatgaccggctcgagccgagtcaacacatctcgataggactctccacctagaggaacctctcaaaaagggcatgagtgcaagaatcaagaaggagactataaaaaaaggatgtacctcgatatcggtagttgaatttgtcatcatctcggttggcgtaatcatccgggtacttttcctgttagaccaaagcaatccatgagaaatcagaccgtgccaacaaagaacgtgaagcagcagattcatttagtttagaactgacctcaatctcttcgtacgtcattccatcgcaaactccggcatccaattcatccaaagatttccaagtcttcttgggataaggcaggtgctgggctgtctgaatagttcttctcaatgtagatgtccaaacctgtccgcaggactgatgttagcagtccaacgccgcggggtattcaccgagaaacgagatcaacgaacagtgagaggcgcgtctccgacattttccaagattaacgacggcagtgccttggcatacttctgacctcgttcagagaggtcggcatctcctccaatttggccgttgacgttgtacatagattctccatgctgtggcaaaaaaatggcaaagcaaagtcagtgcacatgcatatatcaatgtaaatataataacgcttactctagacaagaagatagccctgggtttcagatgaagattcatcaagtagaaagccactcgactctcgagatagcctccgattcgattgatgtgtaccgttcggccaacattgacaaccttgcaatacgacaaatgaggttcatctaccggttcatagactttctcatagttggcgattctctgaattgatatatatatacagcacatatgagtgatagtttctttgtgttaaggatatgaagaagcaaggtatacctgcttaaagtccgcttcagcagcctcccgagtcatatccttgtagtccggatctcccgaagagaccttcaaagcgatattggcggcgattacttcggcgtcttcacagacagattctaggaagagtagatgaatcccatgttctcgagccactcgtttttcgatagccgctctatgaatcgaattattgattcagtaaagcccttcaaaccaagtgatatcacgttggaccacataccttctttccttagtagtattggttgcatctaggcacgagaacagaagcatggtctttcaacttttgtgaaacaaatggaacggagacaatctgcactaaccatggattccgacgtttccctccctcttcagccaatcaatcaggctgtcaagacattcttcggccagcttctctctgacggcttttgcgtcagggtcagcatggttgaaatagctttctgaatgagcggctcctctttgacaacaaaaagggttgaggcatgatgagttaacgcaatctcttcagcatatcagtagtatcttataagacatactcggggtgctcgtctctggcctttcgtcgtcgcatctgaccaacgttgaataccttgactttgtactcgagccactgaaggtacctcttgagcttattcgacaggaaagatttgcctcgagccgggagaccgacctggttcaatggaagcagtgaatatcgttagatatgaaagagctatgagaacgactccagaagaactagagatgtaccatggcgacgacaatcttggcgcccgaatagtccggcttgctgactatcgacagaatccgtttattgaaggagcaaacatgaaatgggtcgaatcatagcagtgagctgttgtttccatctctgagtaacaagttaaacagatgctcgtaccaagatttccgattccagtaacagaaggggctcgcgtaggcgccctagagttctttcgactcaagagagtgcttcggtcgagatcatgtagcctttacaggggtatgagcaaacagtacacaaggacagcaccaacagagacaagaggaggaaccaaaggttcagaaacgttcagtaagatatcatacagaaacaaagagatagcagtcatctgcatttcgaaaagctcaagctgaatcgataaactcacagcccactggtcgctccgtagaatggttgttccttgatctctgcatccgtctcccttctccctctcgtcggccttttgccctgggtagaagaggtttctgccgagtctgtcagagagattgttgacgaattgccagtcgatgaaatggtggattctggaatagtgtcctcataattgtcttggttgtctgaagagatttggagagactcgagctgggcgaccgcattcctcaaagaagattgggtggatggagtaacacttctgcgaagaggagcaggcatttcggatccaggtgtagtcggcataaaaagttgggtgtctagctttgagatacgatcgacaaagaatgaagggagtagagagagagatgaagatggattcacgggcagatacggcagacgtcatgttatctctttttatatatatattagtctcttcttgaatttttcgatagtcctctaatggcgtttctagtagttttctgatatcctccctcttaggatcttgaaccgatgctcggatggtgctcaattttcttgaattcattttgcacagcgaacagaagaaagaaggagcaatatacatatgatatttacagaaggaaaccgggaagagaaagaagactaaaatgatataccaagaaaccgcctaaaatggaaccagcccacttcccccttatgtctagagaacaatgagatctcccgagcagcatctacaccacaaaattccatccttgtccgagaattgatgcacgaccggctctttgtaacctgattcgacaaatgacgctccgctagtcagaacaggggtcttctctccttcatgcgatccagctagattattttccactctgaatccttccgacccttcctccgtaaacggcggcagggatgagctcgagaatctaggacttcggccttcccccacattgatcccaggcgaaagcaatcctccgttccttcctgacagcgaggtattattcggattagatgtttccatcctggctttgagcatagcaagcgaagttgctctagcgtgtctggaagcaggaggcaaatcagcatcgaccggtcgacgctgagaaagctgctcgaatgggttgattgttggaataggtccaacataagtgggtgttaaagaggggggaacattggaactagaagatcgccttgaaagagattgtgaggtcaaagaaccctggatgctcacgagttcggtctccagcttctttgccttccgttcccatgtagactgggcatactctgcgtcatacacagcggtctctaaccggcgaatctgcgttcgagcctcagacagatcgagtgcatgctgatcttgaatcgagttcatccactcggttgattggtccagtttggccaatttctctctgagttcggcgatctcctcggttgtttgccgaagttcagcctcggcagtctctcgaagcgctcgctcagaggagaagtccttctgaagtttcgtctcaagggcttggacattggcccgctcgacctcgattatagacttctgatctgccagttcaatctgtagctgagcgaacggcgagagcttggcctcgaggttctcaaccttgactcgttctgcgtccagaagatcctggatggattggcgttcatctgaaagcacttgtttctcagaagacagatcatcatgtgcctgagaagaagcagctagttgagcctctaggtcctggatgcgctgtcgctcagcgtcgagttgatcctggacggattggcgttcagctgaaagcactgttttctccgaggacaaatcgtcatgagcttgagaagaagaagccaattgagcctccagatcctgaacatgttgcctctctgtgttgagt

SEQ ID NO: 575 - DNA, 22129 bp, Xanthophyllomyces dendrorhous
gtgagcaatctgtgttcggatgaaagagcatcgtgcttttcggatgacatggacagtttggtttcgagatccaaagttttccttcgctcagtctcaagaagattctgggcttcgttatgctccttcttcaagtgggctcgaacctgctcgtgcttcaacacaagatcttcttgggatttggatgaggcttctatttgggtttgaaagcccttggtttcctctagagaagcgtctaagcgagattggatcttgattcgatctgaagtaagttcctcgtgggcttgggtaatggaagtcaactttgactcgagatcttccttcttctccttctcagcatccaacaaaacctgaatctcttgtctctcaacctcgtgctgcttctgaatcctctcctgctcagcagcacgctcctgttcggactttgatgaagatgaaagctgagtctgaagatctttagtcttcctcacagcagtatcaaggagactctgaaccttcttctggtcggataatgtcgatttttgaagatcggtggcagaagcgagttttgtttgaagatctccaatcttctttcgttcagtttccaagagatcctgagcctcctttcgctccttctcttggctagccaacaatttttcgttagtcttcgtcgacgatgagagctgtgaactgaggtccctcgtcttgagagtttctgaatccaaaagatctcgtgtctcggcatgcttcgagatgtgttcctcttctcgatccgcgttggcagagatctgagcttgaagatgctcggccttcttttgagaagcatcaagaaggctctgagccttttgtagatcagaggaggtcgcttcatgaagttcagttgccgaagaaagctgagcctgaagatccttcactctggcttgctcagtcttgagcgagtctaaggcgtccttttgatccttcttgtggtcagctaatgcttttctatgggtatctgttaatgccgaatgctgtgaaccaagattttttgttttggtgatttccgcgtctaaaagagcttgtatccgcttttgttcggaagagagtttctcttctcgttgagaagctgatatcagtagagcctgaagatctttggttctcgaaatctcggcttcgagcgatttttgggttttgttctgttcatcagacagatccttctcccgcttggtcgaagccgatagccgaagctccatctccttggttttgttcaatgcggcgtccagcaagccttgtatcgcttctctttccttcagaatattgtcccgttggttggccgactcttcaccgagactcgaaacagatgccaattgcgcctcgagggttttgaccttgacatgttctccgtccagaagattctgaatcgatgcattatctttaccaaacttctcccgttctgatgcgaggtcctgctgcaaccgaactaaggccgcttccgagtcttctcgctgtttttgttgggattctagagcgagttggacctcttgttgtccagcaaccagctcgttcttctctgtttccaaattctgtcggactttcttgagcgatacaaccttggcctcaaattcatcagcacgggatcgttccttctcaataagtttttcggacgtttgttgttgtgactcgatggcagttttatgagcgctccgttcagattcgagagaaacacgaagcgagtcgagttctgaagaagtctgttcagactgtttttggacattggacagctcggtctcaatctcttgaaccttggcctgatatgtatctctctcagacaccgtggattggagactaataaaccattcaaatgtagatatacgtcagtgtattgtatatatagacttcacgaccagagtcagcatagacttacttcgattttatggtttcaaactcttttcgtacctcctcatcctcggttttcgcgttcagctctctcttttccccctcttctatctttctcaacgcatttccgatcttttcttccaactctgccttctcctcttgtaagctcattacttttcctcctagctctttcttctgggttaacaatccttcgttttctccttgaagagactctgacctgtccttcgcgcttgtcaattttccgatcgtctgtttgtgttctgattggagtttacgcaaagtatcttccgtggatgcatgcgtcgcacgaaggtcagtaagctcagaagtgactgttgatagagtcgtctgaagggtgccaagttgagcttccagtgtggcgtgagcgtcttgaagaactgagtgggacgatctgagatcagaatgggcgctttgaatggcttgatgagacgcagataaagtgttgtgttcactctcaatggaggaaagagaggtttgagtagcgttgaatgctgtggtcaggttgttgttggcagcttgaagttcttgattagactaccaagttatttggaaagcatcgaacgaaaatcagcaacctgtaccaagagaaataagaatgggctacacatcaagctagcataggcagacgaaccgatcttagctttcccaactccctttctagaacaccttctctttctctaactctctccaagttctcttccaactctctcacttttccaccttcaatctcgtcaatctctcttagttttccctccaactccctaacttttatctccaagttgttcttttccttctcgactgcttgaaacttttctcttacaccttctagctcttggagatcctttgctttatttcctagcctctcgacatcctctactagctccttgcgctctccgtccaaagcagtgattcggacctccaggcgctggacggtcgaacgagactcagaaagttcatctcgcgtagatgacagattggaagatgcttcagtaagaacatcaatttgagagttcaactgagccttttcagagctcaactgggccttctcggagactaggagagaaatcgtttgttgttgattggagagttgagcattgagcgttgacaactcgatagaagctgtgctaggcgaggttgctggtttttccgaaacgagtttgatgggttcaggcagagaaagtggagttgattgcgaatcaatgggttcgctcaaagtgacaggagcctctacaggctcgtctacaaggatagttgtgtgtgccgaggaattcttgaatccgttctcgacaggaatctctgtggcagctgccgcgatgctggcggtgagatcttcgacttcagccaactcacgactgcaagaacaaagacaagggtgttttatgttagcagttacccccagtttcttggtttgtagcaaggtcgcattgctcacctgtccttggacaaatccaagctagctctcgtactagaatcatcatctaggataggagtggccgaaacagatgcgcttgccgagtccttgtccgtagccgctttcttagctttcgcctgttttttcttgagctggtattcaaacaatttatttaaaccattgagcaggcaaaagaagaaaaggaagagttaggcttggctatcgatttgcatactcagagtcgaaggttggacgcgtgatcggagatgaatgaggaagaaacagaacggagaggctggaaaaaggaaaaaaaaaactgtaagcaatacacagacttaccaacgcctttgccctggcaactttttcaagtcttgccttttctagatcagcttcgtccatactttttttcttttagaagggaggagagagagcccgacgggtgttattagaggagatcagagacggaaagacggttgccagctgggaacgaacatctcgtctggggctgtgctggcttatgtacaccatggtcacgtggttattttgtttcatgctcatgttatccagtcatataatacataaatggaaagagggagatacgttatagagattgtatgatactagatatacagtcattactgtaatgtctggacaacaatttccatctgttgacgacgaggaggaaaaaaaatagggtttcgtcagaataagaggcgcacacatctgcattcaaggatcaagaacttacgtccagcactccattttcaatttcacttaatgcaagagtcgtttgcttcagctcgccttctctgatgcgctgtcctatgctattcgatgtgaacctttcaagtgcgggcgtgagatcatcatcggacggatgaggccctggagcaggatcttccaataaaagcgtgaatggtgcatgagtagattcatctatcaatcgatagagcgtccgaaatgtgaagaattgattagcgacgagagattcagtggggtggcagtgaacggaaaagcgaacaaacctgagaggttgagaggagatagagctccgcctgtagctatcatttggagcaaaagtctgcggaagacaggctccagagtagactttgttggcgcgttgggttttcgtatcctttgaacgcagaaggtaagaatgtcaagagatacactgataattatctctgatatattgatggagtaagaccacaacgtacgggtcggtctttcgcctctcgtctgagctctttgatatctgatccacgtcatcaaactgaaacaaccatcgctcagaaggaaatccctctgcagacatgaaaatcaaaacgactgtccgagcgttcccctagaagaaataacaaatgcttaatccatatcctacgatgcacatcattagcgcaaggtggatttgggcgaaggagcgacgtacctcaatgagttgtttcccgatcacctctagagatttccctacccaggctctaactccttcatgcctagccatctggaccacgactccccatctttgtcgtcgtaagaatagttcagacgggtatacctgtctgacatacaacaaggtatgtatcgcggtttcgactgggatacaggagtttgcacaggctacaggtttagctatgcagattcgaggttaaaaagaatggaggttggcaatgtagatagacatacgaaaatcaatgtactgtgtgacgagttgctcgaaggacaatggcagggtattaggatctgttgctctgttcgatcgagaagagcttctcggcatgatagaccaagctcggcggcgaatgcgatgagcaaaattgtatcaacaaacgctgaaaggacatttatgatcagttcaaccatgagctttcgaagtaaactgagtatagaggcgcagaatgtacgatcttgatctggaccgttggctactcggcgtaagagatctcattgtaggtgtgtcgttcaaccgaaaacagaatacatcatcggagaactcagaaggatttttgaaaacatatctgaatacataatacttggcctaaaccgcaatgctcgttttagtctgatcgctggcgactacttccacttttgaccatcaaccatgtcgtcctcagcggactatgccaatgtcgctggtgggtcgttgaagttcaagggcggcgccagctccaagaagtaaggccaaatccgtttttgtcgtgtggatagtactgcttgcttcacatagatgatctctgaggaggcgagatctctatgacaagtgataagcacggtcgctaacattcgttcgtacatctattcttctgcgacactgtgtacactaggaagaagaagtccaagtcgtcttcggtatctaagccaaaggaggagattgttggatcaggagagggaccttctcgggaagggggctctcgaagaaagacggatgccgagaagcgattcgaagagattcagcgagaacgagtacgtcttttcactgttctttgtttgtaggtgaatcaattcccgacactatctgaatctttatatgtatttcctatttgcgaagctcgcggaaaagattgcaaaaacagcttccaagacgcacaaggatcgcgttcacgacttcaatgcgaaattggagagtctttccgagtacgtctctgaaaccctttccatattgcctaattgtacgagataattcaaacctaactcattgccatgaacccaattctctccaggcaccatgatatccctcgtgtgggaccaggataatacaaccttctttatctggtcttttattgttattgtatacattctctttcctactttccaagctggtctttctctggagaaagatatacaccctgtggaagatggatggctgaccgatcgctgctaagctaacactatcatctttcagatgtatcttacaattcacagtctactcattgagttgtttgaatcctacaacttccaaaccgactctagctgtgttctcgtaccttccttatatgcagaaaaattactcaacgcaagatatattctcgagaaagaaagctaaatgaaagacttgggttgtaaccagccatgagttcatcaagggtagtgccctgaggctaactgatcattaagctcaggccttgtttattattgtgttcctctggcccatcagtcccttttcttgcccttgagccgttcttcttgattgtttttaggttttcctcgtttgtcctccttgatcctcttcaaaatcaacaccctcctcctgatttctctcaacagcactcccttacatccctacatccgctccgtgagaatctcgaagaatgaacggaccagatgcaggtggaccaacagccgctctttcactaacgcgaccgacttcgccctctgatttaagctccttgatctcccaagatttcacttgctcttctgcttctgaaacgagctttgccacctcatcctcaatagcaacttctatctcatccggatcttcctgtcttgacctcaagtcagtgcagaaaccggtatcaactaccgatgatatcactactgccatggtggttgcgtccttgcctgtgtctgccaaagcgactgttgcaagcctcactcatctgggcagatccaggcaccgttcaaagtcaagcgtaggatctagacgggacaaccgaagaggaagatcacaactgggttcaggatcggtgtccggatcggctggccaaagaagtttcgacacggacgaaataaagaagatgagtagagacgagctcgtcaagtgtctagagtgtgaacgtgacgataggaacaaggtaacttcaaagtgacattgaggtctcaccttctctcgaatttcttcactatactgaatactcgtcttatatttcctcaccttatctgtgtgcgacttgaacccacaagttaaaatctcaagtcgaggaattgacaacgagtcaggacgtattacatgcatcgaatgagcgtctgcaaatggtcatcaatgcgcacgtccagagtgaggaagagcacgaacaagaacgagtaagctgttttcttggtgggggggattttagtttaatgctatctgtggactcatcgctgtaagctcggatccgataggttcgagtggaactacagatggctagcaagatagcgcatatccagaaatcaaattatcagatagctagattaagaagagagaagagggaattagagaaaaagtacacggaggaggttagtccaatctagatttttatatgaaggttacctttactcagtcatctatgctgtcgtaaatataggtgaaaaactttgagtctgagcgacaagcactgtatgacaacgagcaggttcgtgtaagcgtctgttatgtttaagtcaattgcgctactctgatagatttaaatttgatgacattggttctggtatcagcttttgaaaactagatgtcagacgttggctagtcgacagcctgtctctgaacttccgtcagctcgtaccgtcaatccccccgattcaccttctgatagatatagcgttggcgaaaacgctcagcttgaagctattcaagaggctgatgtaccaaacggagacctaacgctggcacttgacgacaggctcaacatcgaaaccaagatgaagacattggaagccgcgtatcagaatattcgagaaactctgaagaaaaacgaagaagaggtagtaaatctcaagcaaataaatgccgaataccaggtttgtcttccctccccctattttcacctcaacaacataaactaagatgatctcctcttcagcaagagattgtagcgtatgaataccttctgatggagcgcaccatctctggcaaaatgcaagacacccagcttctctcacaatcttattctgaacaacctggtctctcatctcgaacaacagcatcttctcaacctgctgaggtcggatcatattcctcatcccgcagcctatatgctgtgcacgaagaagacaaactgagcactacaggagtagcactggatcctgattttgcggacagaagtttgagcttcagtgagggacaggaagcgatcgataagggtatgctagatccagaattcaaagtgaccgtagcggataaaccagataccaaagatgaaaccggacagggttatgcgaaaagagagaaaaagggcagagttcctatggaacagacattagattcggttctgattgaactgggagtgaaaatcgaaggcgcgactcaaggcgaggtactaggtaactttgctgttactggaaggtatgtgatctccgctctcccgttcggtaccgcaatgtaggttatgcgcatcaatctactcatttattcttctttcagcggaatggatctagcagccgagctgggccgagccgaagcgggtcaagaagaaggtaaactcagaaacctgggtaaaggagacgatggtgaaggttcgttcgatgtctcggaccatgcttttgtgggatgttgtcagcagggagatgtaacttgctgaatatcgttctcgtcttctccctacttttttgtcaaaaagctcttctatctgaattgagaaatcttgtgagttgctctcttgacatatctggtcgttcgtaatggccagattggttgactctatcatcctcttggctgttttaaagagggatgccaacaaggccctcactctatattgctcaaagatgtgagtacattgtggccatctctggtccgaatgtcttttcttcgatcgacatgactgattccaatctcattctgctcttttcaactcaagcttggaccgaatcttgtgtacgtttgcctccaacacgttcaagtcatacaaattgaattaactcgtttaacgatttgcatgggacggatgacctgatagctattgatggatttgaaggtgagtacatcgttcgttggtagagaaacattctgcaatctgacacgagaagtatttgccgtacatttcaacagacgtactaagcgcaggttagtacattctattgcatatacctcctcagattatcgtgataacgtgtttttgattttcttgtagacaatggaaagtcgctgcagggatccgttcgtcgactgattggaacagctcagcaaaagaaaacgaaatcgcgcccttctttacagaatacatcatttcgagcagctggtgagccagttgccaccacggtatcatcgctcttacccatcgacaccacattttctaaaccagcactcctatcttcgaagaagaagagtcgagccagtgtagattggaggagttttacttctttgtaagtcatttgataactgaatttgttggaaataggatgcttatcttgtctatccatgcgttcaacacaatagcttctctccttcttcgccttcgagcaccatgttctcttctccagttgatacaccttcagatgagaaatcgagtatatgtaatctctctattgctttaaaacctattgagacgtctgatcctccctctggtcgaaaactgtctaaagaggaggagagagaagaggaagaagatcgagttcaacgccaacatacatcgctcctccaaagacagcttcaagatgctgaggctaaatcgagcatatttgttgcgcctgatgttgaggaagagactatcggcctgtctagttcgagtgacgccactgtgccagcgggacaaccttctcagcagatcaccacaaacgtacaggaggcctgggatgattcagccaactcgtctgacctctctttcaagtcttgtggagaaccaggatgtttaggagtaggaaactgtgaatcaggccatgtttgcggaggagtagattcttcgtttgattctagtaggggcccttagatctgagcttcaaatatttccttccttttctgccgtactagtcttgaagtttcctctctcttgcttccgtttcttcttttccctttgccttggtgtttcctttgacgtcgcgctcacgatatcattctactactaagtacatacatccgatcgcgatacatctaacgacagttttcttcttatcttatgaccacattttcttccgattttcgtaggacaaacttggatatcacagtgtggaaaatttacaagcccatttctctgaacctccttgctttgccttggtctctccaatcgagtgatttgtctcctactcccttcgtctctacaagaatgggctttattcctatgccagactttccttctcctgccggccgaaccacttccacaggatcaacccttccgccttcctccgcgactcctaaaccttttccaggtatccagccatgcttcatcaacattgcatggccaatattcgtgtttcctaatggcgagtcgaccgtctgagcaggtacagctggtggaagagggttaatcgaagaggaagatcgattcgaggtttgaggcagagggaccgaaggtcgttgttgacgcctaatcgctgctctatcatgatagattctcgcagcatcttcggtcgaaagacacgtgatagatgacgatgacggggcgttcgccgatacagctgctgatgagtccacagattctatagaagtcggtttaaggcgcttggcaggacgagacaaaagggtctctcgaagttgacgcatatgatcttttggagtaggttgagatcccatggtcggatgagacacaggaggtggtgcgcgctcatcctcaacagaagcactctcaggacgaagggaagtaggaatgagagaggaggcatcggagagtgagcattctgaacagggtaaggttgggtgtaggtggatctgaaagagagaaaggtcaattggttcaaagcaatatacgatgttgacgttgagcttcgcttctacaaaattgattcatagccaagagaaaatgggaacaaacttcgaaagtagtcgaaccgatccggagaaagtcaccatgctggagttgttccggcaggctcgccttctttgcttcactcaatcttttccactttttctttaccagctttccttctcctccaggcttgcgccttcctatgaagcttccatgggtgcttcccgagtctacgatccaccaggcgcctttgttctcctctagcttcgccttgctcgagtttgctgttcctagcttatcttgaggctccgaggttgaactctcggcatccctgtccagataagttcctccccaaccctcctcttcgaccggcacgagcagttctctttcagtcgaaaccatttctggaggtacaaagtagaccacagcatggcttttgctaacctcaagctctttgagacgaactcggccttcttcaggcgagagttgcttgtctcgtccgatagcatacccatcgggttgtgacgaggaaagtatggcaagcttgtgcttggatgaaaggcagctggacgagacacgcaagaggcggaggtcgtaaggtttaagttgacgagcaggagtgactgtagatacagatgagaatccacaggcaggttcctcttttcctgggaaggcatatttggaggcatcgctgaaggataacgtgttcgatgatgatagagaagagtggtagtcctgttccgggtggtgatgatatcgattagaatgagtgaacgttgacgtagtcgaagaagacgtattcaaggtcggacctccatcgtccgatatctctccttcctctctttcttcattatcaagagccttatcgtcttggctctcctcctccgtactacttggaggcagatatttatattctcctgtggtttgatcgtactgagcccataggtttcggcctggatggtagaacagtccatattcgggttgccaggtccaagtggagtttgacggggttgattctggtggatgggaagctcctgccgcggtcatcatagaactaaagattggttatatagagagcccttgatgttgttagagagagggctatgaagacatctgatctggaggacagttcgagaaggaagagagtctcaggtaatggatggtgattgaacggtcaacaaaatgaacgcaagacaggtcttccctttttgagtctgaccatcatttcgtttccttctcttgcagcctccggctagatatctccttgccatacgatctcttcatccaagctattgccaagttactttgcgtttgatctcttcagtcagtcattctgttaagttgagttcattgaccgttgcaacgaaatcttacctagcgctactttcgaactctctactcctctgactttaggacttgaccgaaaaactaccatatactcgaaacatgtcttcctcagttccctcgccatcgtttcatccatcaagaggcatcatggctgatatatcactgtctagagcaaacagtccttctttcgtcgatgttgctcaagagttagaggaagaaattgatgagcttgaagaggactccgaggacgagactccctcgatagaggagacccaaagaaggagacggtcaatagaacgggcagattctcaatcaggtcaccgggccctcttgtttgcgaagggtttgtctggagaaaagttaaagatatcggaattatcagaagagataggtatgtccgggtttatagatctccatctacgtttctttgaaggatgggacggaatttacatcttcccgcctagcgccttgtgctcatgatgcgtcttgtctctttgtagaagcgaagacatctgttgagaacgcaaaacccaagctcgagacatccttgctcaaaggtaagctgaggttctcaatatgaaaagaactaattcgacccttatcctgatcaatcattcgttatcttgactatcttcgtagaaacatgggtgcaagtccaagcaatgatggacgacccattgtacgactcagatgaatacgaagaaccgatgaagaccagacaggaccaggtaagctcaagtcattgacatttgatcaagtctttcccttcctgactctttgacttgcgaccatagctttccatcaacctaggtaactaactgaaattggactcctacctgctcaatagacgtctgtatacatgccaaactctgaccatcctgctcttgttttgtctattctttgtgtaaccttcagatcgacagataccggtccttcgacaaaccatcgacttcttcggtccactgctcccaccttcgtcaatcacagtcaatttaactgctgattccgttcctgattcctcttcaatccagtcacctctcgctgctagcgcatcgaccgatgccccgattgctcctgccgcagccatcgaacccgcttctgcgccttctccgagtcttgcatcacctactttctcccctccggcgaagaaaccgagaacctcatacgggaggcgatcagatccggcgtcagagatgaagaaaactccatctgcatcagagaccacttcgaaaccaccgtcgagtataggtacagggtcgattccgaaactcaagctgacatttggaggagcggggaaacagaaggcatcgctttcagtcagtcaccttctgcctttccctcttgttcaaatgacttagaaagcaaattaattctgttcatcaacctgtttgctcgtttgcttcccaggctctattgaattgagacaaaaagtagcaataacgtgtatatctatgatccactggcagtccaacgtctgtgaacttgacagccatctcgaacatgaaattcaagattgcatgcatctaatttcatgctctgatatgacagaaagatcaaatagatagataagtaaataaggggagcaaagcacatgcccaggagatgagaaagccgaaacaagaaattaagtataaaccccccaaaaagaaaagaagaacggaaaagattgaagggaccaaccgaaacatgctcgtgatagataaaatgaaaaggaaaagaagagacatagacccagataaaaataaaatgaaaaaagagacaaagaaaagtatggaataactccccaaccgatctgctgatcaagctagcccttcaggttcatccaaacctgggttcgtcacatatggcggtcttgtgaatcctaacccaacaattcggcctttctggtctgcttcttccatctgagcacttaaacccattgtctttaacggtgagtccggtagaggtggtgccaaagtaaaaggctcaattccactgcccgtgctggtacccaatctagggctgaatgcagattcttccgaggcagatgacattcgatgcatttgttgagatagcgaagctatcgaaggtgaggcggatggcatgccaggtacgggcttcctgcggaccgtccgcggggatgaaggcgaactgattgagttcggagacgtgggtggactcgtgaaagagaatttgccaggatgctgttgctgttgtcgttgtaacgcttgcatcgatgaagaacctgacattctctgagagacttcgtgttccgatctagatcggtgatggaacgcagtcatacctggaggtccattggacgtctgattgtagatcgagattaattctggcgcggagatctccatcggaggtctatgcttgtggcttttggatccgaacaaatgtccaggggagaagggggctttaaatcgtttcctactgctgtgtcctgcgcttcctctgccgtccttgggtgaggtaggactagggagggctatgggttcaccgaacccggatgagctcatatctggtgttatgtccatacgttgaccgaactggttcaccaaaggcgatgagctttccccataccggtagtggtcgttaagatccgttgtcgcacccgaaagagggaaggtgttggagcccacaggcatatcgggtcgaaccattataagagcagatatctcagccggcaagggtggacttgcgtcttcgcttgatcgaacccatctgaaacctcggaaacctttcgagcttttggaagaactcatccttggtcgttggggagagggaagaggagacgaagaagtttccgaggaaccggcatgttcgttcagatcaaatactttttctgcaagtagatcgtgagatgaatgcatgggtgaacccttttcacggggaaacgcccagagtcggtcagaatgacgggacttgaccgagagggtgtctgtatcttccaaagagcggtgtgacgaggcccgaggcaactgggcagggaaggatgtatttcgtgtagatagcaaactcccattaaagagagaatcatggttgatggtggaaacagtagggctgattggcgttgaagacgaatctttttcattaccgttgatactctgaatcgagctcgagcctgaaggaaggtcatgcgagaccccattaccaggggggtgtatcataacagatgagtccaatttgaccgactgagccatacggtccataggatcagatgcgtcaattctagccggaaagagcagggcttgatccttttgtcccgctaatgaggtgaacagggcatggcttcggcttggtactgataaatctcgaggcgagagcgagcgaaggactgagcgaacaagcaatgatctgagtaaatgtaatcgctcgagtactctagatagaaggggaacggtaagaaaaggaagatacggactgttttctaaatcgttcaacttatcgtgcatcaacagcgcacttcctctgtttcctacctcatattcatcatctccagtcccgaaggggcttgtctgtacagaatccattgtttctgtagtcaacgagccttccgttccaaccgacttcgccactgctcttctttttagataagccagttctacagccgaagcgtcggacgtcggcgagagcgtctgttccgatccgtctcccaaagctttggggtgggagttgtcaagatttgagcgagtggatgagccgaggacggaagaagcgacatgaggggaagtcgtagggttcaacaaggtagtgaaggcactagtattagaatccagatcaagcgtcaagttggtgttcttcagtcgtctaggcgcagacacttcgcgagcatcggaactagaagaaaccggattgaagcccactgaaatcgggtggtttgggtgagctgccaacattgaattgacttctctagcattcagagtaaactcatccgtctcatcctcgtccgagtccgcccgatcaaaaggcgcagataaattgtcaaatgaggaagacaaagggaaagagaggtcttttgctgagagtgggagatcccctcttccctttccgaaggcagaagaaggatttctcgaatctctcagatgaatccattccaactcgtctgaaggaagcatcccttccaaaagatcgtcgatttcccctcctctctcttcttcatgcttactctcgtcttcgtcctccagttgagcatacccatcatctgcatcgaaactatctccgaaggacgaatgttctttgtcttggctatctactccggagaacttggaaagcgtagtttgaacacctttctcagatgaagctacaggctcttcgtcgtcttcactatcgactccttcctctcttacatctactgagatacctttctttttgatccatgcatcccaccattcgcctgctcgatcaccatcaattccaaattccaaagatccaacaattcgcaactctggcggtttgaggtttggagtccatccagaatcttctcctactggaggcgccaagaaatgagtagccgataagggttgagcggcttggaacgtttgatttagagatgtcgaggctaaaggatccgaagcaggtgttggggtgtgattggccggttgacgagagagagatataggtggcctttttcgtttagtcaaggacgctggagaaagtgaagaaggcgatcgatgaaggagagatctgcctggcgagccaagctgcggataagggttgtttgtttggctaggcgaaagacgagagaacgggggaatatgatcaattgtatgagagtagccgggtggaacgttagatgaagaggcgtgagaggccgagtacgttggcgaaagagtttctaatgagtggttgtgagagtggactgctgtaagaggcgtcaagtgagatgcgggtaaacttcgcgtaactgattcgggtgaggcagtagcgtttccatccgatccttgatggtggtacgccgatgagctatcaaaaacatctccccagagtgacacccatgtatcctggccgatcctcatctttgtcttttttggtttatgtttctttgcttgattcattccttcaatagacgcatactcctccaatggaagcgtgttgatgactagaaagagaactaaacctacggtagtgggtaatctatactctcgcgcgatgatttctaactgagccttgtatgtgggctgcaagagaagcaatgcttgaggataacgcgacttgaggtttgctggaggactgacacaaaccagatgttttggctttaaaactacccggcgaggagacgaggtaacatagacagctgatttagctggcgacaggagaggcgacggcgcgcgtgatattgaaccaacggaatgggttgttaacaaggatgagctggcagatacagatctctgctgagaatgtctaccagatgaagttgagggcaacgcgagcgagcttagaaaagaagaacgcgagtctagagaccgactttgcggaagagagaggttgactccaaacgcctgagcgattcgagcgatcttttggggatccaatcgagacgttggatctaaattttgtttccaacgcggtgtttctcgtggtgaaagttttgtcgaactatctttgtagtcgttgaaattctcgttgtcgtaaaatgaggacaaagacaagctggtagggccaacgctggttgatgcttcaggcacgccttgatcaccagattgaggcgaggtatagggggtttttcgaggagtcggccgtcgaggccaagctgtctctgccgacatgagaatgggagctttattcaacaatgacggttgtgcatagagattaagtgacgtaaacaccaaataaggcgaaagaatgagtaactagacccatttcgactgatctcaaaagaagaggcaggacacgactgcgtgtatcgaaaagcttaccttgagagttcatcttctgacaagacaaatccttgggcccacacaaacccagaggctaaaggatccagatcaacaagaaggaatacaatgaggcgaagagtgttgggaggtgtggtagtcgaatgagaacgaatggatggatgtatgcgcaaggaatcatgtctgttgtcagaagaactatcatcagtgagggatgagagttgaccgcggatgctgtgcttaacctcagcacgtgattttagcatgggcagcacgtgacctgcccgacgcgacgcgtctcctcacgctcggcgcgtgtctcgttcttttctcttcttgaaacctttctttggatctccaagctcattactgttcgctctctactttctcatcttggtctctgtgtaaagcacgacgtgcatagtacagatgagtctggatgtcccttcaccttcaccctcgccttcgccttctccatcgttgagtttgattcaacaacaatcaattgcaatcactactcaagaccgcgctcactcgtctgcatcaaggtcgcccgaacagagcagcactcctacggcctacctgtccatctcggggttggaggacggccaggtggctaagctgccggtttttgtgcccactccagaaacagaagccgatgggttgtttctcactcaagatatacctatcaacaaaggaggttcggcgtcccttcgatctattgtagctcaaatccccttttatgatgctcatggacgttgtctctttcactttctcttgcactcttttttgttctcttttcgttcccataggattctcatacatcccatgtgcaccttcaccagtgtcctcaccttctccacatcatccgttccttcgatacatcccacaatttgccgacgtttctattccacacctttcattttctgaccggtcggctcatcttcgagtctccccctcggcgttgacggcgtcgtccgctaccggctttcgttccggtagagcgaccacacccgttcggtccggctcgttctattgcgagtttactgttgaccgaggaggtggagattccccgacctcgcatacctcatctgcgacactcgacggagcccacgtccggctgggctgggggcgaaaagaagctagtttgaacagcccggttgggttggacggttactcgtacggtgtgagagacaaaacgggcgaaaaggtgacatgctcgcggacgaaaaagtactttgaaaatggattccgaacgggtgatgtcgttggactttggatctcgttaccggaggaaggtaaagggaaagggaaagaggtcgtttgggaggaaggaaacatcccgaagatggtagacgttcaccaagatcccacagccgatgagattgatcatgagcaagttcttgaaaagactaaccccccctcgggtactaccgatgttccagcacccccggtggatagaccaacatctccacaaatcgtccgtcagcggatccctattcgatataaatctcagttgtatttcgagacaatagatccacctccgaccaaagagatggacaccctgttactacctcctccgaaatctgtgtcggcacctgtagtatctaccggaacgacctcgacaagcaatgggaaacgtaagaagtccacccgaatcacgaacaagactttaccttccgttgactccatgcggcctgcgatcggcgctcaacctcttcgacctcttcccgtactcaaaggaagcaagattgcgttctttgtgaatggctcaagcccgggttatgcattcaccgatctgttcgactatcggcctctcccacctttcccgagctcagtcaaaaagacggtaaagtcaaagagcacgacacagaccgggactggaccggggctgggtattggctcaggcggcgcgacggatgatgggacgttaggatattatccctttctaagtgtctatggtggagggagagtcactttcaacccagggccagacttcaagtttcctcccccggacgatatagaatcttacttggacagtcaggagctcatgcgacagccggaatcgacgtcgacgtccgagcctgcatcggactcgatggtcacggtcaaatcagaatcagggtccaaagatgaaccgacatctactgccctcccggacgttcttcctaacctggctcttgccgccccgatgagctcccgaacgtggcttccactttcggcccggtacgaaggatacatggaggagcatcgagtgctcgacgagagggacgaacagacgttcctcaaaacatacgtcgctccggaggacgtcccttcgaccgtcaatctgatccgaccgaaagtggaaaaacgaaaatcaagcgtcttggttcccaccgtcggtcagatgccacctggaacaaccggacagacgccgacagacgaagctttgtcacatcaggagcatgacccgatactgggttcgacagaggcagtcgacaagccagctagctcctttctgggtccggcgaagaaagtctacaagaggagtcgtcttgggctggcgctctcgtcggatgatgagacgatgaattcccaccccgactctcgttcccgttcccactcacctccttcacctgatatcccccttctgtctgtatctcaaacaaatttgccagagacgacgacgacgacgactgtgtcgatgccgactaccatacatcccaccgacgttccacctcgcttgaccgagatggaaccgtcgttcatcgggtccacagcctcctctccatcgtccacatcaccgtcatcgtcgttcaatcgttccgtactcttctctcaatctcagtcgaacccagcccctgcatcgacagtatcccccccacctaacggcacctactctcatccgactgagccagagaacacgagcgcaaatattaacgcaggcacaagcatggtcgaccaaacacccacgatccaaacagacaagaacctgtccagctcaaggttaggtccagattcgacttcggatctgacatcagcaaccgaggaaacgcaggctgataacagcaacaattgacatggttatcaacaaagacgaatgtgatcacgtcgagcgtagcattgagtgagaaaaggcagaagggagagaacagagaccataggtggttggtaaactgtcgagaaagatgataactcgaattcgatcggaagaggtatgaacgattgatatagaatggatgtaggacatgtcggagggagaagactcaagatggaaaggtcgtccagaataattcggatggtcgaccccttgttcctcgaccactctctcttcttttgtaatgatggagggagaccgataatatgtatatcaaatggaaccggacggaacacacagagaaacgacaaaaagagaaacggctaggagtcatgtctgccgcgcttatatgtcaaggcgatttccagaaacgagcccgaatgaaactgagaaaagagttgggagaactttgattatctataaaatagtacatcacataaaacaaggaaaaacttgggaccttgaggggagggaagcgaatggaggagagaaaaatggaagtgggaaacggggagatgaagggaggaggggaaaggaagaataggatggggatgcgacgatgcgagaccagctctacagagaagcatatagagtggggttcaatgataccagatcaaggaggaaaccccgagatcggtaaggtgataaggagaaaaggctatcaggacaagacgagaggagaaggtggtagaaagaaaaaaggatgggttgt

SEQ ID NO: 576 - DNA, 2627 bp, Xanthophyllomyces dendrorhous
ggcatatagattacgtactatccgctctgaatacgtgttgcttgtgaatgtgtgggtggaaaggaaaggagaaagtgaacagagagaagtggaaggggtgacccatgtctgaatgtttggataaatggatggacatgataaatatggaaggaattgaaaagtgagaagggacgttgggagtatagaatgagcgcaaagaaaaccatgagtagagaggtaggtataagcaacaagcttaagagaaaagagtctcagaggaacatgatgacaagatttgtgatgtcagagatcggggcctcagatgcacaggctcttccttctttggatactatcgcttttcagatcctgcgcgtcggttggtctgtggtgtctgaattggccgtatcgggcaagccgaggttgcggtgcctgctctgactgttgaccttcggccgagtcgtcgtcgtcctcctcctggagtgcactcatccaatctaactcgaccccgagacttctcgcctttctgtctctgagcgatctatcgatccgtcttcggcctacttccatgacttgcctgacgagtctggaggactcttcccgctcgggtggaggggtgatagtgagcgtgggaacgatcagctggtcaaccctcatcgtggtgggcggggtggaaactagctcgggcaggtcgatcagggctcgaggtggtgtgacagttttttgatcttcctgttgttcccgctgacgtcgggcaagcaagaagggtggaagtctgctggaaaccgagatcggggtgtggtcaaagtacgacgtcgtttcttcctccggggtggtcaccgagatactgggcgcgaggaactgggtgacaattgcctctgggtcggatgagcgtcggaccgggagatgcttgttggccgaatgcttttgccgttgttggtgatgctgatgattactttgatggtacgctactctgcgctggatttgagcgagcgagggaagagagaaatgccgcttgtcgtcgaatggtctgaccgctggtccagaagaaggtagatttctagaggcgccgactccgaagattgatttcagagggccggccattggatgcggaagttgggcaggagcgttgttcttggtggaagagattcgccgtttgagaatggcaaaacaaggacgacgaccgagctcaacggtttggtctccttcgatctcgccgtcatcctctgcctggacaagcgtagactgagctccgaaagtggacgcgcctattggggtcatgcaactacctgaatcagatccgtcgtcctcatcggaaccagaatggatggtcatgccaggaacctcctcctcttcagaaatagaatgttgttgtctagaagaaaagtgaggggacatgtcgtgagacgcgacgacggagccagtgagaccaccagactgttttacgggcaggatttacaaacaagtgatgatagtattgatggccgatgcagtcagccaagtgtcatgccaagttcgagtcggaaaagggggaaataatcttagcaacttacacgcagatccctgttgttctcagaaggagagaatgagaaggcaagaggaacagggctcgacaaggtcgggttgacttgtgtcgatcgtgaaggaaccatgtgagaaggtgataggtggagagcttttgggctgctggacacccgacggggcctgagtcggacagcggactgaaaacggaactggaattgatctgcttgaccaaggcgcaagagaagagacaaagaaggtaagaagagagagaatgccaaagaaaagaaggaattggatcgcgtcagttgatgcacgcatatccatggcagaaagcaaagatggtgagataagctgaccgtcctcaggcgtggaatcactgtcggcttcctcctggacggaagagagtccccaactgggagtgttgcagatggtctcccgacgcctggctcgctcgcgttgagcactcttttgagcggctttctcggaaggactcggggtttggaagcaaggggtatagaagagttctggagacaagtcgggagaagagtaaagcactgcttcggcacacgtctcggcgaggaaggatgaagaggctgattgaacggtgtaagctagcatggcagacaagagaggcagaggatatgttctatctttggacgaggattatcttggcgctcagggctttggatgataagagttgtgatctgaacgagggacgatcaggcggtgtcccgaacgggcagaaggatagatacaaaggggaatcagagacactcacaaggctcctttctcgggaaaaagcagaggacaatgcaagaattggacgatgtcttgagacacgaaggatagagacgcgacagtcaaagagtgtcagctcaggggtactcgggaaggacaaagcgatcgacccaggggtaaaaagaggtagatggacggacgcgtccagaacggacgacagacgaccagaaccaacggatcactcacagacaaaacaagaaagaaaggtgcagactttgacgagaaacgtcgacagagtgtagaacgaccagcgttagaagattctttgttgtgtgaatgtgagtgttattttttggtgtttttctgtatttttattgtgtgtatattct

SEQ ID NO: 577 - DNA, 26063 bp, Xanthophyllomyces dendrorhous
ttttttttgttttttttttggatctaccaaaggaaagaaatggggacaaaggaatggaaggggtggagagaaaggagtctaaccgggtaggcgaaggagaaaaggaaaagaagaaggaaacgaaggaagagaaacaaacggaggttgttcctatgaagaagaagacaaaacagaaggaaaagagacggacaaaagaaatagacgaaatagagagagaaggtatgtgcgtctaatgtcccaagcgggagggggccgatttgttaacttgagcgtgcgcgtgcgcgcgtgcgtttcattcgtcaagacccgcctcgttcggatgcgtgtcgggcgtgctgacgacacgaaagagcggacgtgatcgacgggaagatggctgacttgatctcgtctgatctcgtttgcttttggtttgcttttggtttgctttgggtttgcgttcgtttgcgttcgtttgcttggtcgtccaccggcttgctcagccgagcttcccaaaaatacacgcgtccgatgtttgctccgggacgtttttcctttgttccgcaacgggcgagtgaaccaccggaacccaacccttcttctcatattctgggtggcgtgtgcgatctccatcgttcgcctccctcgggcttaacatttccacgttgtataacagttcagattattctaattctttattcgtttcttcagcccttgctctattcgataaagtcgttcgtggtagagtcatcttgcacagatgggttcttttggctgtttccctcgcctatctcctcctccttccgatcgtttactctggttccaaccagtcactctacatcttttgttcttacagtctcagtcggcagaatcctatgaaaatcatccattgttcttctaactatctatctttttttctattgttacggtcatcattgttctcgttcacatcattgttgtcactgttatcgttatcgccattattgttaaaatcactatcttttgttgtatcgccattgagtgtaatttatggcgagacatcctacgcaatggatgaatcaatcgagtaattaattgagtattggatccgggtcggtcacacttctcacttcacacttcacacacacacacacacacacacacacacacacacatattcgggtaaagcagagaatacgaaaacagatgaacatagatccgagtctatcagaatcgataattaagaaacctaattgaaacaatgaacagccgaagcaattggagatctaatgaaaagaagaaaagtacgaaaagagaaacgaaggacaaaaagacgaagagttggtagaggagagaaaacataaacgttggaatttgtagaacctacgggtacggctcagttcatatatgcacgtacgcgcacacactctactactttcctctcttcttcttcttttccccggccggagccttgggaaggtcgtcgtcgtacacaaaccggacgtacgtcaccttggtcctcttgatgatggacgtcaacggtggtaactttgttagatcaaggtttccgtgaacgtccagctgaaagaaagtgtgaaaagaaaggatcggaatcaatctctgaacacgtgtacggacggcgtatgtatcgcggaaggagaaaaagaagcagggaaagactccgtcatattctatgaagaaagaaaatgaggaccaccctcgatgctcttcggagaactttattgaaaaagatcaaatggaaagtagaataactcgaaaacaaacaacgatgaaaaaacaataatgacaatgaacttaccgaagcagtcggcttgatgcaactctttttcagctcagccgaaatttcctcagtcgactgatatgttcgatcagctccagatcgactgttggataccaccaaagatttcttccatttcaccatcctgtcgcttgaccgtcgtgcttccacggcgctcgtcgaccccgaccaaagttgttttctcccgcaggtagccgacgagcggtttttccggataggtgacacaaacacctcatcctccccaggtccgagcaaatgagttttcttctcttgatcgctaactgagcccccgccattgagtccaggccaagcaccatcttcttcttcttcttcttcctcactctcgctaccgaaagacactttccttcctctaccggttccagcgccggacgtgcttctactgctgctgctactcgccgccgccatcgccaggggacttttcttcttaggtccgggtgacgatggccgatgctcaccttcccgacgaacgaccgtccgagtcaacgcacagaaaagcacaccgttcacaatcgtgttgtgatccgtcagactagctagatctttgctcaacattggtggcggcgccggcacaactgggtttgccatcgccggcggtgctgctaacgccgacggaagcggaggaacgggaggaggaggagttagaactgttggcaaggaagcggatgaagaagacgcggtagaaccgttcaaagcagagtgaggaagtcttctgggtttcatggccagagaaggaattgtcgatgaggctatcgaatgaaccgcaccggccgaactagtcgtcaacacaccacctccacttccgccaccaaacccagttctagatcgatgcgagaccggtggcaaggcgatagtcggagctgcgcttcccacaggttcgcctgccgctcgagctgaccgacgagtaggtatcgatcgaagagaactagccggtccgctcggtctatcctgtccggttgtcttagtggacggcgaaaccaaggatggcgctgacgacaatgggaccgaagtgaaggcagaggcagaggcagaggtaggtatcaacgaggacgaaaccgaccggacactatttcccaatccaggccctgcgcctccttcgactttagccgaatgatcttttgttctgtgttgatcaaatgtctttctcgtcaaaccaacagtcaacgcctcggacggaacgtccttctgtaacccatggccgagagaccctgagctcgtcccgcctaatggtctcactcgaggtaacaccgtgggagcgatccctggagcaggagataccgacccggtcgatcttgagagcgggccgatcgagtgagatccaagaaatgtcgctgtcgtcgaggatgatgaccgggtcgtaggtgaatggaggactctgacgggcggacctaatatcgtggatttcgagggcgatgagtatcctcccctagacttgacagagacccctgggatatatccgcgagccttgttgctcagtgtcggccggaaagcggactataaatgatagaaaaacagttgtattcggtcaaatttcagttgaaagaaagagaagaaaggaaagaaaagacctgagtcaactccaaagacagacaggatgaaagagagaattatttgaacaaaccttggaaagtgctgatctctcgggtacattgatgtctcgtttggggacctttgattcggcgttggacccaaacgaccggctcggtccttgtagcctcgaagaagaaaacgctggagacgacgaagcggtacccgtcgcagaaggtagagatagtgatacagacagaggcttcaaaacagacactggtggtatactgataaacgtagaagctgacgtagaatcagagccggaaccagagctaaaggtggatgcaacagaattaggaaatgtttgtcttaacgggccgggcgatgtgatcggttcttgaggtcttgtcgactctgcctcattcagcgcaaactcggaaggcttcgacagtattctttgcgacgctgcggccgcggtcgttgacgaggacgatggttgtgaacgcgacgattttcgtttagagtgagagctcttaacaggagacttttggacgcgcttcggcgtcgaacgaacaggctcagaaaaaggttcgggaaggaccgcctttggattcaaagaagaaacaaccaacacattcgattgcgcgtttgtatatgctggttgaattcgttcgcaaattgccggttcatccaacccagcagaagtgttaggcgttatcgaatgagctgcgagctgatctggagacaatttcgggctcgaagttggagtctgatggcaaagagatacaggcgagactccgtccagcaaagcagctgatccctcttcactctgactgaaagtcagaacatcgaggcgcggttgatcgctcggctggaatttctccacattcgattcccccaaatcgtcccttgtctcatccggtggcagtctcagcacctcatcctcgccttgtccgctgatttcctggttttcatctgcgcaaggctcgatatggtctgcgctgaccacgctttcctcgtcagccacgcctcctgcatttccaacatcctcctcaacctcctcaacctccgtacggttcgtaaactctgaactgtccccattcaccacgaccttcccgctttcttcacctcgcacatccttctgaacgtctgtctctgatttatcaccgcttccatcagcgctttctaagtccatcgcgtattgggcgtcagaggtcgcgacttctgcgcgttcttcagtcgattccgttatggtttccttcgtatacacctcgacaggtagctcagtagattgctccatagactcctcaaccaaatttgcaggcgtctcattgaaagtcttcttggagatatcctcaaagtcttcttgtagaattttcattgtcgagtcttcggcaatctcctcgatggtttcttcggtgacgacagaggcgacctgtggggtgatgatcgggatggtctcctcgacagtgatttcggtaacgtcctgggcgtgttcttcggcggtctcctccgtgacgatatcgaaaggaatcatggcgatcggctcagtacctgcttcaacaggatctcccgagatacaatcctcggtgggttgagcgaccacgaattcttcttcgggctctctctctctttctccttctaattcttcctgtttggcactctccacactctgatcgagcgcacaaccggtctcatcgatgtcctcctctttgggaacgtcggcttcctcttcttcttcctcttcctcttcctcttcgtgttctccctcggtctcccattctccttcgtcctcctcgttcgcgtccaattctgcatggggtgctgcttctggttggtgaacagattcaggttcaggttgatactcaaactcgtcctcggagtcagccgacatagatccgtccgctgatgaaaacgattcgtctgctttcgccaggtcggatggcttccttcggttgtggtgaaaagttcgcgcacgggaggtgatgtatgtaggaaacggtgagccgcacacgggtacagctgaaggtgaaggtggaaacttgggagaacgcgtcggtggtgaaggagtcgttgtcgagtgaggaggagaagcaggaggagtggaaagagagctagcagggttatctatatatttattaggggattctaaacgcgtctgaggggatggtcgtcgtacgttccgcggtggtggagttgaacatggggatcgaactgttgtctcaagccattggcagaaaacgccaaagaatcacattgattctttggtatcagactagccaagaccgaattctggaaaagaagagttacagacataccactcgttacgactgataactcgcattgactgctcttggtgggtgataggattgaacgatctgccgctcggacactcggatcctcccagagtgtctttcgcctatgaaactctctcgagtccttgtgtctgaccttctggaggagcttccgttcgggagttcttgtcggaccatagaagatcctattcggattcgaatctgaatcggacccagaagaccactcggcgaacgaactacacgtcgacgcggtctctgctgtcgtggactctgtatccgaggcgtcgtggccgtgatcgtgattaattagttgggtaggagaacagacggaagtagaagtggtggatggtaaattatcagtgatacgtgtgggtgtgagaggaggatgatccatctagagcttagagaatgaagcaatcaaggtagcgcgtttgtaagagaggatgggatggacgatgccggttgatcacacacgctctctctatccaacacaaatgatcttgttgtttcttctgtggatgtacaaaatcaaacgcgtccgacgggaaccggccgcttacgtaattctgataaatttgtagccgcctgggctcaaatcctacaggaagagtacatcaattttgacgacgacatttttttccttctttttcaactggagttctcctttcttgctggtctcttctgaattgctggttgacgaacttctcttcgtcgtacaggaagaagctcactcgtctttattacacccttgccaggttagtttattatcaacgcagatggagcgcatagaatcgattgttgactttcatttgccttccgtctggtcgtctgcttcttactggtcgaccgactcgacttctcttcctttttttttcttttcttttttttaataccaaacagctcctaagcctttgaataggtcttaaccccagaagggataatatagctcttcgctattccagaaacaggtcgacacttttcacgttaaagaacttgcgtgttctttcgctttttcggaacatcatatcatggtctcagcactctttagggccgcagaggccggagacctcggtcgagtcaaggagactctggtagagcagggagttgatctggagatcaaaggtgagtcgtcggctttcgtttgacctgtgtcggaaaacctcgtcagtacgggtttccagaaaggcaaccagcgtattggtttccttctagaattgggtgctcacgccattggggtttcgcgctggccttttctctatcgacattcagatcacaccgggaccactcccttgatcgccgccgtcaaaggatctcacgtcgaggtcgtcaaggagcttctgactgctggtatgtctgctttttactatactttgaagtttctacttttttctatctgccgtaatgggcatcatctgctacgttcttctagcaatttcacaacatcttcaagaacactgatcgttccaatggcgtgtggggaaaaaaaactacaggagcagaccctttgaacccttcgtcttccggccctccctccatgcataccacactccccgagatcctttctcttctccctccccttccttcctcccaggtcaacccaatcactcaggcgcccccgcccccgatgcattacccgtctgcccctttctacccaccgtccgacatgtactcccctcccaactctggagatatgctctatcctttgaacggagctaacaacggtgtgtattttggaaatggtgcaggaacaggtggcgctggtggcttcattccttatgggtctggaggcatgaacgggttcatccccggaatgggtctacctcctcatatgatgaacgcgccacacatgatgggttatgggatgggcggtttcattcccggacacggaatgcctatgatggatcctcaaatgcaacaggtgcctccacagcatcttcagcagcagcagcagcctggttcggacgagaaaggcgacaacagtggggttgacggtggagctggaacgatccctcctccggatatttcaaagaacataccttgcaagtgagtagagttcttggcttttcatttgaagaaaacatgaaacaatctctaaagttatctggtctcgacgttgtttcttgacaggttttatcccggctgcaaatacggtaaccagtgcgcattctcccaccctgctccccagcctaacgtgcctgttgccatgcagcagccgatgttcaaccggtccccctcgattatgtaccctccgtacgagtcttcctccccggtctacaatccctactctcaccacccccacggtcagccttcattctacccgatgaacccgtatggatacccccacccctctccaccgcctccgataccgatgaatgccgctcctcctcctcctccactcatgcataacatggccaaccctccgccgcctaccatgttctcgtccagagggggtcccccaccgatggattatgacggagataacgcgttcgtcgtcgttcctccggtgaaccaggtgcctcctgtgtttgcgcctgctcccgctcctgcctcggctcctcttcccccgtcggctccttcggccgccccaccagcgcctcttcagccatcggccgcattcgctccttcttttgttcctcagcagactgccgctaccgctactgctacttccacttctccttctacttctccctcgtccccagcctcgcgagaaacgaatgctcctggacccggcgctgcttcaccggcagagaaccagcagcagcagcagcagcagcacccgacgtcctcatcgtcttcgacgacgaaggcgcctttccccttccctcctcgagtgggaggtaagtttggaccattccatcacggacctaacggaccgaatggattcaataaaaagtggataggtggtggaggtcgacaccagggtccgtcgaccaagtgggtcggcggtaacgcgcctccgtgcagtttctttcaagccggagcgtgcagaaacaatgacatgtgtcgtttccctcatctcttggccgacggaaccgattgccgactacctggtgtcatcgatggttcgattccttctgcacctatatcggccgtcaacggtaagcacggacctgcccgaacgccttttgcgcctaatttccctgcttcgaccaagacccttcagaacaacgcggccatgaagatctcccagtcttcagccgaggttccggcagacaacctctctctatctcagctctccctcgagtcgtcggcaccgaatggatctgtgccagacaaggccagctcagctgtcgatgatgctgctgcaacctctgcctccctgactacgtcgttgtcgtcaggatctgcagctcctgcagctccttcctcggctcctacccatattgccgctcccagtcctaactccaacgcgcactcgtctgcccggcacacgacgatggtccaaggagctcgatctcagccgaccactcgggtgggctctcctgccgcttctggtggagccggtaaccactatcccaatcactttctgccccagcgaaaccctcgatctgcctcggccaatgcctttggcggaagaactccgatcgctgctgccaactctgccaacggtagcaacgtagccgcttcgatgactactcctacctccggtgctccgactcatgttcagtcgagtggatctcaacaccagaaggtcccctcctctgctgactttcctgctcttggaagctcaactgggagtctgaaagacctctctggttcagcagtaatcgtcaacggaaacggcaagaccgcagctcagatcttgagcgcgcccgctccggagaaagctaagactggggccgtatcggcaaacggaaagaagcagcctaccgcgcctaaaactgttgcccctactgcccctgttatacctgctcctcagggagatgacaaggagaccaccggggcgagtgacgatagcttttcatttaccgatgtgagtcttgctctttttttttgtcatcattgagaagggtaaattagattactgtttctcattcgccgtctcaaataccttctttgtcacctagaaatcatcagagtccggagaagacggcgtgatcgtcaagtcagccaagtctgttccctcagcgcctaatggaggaccatcacccggtccagctaagagaaacctcgttagctttgctcacatggttggaggcgtcaagggttaggcggttctctcttgcctcttttctattatctgcattataccttccatttgcattccctcttttcgtgtgattacgttcgttcgcgagaaatttggtttggagtcgccaaagatattccccttacgattgctcccccccagttttttcctgctttgaacccactctgccttggtttcttattttcactatttgatatcttttgactactcctctcgattcactctctttttatatcttccatatcatcgtcactggtcgctttccgagatcttttatcttcctctctctctctttgcttcgagtttgcttcttatctctttctataatgtaccaagctgctatcctttcgattctttatcatctttctttctattttcccgtctatcgtctttctcatagtactctctggatcttcttccataaaaaagccatacgcgcattcttcatactaatatacgaaccctgtgagctcagtcttccaatactcaatctctctcggtctgtctgttatcgtatcttccatctcgtcccactatctatctttctgtcacctaccacccacctccactccttcgtatcgtgtcctagtttgatctccgatattctccactccctatgctctatctccatttcttttgggttttctcccctccccctcttctattcggcgacgtgcttgacaggttcgtcgctgtcgcagcacggctttttcttgatctagctcgcgtctttgaatctgttggcatctatgtctttattctttcactttcttgttgtcccacacaaacaaagacagagccaaagagtgtgcctcttgtgtctctcttcgaaactgagccagagttcattatcgcgagtttgtatcaacctggggactaaacacagacctctgatggaaagctaacgagatcaaattcacttcagctttcaaggagaaatacaaagagatcttttttcttttctttttttttacgatcatacaatgattcgatctctttttattagttgttatctttgccttcgatcttgatctctccctcctggacgagctccttgacctcctccttcttcctctcgatctcttctgacatcccggacccaaagccctcggcatcattcaacgctttctctttcacgatctcctcaatcttctcttccggaatcgaggtggccgtcgtcgaaggggtatcagaggacgaagaggattcaacagtcacctcggatgcctcggcagctttcttggaagcgagctcttgctcgatctctctgacgagcttatcagcgagctcctggatgtacgttgtgctagccttggtagtttgaagcaatggcgaggtcggttccgaggggcctgcctcgacatcgaacctaaagagttccccagagaatgaaacaaggacgacaaagcatatcagtatatgaacatcgcgtgatctcacgaaaggagagcagagaggtctgaactatcagaacgaaacaaaacaaacggagagacacaacgacttacttgccccgagaatacttctcaaccttgatcgacacatgttcacctcgtccactagctagaagaaccttgatcatcacctcgacactcttgtcatgagcgtcccagatgtccatcgtctctgtgtaggtgtatcgttcgaaaacctctttactcttcgcatgaacgaaaggtgacctgaccgccgcccaacgcttgacctttcgggggtgctgagtaggtccagtaaccgggatgaggagagcaagagcacagtgtcgaaccatagcggcgtactagatcgttgaggttgagaaaaggtagaagaaaaaaggttaagcgtgcatactgagattgagacatgtgccgggaagacacgcttacaggtcgaagagattcatgctcataggcggtgaacgtgatgctgtgagtgagaatgtcgtgggttttaggtaatgttgggggctatatcaaaagaaagagagaagaaaccattcgagccacatagatgagcgattatgtccatcgcctcatagccataagtttcaaatcgaacttacaagcgcgtaaacatcaatgttggtagaaggaagtcggtacggagggagtctatagttgggaaaggttcacaaaggaagatagaagagtaagtgcgagttctaacagcctgacgagtcttcttcgtgatgcttgtcacgagaaagatgatgatcagggatcgacttgcccagctcttatggccactttgttgggaatcagctcagatacatcggggttcaagaaaggtcgtcgaggcttgttgtctccatccttggaaggataactccattcgttgggctgtcggacattgaacgaaggagaggaggtgaaagatcgagctgaaagaccggcgacagagattgatgaccggttcgaagccagtgatcggagagcaaagggaccactcatgtttaaaccttcgagggaattcagagaatagagacaagactgagtcgtttgaatcagagaaaggaaagatgatggacgaccagggagtgtgttctttctttttttgccaggtattaaaaaaagaagacgcggcggaaacgttcaagtccggaagtctagccctgaagccttaacctaggttgccgcgaaagactagcctgccgagaacactgccgtgcttgcgacttcttgaggatacgtacgacaatctaaaggattcaagtttccaaaaggactttcagattcatagtcttgtttgccatgagtcggtccaagcttgctcaacttgctccgatctcgatctctgctctcagcaaaacatacatcaatctggtttgtggaggaatcacgtcccagggattacctactcttctggacgcgttgaaggaggagaagggaaaggctagagagcgtggggtactgacgagtgagtagagtctctttcaggatatgtatccaagtgtgacttgatcagacgaatctgtacggtccctcgatctgaatcggtttgtcttccatgctctctgtgatcgaatacagtctcaaatcatatctcggtgtaggtgtgtctatgaacatggtgaagggctgaaaagcattactgatacacagtcattctatcttcctgcgcggcatgctacccctgtgatacctcagtgttgacgatccattcgtaagtagtgaatgttttgctctgctggctatctctctgtagccgttctaacgtatcttgcgttcttcttcacacaacagctatggcaggtactacctgtaagtacaccaggtttgatgtaacaccaacatctttcccgtctaatggcaaccgatatcttttaatttggtcaatcacctccaaagtggaagtactttttcaacccgcgcacaactcgatgggtctctggtgcccaggacatcatgttcaccaatccgtgcgcttcctcgtctgtctttctatgctttcattttcgtatttagctaatatcgattgcgctcggcttcccatagagtattctctaagttcttcgatgcaggccaggtcatctcaacagatcgattcggtggaatctttcaggaggccatcactgaatcttcccgtaaattaggccgaggagactgggtgagtagatggatcatatgaattatagtagaaagctggcttaccctttttcgatcttcaggttcacgtgtttcccgagggaaaggttagccagccatctttaaacccttattttgaggatggcatgtttaggtttcgatggggagtgtgagtatcatcttgtcttcaagacataaatgtaggttatcagattggttaatcgttggggctcctttgtgtttgttgtcgtggcgcatggatcgcgtaggagtcggatattcctatcttcccctataccacccaaagtcattcctatgcatatcgccggtcagcagagcttgtaacttgatgcctctccatgcgtgacactgtactgatttcgattctcaacccgtcttcaggatttgacaaagtgatgcctgagccaagaggcttccctgcgtgtatgttgcaatgcttgattcacaaacttttatcctctgttagcattgctcaaagaagaatccgacttcttcaccacttctccaacagttgttccgagaccggctcctactggaactttgagggttgccgtcggggaagtactagatgatctttgcctaccatgtatgtgcatttttttctctttccctttgtttcgcggcaccaagtcgattcaaacaacgataggttagacttcttggtgatttcaactgatcctggatttttctttctgtatatctagtgtggaaagaatggcgtcacagggtcgatcaaggtctgataaaagatgacggagatggcccagaagagagggagcgaagaatccaatttgccaacttgttgagagccgaggttgagaaactcggagtctcaagtgggctggcagagtctatagaggaacgaaaggcaaggagtgtgagctagagaatgaagattcaatcagctgggtggaccaatacataacatatcatcttctcagatgctgtagattactatatgaagaacacatagcaggggtaatcgcgtgacaagacccaatgaaatcacgtgacctgcacagctcacctctgcctctggtcctttggtgtcagggatgtgacctgagtgtcacacctcggtaaccttcttttggttctgttgtttctcctgcctcggtattccttatgctctctcattacatcaacatgcaggtatatgaccttccagcgcaggtgcttctagcaccttctatgacctgttctattatgcataatcgttggagtccaaggatgatatataagacgggtcccctttgccacccatagcatagtctaccaagcctgaatcctttgtcattccttggttccctagtactcttgttccattgttgtatcaaccttattcatacgatttccctgccttgcgctctcgtcacagtcaccaagctagagagcctgaacttccttcttgccagccctattccctgcctggttacattcttgtaaacttcccgttaccctctgaacccggaccctgacatgttgtcaggaaccagggttaggtaacatatagcaagagatcatccaaaaacggccaccttcttttgtgaagggaatcttgctctctttcttcttggtctctccatcatgagctctacacaaccggcatcctcgataccgcttccattggcaatcaaacagcctccgcggtcgtctccaatatcactcgtaaggttctagtctttttccagagtctctgttgtcttggccgtcaagacgatactctttctgctcagtgtggataacatccaggaaagcatgtttcttcttattttctcttctataaactagacgagccatgagatcaacatcttgattgccgaatatctagccgaatccaacctccttcactcggcatttgcgttcagattagaatccaaacttccaacaacgacgcctgctgagcttcatgggctcaaggttgaacgaggtgctttgatcagatggcttcacaaagggttgtgttggagcgaagttgaaagtcatgtcaccgaggttcgtttgctcttcttttaggacgtctctttctctctacagttcctcgtagattcctggatgggagacgaaggctgagcgagcattcatatttgtttccgaccgatcacagctcggtcataaacctccatgttcggcgccgttcacccttctgaaaccacacaaatgtgtggcctacttgccgcccaccgcatttccatccccttctccgccaccaccatcgccgtcccggtctgtgttggcaggtgaggggtcgacggaagcgtcgagctccaaactcccggaaaattcaataacggaggaaaaggtgagggatcaaattcagacggacgcgaacgcgacagacaaaccgcaagtaagacaagagcaggggaaagagagggaaaagggaaaggagaaagagaaacacaaggagaaaggaaaagagagagagagggatggagaagcaactagcggcaatggtaagagtaagcgtaaggccagcctttctaccgcgaaactcgggagtgaagagaacggaaagagcatggtaagctcctcttcgagcaatggaggaagtggtggcggtggcagtggtggttccaaacgagccagagtagaatctccgcccgagtcaaacgaaagctcggtttcgaataagaagggtacgtgttttatctccgtattttcgtgtcctgataattgccccgtccgttctcgtgtactctggatactgacgatcgacatatggatcaaatctacagcgcctggtcatccgcctcttccttcgttttcacggaaaaccacgtccaacgggtcgaacatgaattcaaaaacgagcactaccttgaaaaccggatcaaaaccttcatcaccctcggcaaacacagtatcccttccgtccgtgccgacaagctcttccaaatccacaaaaacagcttctcctgagacagctcctacccgtccacaatctgccgactctctttctcccttggttaccgcaccgatatcaaattcggtgacaaaaaagaaacgaccggtaacaaatgctgccacgactgccgatttgtcgtcaaaaatagttgaagattcgaaacgaccaagtactataaacagatcgggaggaaagtcaggggagattgaggggctcatctatgggacagattacaccttagccaagaacttgaaggaggtcccggtgtgtaaggaaggggagatagctagcttcaagtctcatacgggcgaggtgtttgtctgtgcatttggaatcagagaaggcatcttggctacagggtgggttcctttcttattaatttttctctgtgcatgtttgcgtgttgtattcttctttgcttaccattcatgaacggcagagcgggagacgcgtcggtccgtttgtgggagtttacaccgccgtcaggtctgacgactgcctggtcggtgaaggaacctccgattatttgcaaacacctacctgccacagacaaaaaggatatcacgtacgtattgttcaaacgaaagacatacaggtgcggtatgatgcggtactggtatgttgacatgccgctatctcgattttggtagatcgatagagtttaatccatctgggaccctgatcggtacggcctcttacgatggaatcgcccgtatatggacacctgagggagaacttcacggagtgctcgtgagtttcttgactttgacaattctgaactggagagaagaaagtctgacagagtatggcttcacgtcgctttacgaccctacagacccgacattccggtccggtgttcagtctcaagttcaatccgaaaggaagtttgatcgcaacggcgggaagtgatgggagtgtctgtgtgtgggacgcggtgacggctcgattaaagcagtgttacgagtttcattcggattgcgcgttggatgtcgattggttcgatgacgataccttggccagtgcttccaaaggtgtgtgtttctatgtttcatagttatccatattttgctgaacttttttctaccttctcgacccgtcttctcccctccctttctcttctcacgaaacacaacagacaaaacaatacaaatatgtaaagtcggttctacgatccctttccggacattcaagggtcacacggacgagatcaaccgggtacaatggtctcctttggttagcattcctgacggatcgacatcaggatcaaaagcagggacgactcgccatcgccgtcaaagacgaagggtactggcctcatgttcggacgacgcgaccgttaggatctggtcactcgatggggaagataagccttcctttggtctttcttcagacgattcttcatcaacaagcaacgcttcgccttccacttctggttctgccacgacgtccaacacgaattcaatgatgaactcgaatctgcacatgacaaacacgacgacaacttcgtcctcagcagctgtatcttcgttcctgatgactggcggcggagggggagagaggtgttgtctgggcgtactgagaggtcattctaaagagatatactctttcgcttggtctccacttccgtatgaaggctcggaaaccaactctgggactgaagctgaggtcgagactgaggaaagactggtattggcaaccggctcattcgacgagacgatcagaatatgggacatccaaacaatgagttgtcgatgggtcttacgagcgcacacccagacggtattttcgctttcgttctcgtgcaccgggagatatctggctagtgctggctgggacggtcttgtcgtcatttgggatactgaggtttgtctttctttctgtcctttcgcttgttgctcttgacttttgacattggttttatctctgacttgaaaacattcaaacgcccaacagacgggcaaggcgataagacatcataaggtaccaaacgaagtaggcgtatacgagattgagtggagcaaacacggaaaggtgattgcgatatgtcaggccgacaaggttgttagtctgattggcgtcaacgatctggaatgaagattgtttctcgtgttttctttcgttttatcgcttgtttgagagtgagcaaaggatcgggtacaacatgagaatactatgcactattgagacaaagaaagaaggaacagagagagggcgcgcgggattagaaatagggggatagctgtctatctagactctgtctttgcttccagagactgttccccaggtaaagaaaaggagaaggacaagaatcaggcgctcgattctctcagccagctagagtcagagctaatgaaaagaagatacagagaggacacaccttcgtgaagctgacggaactgccagagaacaatctatccgcatcggtgacttcatactttttcttgtgagcacctcccgccgtcggcggtttcagataatcgttgaagccctttcagagagtatattatacaagtacgcagaaaaaagagaacgaagagacttgttagtgagttcagggaaggacgatacgtataggtatgtagggtgaacttagagatagtaaaggagggctaaccttgaagatatttccagtgttctgaccgcattcctccaagtaggagccttcgaatgcatagatcttgccttcggtattgatctgtttgaacgaatgactaagagttaggtgtggtcgaggattcagtgttaaaagagaagggagagcgagaaaggacagcaagaatgtacaagttgcttctcaatctgcctcttccgttggagtgcgagctgggagcagagtagtcaagagatgagaacgtaatggattagacgaaggagcaggcgatctgaagagatgagaaagaggacagactatgagatcgttctttgccttctcggccacgacccgaggatcggccgctacgttaggttacattaagaatgaacaagcgagtgggtgtgttcagcataggtgacaaagaagagagggcattctatgaagagagaccatcatgacaaagtgagaagacacgaagacatggtacatgatacatgccacatccactgtctcttgctctatcccaccactcccactcttgttctcatcctcgtttccattctctcactctcaatcccaatctacttaccgtttggaatgttggacatggccgttttggatgggttctcgaagacaggttacgacattgttcgcgtgcctgatcacactgccttactgcggatcgcccagatttgtcacgatattgtaaccatgtagatcggtgacacgccggtagtcaccctcgttatgccccgcctcatcacgcctcgcttgccctttgttgttgttattgttttcctgtcaccccacgcgttccttctcgttttcttttctttccaatactttcggtgcctgtcacttttcccctgacagctttttccgttcctattcttcctgtcaactctggtttcttcccttcatccttttctctcttaaccatcaccccgtctttcgttgttctctctttccctctacattcgttcattcacttgcctgctctcacgctcttatcttcacacactcactctcactcttaccatgctcgcttcaactctcgcttccatccttgccgttgctgccattgcagcccgggccgtttcggtcacctcgccagacaaggacaccgtttggggatccggagactcatctgatgtcagtcgtgctttactcatccgtcctctcttccggcttcccctgttatctgtctcgctcgtcccttctttgccatctcctctgacttgaacaaatcttgaaaactcattactcactatgcttttttctttattgtcttgtcctcacttttacctcatttgtcccgccacttcacttcttctattcacacattggtatacacccatatgcagactgtagagtggtcggtcgtgtcaaccgatcctacctcgttcgatattgttcttgtcaacatggttcgtttagttgatctgcttccattcttttctatagccgcagttgctcttccacagcaaacttcctaagctaagcctctcgtcgtactatcactatcacgttattttcttccctctttaggccagctaccctacctcgagtacgactttgttgaagagcgtcactgcttccagtgggtctgccacagtctctgccccctcgtacgtgattttctgcacctttaggcggtatcgtccactgtttgttcaaaacttactttttttctcctttctcctccttgctcttcctcttcacagcggcggattcccagtaggaaacgcgtaccagatcaacattttcaactctcagtccagcgcaatccttgcccagtctgctcagttcaacatcaccgagtcggctgcttctgcgtctgcttcatcttcctccgccgccgccgcttcgtcttctgccgctgcgtcgtcttcttctgctgctgcctctactgcggcagtgtcgtctgcctctaaatcctcgtcttcaaagtcgtcctcggccagctcgtgagtcatacggtatctctggttctgtagttctatggtcaagatcaaatgttgacatatgtatatattccttcgtttgatcattccttccattcccttctaggacttctgctgcctctgcctctgcctctgcttctgcctctgccagttctagctcagcttccactgcggtcgagattcctggggctactgcaagcaccactgcaagcggcgctttctccgtggtatccttgccctcggtcctcttggtcgctgtcattggtctggccaccatcaccctcgtttagatgtagctgggctatgttctcttgggcttctcatgtcttttctaattattatgataccaacacggacaatctttttgccattattctctccaatgtctttcttccttagaaagttcttcttcctagagccaaatcttaaatggtgtctataaaccccttcgtttgggtcttgctttctttcgtcttagtcattctttgacttgctgtttttcttcctcttctacacaaaagaaaatgaacaatgcttgttgcttttagccttaacctttttgaacggtactccacgtgtacttcaaccgtttgatttcgcccacggttgtttactgccaaggtgtagtaatcgcgtgaaagattgattattcatcaacgtcgtcatttcgctgatcaccccaacgcaggtgccaatagatgcagatgaactcattcaaaagccgtttggatttttagatcgatctgtttctgcttcttcccttcttcaatccatcagaagacctcccatctcaaccaggtaagtgctctcaatctcatcgatttttgaaaggctctctttccgattgctgattccttcttctaggacatcccatggcatatcctttcccgaccatcagatctcttgcccgatcgaatcaacccttcaacctctgcgccatcctccacagaaacatgactacccaactgaagaaacctctcgaggtctacaccgccgggacaccaaatggccaaaaggtcaccatatttctggaagaactcaaagcggtctacccagattttaagtacaacgtgaacaggatcgatctccaaaagaatgaacagaaggaagattggttcctgaagatcaatccgaacggaaggatccccgccttggtcgatcctaacagagaggaccatcctgtctgggaaacggccgcgatcttgctctacctggaaaagcagtgagtctggtgttgtcgcgctctctctccctttctcttatctatgtctgatgtaggtctttttttttggttcttgttctcctgaaagctacgacccagaccacaagttttcgtttggagattcggcagatgtggataattacagaagtgaaatccttcagtggatgttgtacgtttcgctatgcatttctcgcttggctcggtgcggaggcctaaagagaaacgagaaagagacactcaccttgatgattcggatatccgttctttacaaaaaaaaaacaaaaaaaaaatcagtttcgtccatggaggagtcggaccgatgcaaggccaggcgaaccatttctacagatatgcacccgagaagatcccttatgtatgtttctccctctctctctctaaatgtgatctcgccttgttgattatgaatccgtcgttacgttctctttccatcgaaacaggccatcaaaagatatcaagacgagaccagacgactgtattctgtgctcgagaccaggctccgggacagagactacctcgtcggtccgggaagaggtcagtactccatcgcagatgcgaacgcgtttccctgggtgttctggtcgccattcgcgggaatagatcatgtagatatccctgtgggcgtgaagtcgtggatagacagaaacctggagagagagccaacgatgaaagggttgaaggttggttcggataagtcctcagagtaagttcagtctttctttctttctccgaactctctcggctttccgctctctttctttccggcgcctcgtgtttggcgatggaagatgacgtttgtgcttgtttatttctattcgacggaaacactatcaggttgatcgagaagatgagaaagaacggaacgcttcctttggattgaaggtaaacatgttggctttcctttctctctatcacacacacacacacatacgcgccttctttttcttactctgtcgtcatcggttctctttcccctctgtaagcccccgtccttgggaggtttgatgaattctacttgaccagtcaatttaatcgacggacttacgtccttattcatgtatccgtttgtttctctctttctgatctgtatgttttctcttcgcaaatcgagaggaaccgcctcgagagttggggatgggaaagcatcgcgaacgactcgatggtatcgacgaaagaaagaaaagaaagaaaagaagaagcgaaaatgaggagaaaagaccaaggacggatcgaaaggcaaagacaagagaaaggacacggtcgagacctgtctcgacgttctttcccttttgtttctacagtcgaaacagactgcgtcgaaccaagtcgagcgcaatccttttttgggacgttccctcctcgggtttcagaatatgtcgagcaaagtataaggaaatggcagctttcaaagcgatagaagaatcgatcgattgatcgagtgggaagcgaaaaaaaaggaaaaggagaaaaggaaaatatgaaagagagatttcaaaacgagtgacgaaagagagagcaaaagaaagaaaggacactagagaaagatagaaagatagaaagaaacggatggttaggccgaggaaggtataagatctgaagggatatttgaggtggatatttcttttgaacgaacctaaccgattagcaaatagaagagcagcaaaaagagacagaaagcaaagaagggtatacggatatctttgtgaggttttgtttttttttggtctatttatttatttattgtttcgttcttgttacacgcacgcgtgtaggacacgaaaaagaatgacaggactgaattaaatggcgatgaatgatccatttaaccggccttgacgtatcgccatccgagatcagtgagatctccgccaaccttcatcaacccgttcgcggtgttgacaccctggttgtcctccatcgctccgaacgcggcgaatctggcgacctggggagcggttaacatccactcggtcgtgccttggaagaaatcaccagagatgtaatccgaggagcactgagcaccaccgttgtagttctggcaggcgtactcggtcacccagatcggcttgttgaaggtgttggcaaagtcgaggacgtaggtctggaaggcctcgtacgtgacatcgtaccagtgcaaactgtagaaatcaggctgggcctgaggacaggtcgtctggaaattctggagccaggccttgccggacggcgcaccgtcaggcgcggcggaaccgagctggattccgggcaccttggttcggagctgttcgaagtatgtcgtccagagctcacatccggactcgactccacagttggactggccagcgttgttgggcctgtgtttgtcaaagtcgatcgagcggttagtaaaggatgggaaaacatcaggccacttgaggtagagactgactcgttcaagaaaagagcggccttgacacctagggaggcgtaggaatcaatgttctgagtccaatctccaacctgtcgccatccccaaagctaaccaaggagaaagcaaaagaaggaaacctatatcgtcagcggtgccttgattaatgaaaacaacggaaaggagcgtaccataggaacaaactcgagacccgtgagctggtcaacaggccagggggaccaagtgtagtacctttgttgttattgttgtcgattttcgagaaaggggaagaggaaacaaacggaatcaataaaccaatcagggcactgaagaagaagaacaacagacacaccaagagtttccgatagcagacgcccagacaccgggctggtcagagtttccgttgggccatgcgagaccggccttcttgactgtagagctggaggacacagagacagagaccgagacagagacagaagcaaccggagcagcggaggactagaaagatggtgtggcaaagagagaaaggagattggctaagcatctagacaggcaagatgaaacgccaaaggcgagaagataaaaataaactttgagaaaaaaaagggtgagacgaacaacagtgctggtggtgggagcagcccagttctggacggcagcgactgaagactcgacggcagccgaggaggtagtgggttcggccgaccaggcagcctcggacgatgtggtggcagcagcggaagaagtggcagctgcagaagaagtggcagcagcatcggcgacgtaggcgacagaagacgcgatggcggaatcaacagaagaagaagcatcggtagtagatgcagcccaggaggaaaccggagcggccgagctggcggcagcataagtggcagaggaggtggcagaagcggtggccgaagcggcggcagaaaccgaggcagcggaggttcgggctttgcaaactccaccgtctgcccgcctaccgagggtgacggaccgtctgttgacctggtgaacaggctctctgctgtttgctccagggcttcgcctagcgttagcaaccgctcggtggttggaacctccgtgagcggcgttaacgggagcgagtgccgacgcggcgagcaaggtggaaaggatgactgtggtgatggatggggacatcgtggacctaaaggaaagggtgagggatgggagatgaggaaagggagatgtaggagggaggaccagacctagctagtttgttggaggagagaaggaaaagagagtgagtttgtgagtgagtggatgatctacctagggatatgaaggagagagaggaactgcaaggaggcgagagaaaggaagaacagaagaacaaaagaacaacagaagaggagaaaaagaagaagaagaggagaagagagaaaacaggatgaagaaaaaaataacagacgagtttaaacagaaaaaagaaaacaacaaagagaaaaaggcgagcgagaacacgcaggccaagatgttagccaagacattgttgggtgggtcttatttggggtcat

SEQ ID NO: 578 - DNA, 90428 bp, Xanthophyllomyces dendrorhous
  misc_feature (74511)..(74520): n is a, c, g, or t
gttatagggggcgttttggggtttatatggttcctgtacggggttttagggtgtaacaaggggcaaagtttgggggcgatcattcaaacatttggtcatatatgggtatacatgggtatacctgggtatacctgggcatatccgggcatatccgggcacacccgggcgacccaacctcgtcagctcttcatccccgtttgatccgtgccgatcaaaacaaatcaaacgggcgcctcggtccgcctttgaatggttctccctatcgtcctctcgatgaccttccctgttggctctgttggtcttaatagccaaacatggtggctggaatcgtgttacatgcatcctgttccgctctatagctcactcacacacccttccctttcaggtaacacactcagtctgttcgtcatcatcacatccttgttcacattcacacccacacacaaaatatgaaagattcatctacattcaaatcgcaacctggacgttttcttgtcttcttatttaatctttttaaacacattccgggtggcctaccgagtaagctgcatgtcgtcgatcctcaacaataggcagaccgtctcggtcgcaagctcgagggcagaggtcgagacaagcagcggctgcaacacgttctcttccaaaatattggaaatgataccctaaggatagagaaaggcacgaacacgggcacagaaagcaaagcaaagaaaataagccacgcgatccttaccatatatagaacccacttgcgagactcacctttcggacgttgataccagcagtgatctccccattcgcatgtcggttcctcaattcggtcacgatcgcaatcgggttcaaccctgcgttctccgccaatgtcgtcgggatgatctcgagtgcctcagcatacgcctggaaacagtaggcctccattcctttgagtgtctggccgtactgagtcaacagtcgggacactcggatctctggtgctcctcctcccacgatcagggctctacaaaaagtttgtaaaagtaaaattgagaaaagcgttagcatatggcaagcataacatacgtgtcttcctctccttcttccattctttccttccctttctctctacttccctactctcctcctcccaagaaaagaaagaaagaaagaaagaaagaaaccctcacctcttcttgaccaaacatcggacgacacagagcgcgtcgtggagacttcgctcactctcctccaacaccaaagagtttgcacccgtgcaaaccacgctgaccgttctgcccgcgttcttcacacccgtcaccttaaccaccctggccccgcttcgctcttcctcgtccaccaactcggcctgaccaagcttgtcctcagtaaatccatcaatatctgcaatcggcttgcaaccagtagactttgcgataaactcgatttcgtcccgctcaatatccttgacgacaaggatcttgagctttgccaagaagtgaagcgaaagctcgttcaccgcgtcccggagaatcgacttttgaatcagcagcacgttgcaacccgtcttcttgatcttcttgcacatgttcagcagatacgctcgctcctccttcaggatcttgtccatctgtcggtagtcgttcaccacaatctggttgtccatctgaagaaagagaaaaaggacaagggtgagcaagaagggctctttgattagtcaacccaggccttcccattgtctttctctctctcgttgaagtattctcctacatgaccactcacatcaggcttgggcgagctcaactggaactggatcagtccaatctttgccttctccatccgggtcggtccaccagcagacgtcgtcacagactgtgtcaacgccaatccgtcaacaagctcggtatcgtcgatcgttcctccaaccttcttgaccagtcggatatcccggaggtcaacgttcgtcgatgtcggcgtcaccagtctcagcactgacgagactgcgatcggagcaagcacagaagagtactgagagacgatctgaaggaagggcagagaagaaaacagtcagacataactgagcctcaaggtgaaatcttatgggccaccaagattttgaacacctactttagagttcaaagaggtcgaagcagctcgaagaagagtttcccggtcgttcaaatccacaggagtagccatatcggtcaggaactcgacagattttgaggcagctcgctggaaagattcggcgataagggtagggtggatacctgatgttccaattgacatgccaatgatagaactttgtcagaaagactccaccagcttaaccatgcgataaatagaaagaaatacacagctggacatacccttggtcagcatcttttcagcagctcccaacaagcttccggccaaaacgactacagacgtagttccgtcaccagcctcgatatcctgtgcggcagaaagctcgacaagctggcagaataccaacaccccagaccagatacaatcagcccaaggccaatctcgagaagtgagaaagaaaaaagatagagagaacgataggaacaaaccattcgagcggcaggatgcaagacagccatgtgcttgaggatagtcgctccgtcattagtgataacgacttcaccctgggcggtttggatctggcagattaaaagatgttttacgttcagaacaagacaacccttccgtcggctcagagcaggcgtacacgaagccaaagctgtcagtcggaatgcacaccgtaagagacaacttaccatcttgtccattcctttgggacctaacgatgttcggacagcatcactgaccgacttagcggcattcatgttggaaagtcgaacttccatcggctttccctgttgttgaaagataagagaaacgcccagaccatgaagagttggaaaggaaatcaaggaaaaactcgatgtttgtgagctttctcctgttctttttcccttttttctctgtcctctcttcttctcaacaagaaggctcctaatcaaaacgacgaaccttgtcgctaaactgagcattcccaatattagaggcggcaggtccggctgacatactggtgaatttaaaacggaaaaaaggggagaaagaagagaataagaagagatcaacggatggtaggtctagctgaaggaaagaaattgggcctgggtgatggagggactgtaaagtcaaccgacagcgagatttcttgttacgctcgttggttacggtttctgtaaccaaacaggagctagggttaaacctcaatcgcctagcaagttgtttctagcccagatttttgttctcttctttactcgaatcatcaacccttcttcatcctcttgcattcacatcagcatctctcgatactcttcagggttgagaacgtttggttaacatttccacagagtgatttaaacaaaaagataaaaaaaccatcaaagaaacttagattgacagaccatggaggtaggttcgtcgcgtctctttcagcaggttcagttcaaatcaagacgcatgcctgacctggtagtcaaacctatctctcgtcccaatcaaggttatcaagccccgaaccgccttcgtctctgcccgtgaggcattagagcatttgaaatcgttgaagcccgaactcgacctaatcgccgaagccaatgggaagcggtacgagcgtacgagccgtgctagagaagaccctacagcgccgatagaagagccgtccgaactggaaaagaagtggtttggaagagatcagcagctcgggttatatcaagtggtcatctcggtttgtcttctcttacgttgcctttccatatatcgcatgcaaaatatggccagtattgagcgacctcttgtcgacggaatctagtcgatagaacacttcacgtcagcagaacagtcaatacccaagcagagcctcgcaggcaatcagcagctatcctatgcactccaagccataggcaagttcactcaggtagaaatcctacagatcacagacttgagtccacgcacaccagttgaactttacacagtaagttgtatctgtcatccgctttcatctcagcactacagcatgtcgttatctatattgacagtgttggttttgttttgaataggtagtagaagagctctttgatcggttgaacgaagaagagattgcccacattctcgatctcgttaaagcttccctctctgcagcccaaacactacccaatcctgatgcgcctgtgcccaggccagccgacctcaacgggaagtcggtagtagatgatgctgaagaagacgcgtacaatgatctggaagccatggagtacggcgatatggatgatcagggggaggatatgggcttcgagttggacgaagctgccgattaatgtgtttccaatcaccccgagagccttgctcaatcagctagcgtatgtgtgtgcacactgtccagtatcatcgctgccagcagtccagcactatggctgttgcaagtgtatccagacaagcaagagtaagagataagaaattgggaagaaggcagagagaacgagataaatgtcacgtgatatttccttccacctggagtctagcgtcaccgtttctgttcgacagtttatccttctgcaccatcatcttcaccatcccgtcgtcgccgcttctttcgttgtcttatttcccgtcagatctcgttcttcattcctttcatcgggcctacatatagatttatttggtttacttaaacacaatcacatgttcaatccaaactatgcggatgcagcccaaggtggtggctttggaggaggtaagtttcacagattccacgtatacacagtgcgatcgaagatgaacactattgatcgatgcgtggctcatcgttctgaaccattacattcgacaggaaactttttccagcagctagcaggtatgggtggactgggtgggataggagttgctcctcctccgtgcgtacttcattgctgttggcggcggacccgctccttctggacttgcactaattgtgttagcaccacgccgttggttggttaaccgtatgatgacaggacggcttatgacgactacttcaaagcctactcgacggcgatgatgagcaccagatctgaacgtgccaatttgaatcatggaggaaaaagtgagtgttgataaacatgatgtctcctatagctttgaaagtctctgaccaacagcttatcctttgtgatccttgatctgaaagtcatcatgccgccttctgccctggcccgattaagtaggtgatgaacggaacatgaaccttcgttcaattatctacagaaccagtctaattgtattttgtatctatagccaacttggaactcgaatctccgtggactttccatcttcagaaccctaggtccgctgctctggagacccatgcaggggtcttagagtttatcgccgaggagggtgtcgtgtatcttcccccttgggtatgcgtctaccgctactatagaatatctgagacttggtctgactgactcttttcacttcttaccggtttaattacaaagatgatgcgaacgttggggtcagtcgagcgagttgaagacatatacgtgcgctacagagcccgatagctgacatctcgtaacgtgactgtttccgaccttaggcttcgagaaggagatcctattcgtgtgactggcgctagacttcctaagggaaagcatgttaaaatccaggctcagaacctagagtttttggaagtcagtgacccgaaagctgtgtgagttctcttgcctagagcgtctgttttttctatcagatcgtcagctgaccttctcgaaatactattactttcagtctcgagtcttgtcttcgaaacttctcatgcttgactcagggagacacattctcgatatcatacaattctattgccttcgaatttcttgtgatcgagactttgcccgctggacctggaatctcttgtcaggacaccgatctggaggtaaaccccatcattcttctcgctcacaagtttgagacgttcatatatagaccagcaggctaacacatcctgatattttctcgctaacgaaaggttgatttcgacacacccaaaggatatgttgagcctgcggccccggcaccaaaatcagttgagacgatggcctctaagctcaacatcgatgtcaattcgactgtcccatctcgcacaggatcagtatctggcgcgggagacgctgaggctgaagccgcgttcgaagccttcattggaggtggacgaactctgaatggcagaaggacaaaaggcaaaggcctaaccagaaagattgaggaggtcgacgaaggctccaaaatctatcgaacagagtatgtcctgtttttgcggttctgtttcttcttgatcatctcaacaaaaaacaacacaacgttcaactcatatgctcctggtctatcttcaaaaaaaaaaaaagcaaatctcgctttatccctacctcatctctagcgtctggttcaactgacaaagtgccttccgcactaaatctccctcctggcaagctcttctttggatggtcctacaaagcatacgatccgaatgctccaactcctctttctggatccacttcgacaaagcctgaacctgtacgcgctgcttttcagaatgtttctctggttttccatttgcctccttggatctgatggagtttgactgacgcttatcatgtctttatctcgtactctttgtagacacctgcattctctaaccttgtgtctgcaggagcgaccttatctggtcgagccccttggtcgtcgtcttccaaccctggatccattgattcgtccactcgtccttcggctgctccgtcgcccgcacctatacctggccgacctgtctcggcggcacccaagccaccgaataaggaagacgagaacgcgctggatgacaagccggtagacccgtgggcaaaactctctggatcgggaggtaacacattaagtgggagataggctgtgtttcatgtacaatacacagttatcgatgtccgagttacgcgcgtcgcttatgttttgaactaagttgaatgctatagaacgcttcttctgtctgcttgttgtcttttctcagtaagcatactgcacatatgccggtcttcattgttgccagaatgattagaatcaagtgttgcttgtatccatcaaagagctggacaaaacatgaatgaaagatgagtatatgacgatatcaagacgggaatggtgtttgacaggcgaaacgatgcgcagccgatcgagaccatatcaaaagtgccgcctacatctcagcatacatcatcccatcgttcatcaaaaacaccctcctttttttctcgagcgtgcctctttctgtttcttcttctctccatccgttctcatcgccaccatttcactccttttcagacctttcttctcgcaatcaatccggtccaccgtcgtccgaagatctgcacccgtaagtggctatctgcctctgtccttggatcaatgctgatcgagaatctttctaactctgtctatccgcatctgattactcatcatccactgcatgtgattctctgtgtctggcgaacaactttggcatgctctagctcgttcaaaacttctcaaccactgttttcaaaatggctcctatccctaaagacagcgtcaagacagactcctacgatctgtaagtctaagcagttcttccttcttcccttcttctgccatcaaagatctagaggactgatatttgaacatctgtagtttggtcatcggaggaggtcagtatttcttctccaagccgtcgcgctgctgattgagagcctgctgctgatgcatctgatgggtttcttaaacttgccttgtcccgtatgcctggtctattgacacactataggatccggaggacttgcttctgctgtaagtataaccatgttcagagtcgaaaaggcatgccttttgtcgaaacgatcaaaaataatctgagaacgggcttcaatctaattcattatgtttcagcgacgagcttcctcgtatggtgccaaggtcgccatcattgaggcttctcatcgactaggagggtatgtttagttcatgcaacacgaatgagcgatgaaccaagcgtctcaatcttgctcactttccggatacctcctcttgatatcattcagaacctgcgtcaacgtcggttgtgtccccaagaaggttcgtgctatttacctacataccccttctgtttcgtgccctgatcgaatatttatctggtctcaaactttggtaactattaactgaatagattatgtggtacactgccgatattgccgagcacctcaagaacgctcactcatatggtttccgagttcccggtctgaccgacgcgcctgccgaacagcccattccgttcgactggaacactctcaagactaagcgagatgcgtacattcaccgactcaacgggatctatgagaagaacctcgagaaggaccacgtggacgagtaccaaggccacgcgagcttcaagaacaagaacgagcttgaagtcaaggggccggacgggaacacattcagccttaagggagataagatcattatcgcagtcggagggcagcccacctaccctgatatcgagggggccgagcacggaattacctccgatggcttcttcgagctcgaagagcagcccaagcgagtggctgtggtcggagctggatacatcgctgtcgagttggccggtattttccatactcttggttccgagacccatattatgattagacacgataggattcttcgaaccttcgaccctatcattcaggatactcttactgagcacattggtaagttttatctctttgtctctagcctcttgatgtcccggagatcaagaggctgattgtattggagcatgtctcgtctatatatctggtaccacagagggtaccggtatcaacgttcacaaacagaccaatgtgaagaaggtagagaagacctcctctggtgcacttacccttcacctcgactctggaaagaccgtcgaggtcgactgtctcctctgggccattggtcgacactctatgactgaaaaactcaacctcgaggccgttggtgttaagaaggtcgagaacggagacattccgtttgacaagttccaggtctccaacgtccccaacatctttgtcattggagatgtcggaggaaaggcgctcttgactcccgttgctatcgccgctggtcgaaggctctcaaaccgattgttcggaggagagaagtacaagggtgaattcttggactacaccaatattccttcgtaagtttcgcctgtttactaaatcttcatgattggattgactttgttgatcaatatgaccgctttcgtttgtctatatattccaaccaaaacaatagtgttgtcttctcgtaggtcctgtctctgaatatctcgagtgcgcgtcatcgggatcattctttctgactagaatacaatgttattactttctaaacaggcatcctactgctggatccgtaggattgaccgagcccgaagctagggagaagtacagagatgacaagatcaagatctacaggacaaaggtattagttaagctcaaaatattctttagatagaataagcggcatgcatacttacccgatgaatctctctcatgtggttcaagttcaccggcatggtacgtatctagagagttttttttcctatagatatcgagactggcgagctcactctcggatttgtgatcatctagtccaacgctatgctggacaacccggcgcacaagtcgcctacggcttacaagcttgtatgcctcctccctgaggagaagatccttggtgtgcatatcgttggagagggtagtgacgagatgatgcagttcatcggagttgctgtcaagatgggaggtacgttctcgagttcttccttctctccattcacgtgtttagcactatccactcaagacttatccgctctttcctcttttctgtgtgtacagccaccaagaaagacttggacgatacggtcgctatccgtgagtgttgtcttcaaccttcttcgccaccttacatcgatgtctatgctcatcactgttttattttatccacgttctcacagacccaaccagtgctgaggagtaagtctttttgtttctattctcgtttgtttctctggggctcgattactaatgactttctgttgcgtcgcgaatttgcttgaacacagacttgtcactcttcgataaatttgaactatcttctaattattctgtggtacataaattaatgattatatggatccatgtatcgtcgtctttctgtgttacatgatgagtaagatggtgattgttatgcaaggtagtttctcatatgataccttggcgcgccctctccctcttcttctacctcacacaactgtaacagagaagaaaccggtcctactcaggatgtatggtgttggcacatggactctttagatcagcgtgacgtcaaaagatctattctctcacaggacgtacaaagtccagtccaatccgctgaaaagtggttagtaaccaaagttcgtgcgtcagtccggaaaagtcagcaaccaccacgaccacgaatacgaccacaacatcttacgaacccgagcccagtgttctttcgaccatggctactatactccccaagatggcttatccagtcacatcaaactccttccgtcgatatctatcatctactgttcccttgggtcgattttctgctccaaaaactctgcgaaaccaccgaactgaccccttgcgatcgccgctgtacaccaatcgaggggtccaacaagagttcaagcccagatccccggatccaaactcgaacttgacccaggacggaacgggagctccttatcatgctggtccatatcctataggagctggtttagggacatccgcattcagaaggcaggctccaagaaaagcatggaaagagcttggatgggggtccaaacgtatgtcttgtgatcttgaaaattgaatcgagaaagcagggaggatcatctgttgttctccttgcagcttattggacaacagaaactgatttccgttgggtttctcctgaaaccacttttttttgcataaccaaagtgtacagggttggagctaacagctccaatttgctcgttgtcgctctgggggggtcgttgttcttcatcattgccatcagtgtctcgaccgagttattctctcctaactcgaccacagtcatctttggtaaagcagttgacaagctaaaggaacaggatgaggtttgtctatgaatgtttcttcttctgtctcggttggtaggcctatgcttccttggtagcttatcgccatccccttctacttttttcagcttaagcactatctccttcccccctacacataccatcctccgcacaccaccacgccttcctctcgatcccaaacatcctcatctcgatatcgactgacttcgtttccgtcaaacatctacctcgacccacggacaggtcgagaaactcactcgttcatctttctcgtcgaaggtcaagaacaaggtagcttccggtctcataccggttggtggggtagctggcgagattggactcttgaacaggtagaaaagggatggaaggaaactaagcggctggcaagcgacgctcaaatgatcatgaaagagaatggatggatttcatcggatgaagagattgtgttaggcgatgacaagagactcgctttacctcagacagcagcggacaagagctcgactggttgggggttaggtagtttgtttgggttgaagaaaggggaacgagtgatagatgtagtcaagaaacgaggtctccctccggtaggacaattccagactggggaatgtcacgtcgtatgcgaaaaggtgagatcatgttcttccctgtttactttctgttccctagagactgcagctaaagcttcttttttttgcgtccatataatctttagaactctgaatctcatcgactggaactcaagtctatgaaagtttacattccttcatcgagtgcttctcgaccatacacgttctctgtccctgtcgaggacaacaagtcatcatggtttgattccatcttcggatcaaacacagcagacggtcttgcaccgtcaagaaaagacgttattggactggtggaagatgctagattggaattggagaaagaagaaaaagagctcggcgcaaagagacttgtgtgaatgggcttggaatcatgttcttcaatgctattcttatatgtatgcgatatatatatacacgtatatacatatgtgtgtgtattccttcacacgcgccatgcataatttcttacaaaagaagacgcctcactttaccaagcttgtcgactagggaacatagagaatgccccgttcttcaagaccctagtgcgtagggcggtcttggtccaacttgatagaccagtcagtgagcaaagagtcaggcgatgagtatatgatccaaaaggtgttggcgctaggataaataccgaaaaaggaagagtgacataccctttctcgtcttgagttccacccaaaacagtcggtcctctgatccagacgactccctcgatatcaccggtttcttcaaacacgtcttcatcgagttctctgaccagaacctcaatgttgctagctggcggtcccgtatgcgcgccgactaacaccgggtcttcttctgctgcgtcttcccattcaaccgaatccacgttctttgttgttcccttctggaaagattgtgaagatttgggtgtgaatgcgatctcacgcgggttaaatgtgggcgttgttggaacagacatcggaggcaactgttgtagatcgtggaaatgggagatgaagagcggagaagtcgacgtgagggaggtcgtgattcgggtgatgggcagggagagatgtatctgtgcggagagaagttgtcttggtgagggagtagctgtttgtgtaatgagtcagacggataaaacaaaaaagacatgaccaggctttacagtcaatcacctagtataggtatttctgttcagatggcttgttgttgaagagacttacgaccaacgacaatgacagcccgtatcttatcctctatctcgggtttaatacctcttctcgccgacatatttgccttctcggcccattttttcaacgaagcaagtctcaggggcttccagtagaatttctcaagatatccgcttcggccaacgtatccatccgcgatgttggccagttggtgctgcttggctgcatcacggaagatgttggccggaagataaggatgagacccgttctcaatctccgaggaccattcgaccagcattggagttgatctagaacaggtagagtattgagaagtcgatgcgtttgaacgaggcttcagtataacattgtccgagagatgttgcgcaaacatcaaaaccaaaaagaaaagaaagaataagctgtgctcacaaaaacacgatcgtaggagatggtttctcagggtgaagcatgttcatcaactggactgtctctcgcttgctgattgaaccatctagtgttgattagcagaccaatagaccggtcagtatatccctcttgcacagatattgatgtggttgttagagactgcatctcacgcactcttttcttcggtctgcgcctgatcttcttgccattcttcttcgtcgaccgttcggaatccagcacctgaaaaccaatcaaagaagggacaactgttcttaggtattcgaatagaaatagagtttggcttcataggctagtctcggcagttggttcactcaccactccagatagatgccaaggccaaggttatcccgacgggctgagcgagaggaatacagctgacgaccatatcgttcgtcgcaggtgagggtctcttatgggcagggaagagcgagagaacagaagcgattccagaagtcacgttttgatgggtcaccgtgctggtttgaggtttctaagagatacccgaacagatgaagattgtttgtgaaagataaaccaaacacatctggtaagtaattctgatcaaacagcagaatctcaagcgcaaccaacctcttcatcatcctcccagaattggatcgcaaacggaccctctcctttagcagagttcgccctatccgtatccttcatggcgcttccgagcgcctcgacttcttgccaggaaaccaccttgagtgcatactcttttgccatctcgaccacttcttgaatttgggacgtttcctgttctactccggaagaagcggcgtacacaatggttcgattcgagtaaccagcgccggcgagctctccgaggacatctttgaggatcttggcgctaacgacaatcaccgccggaggtaccggtaggccgacaacatgattgaacagagcggggttggaaagtgttaagagagggtgagatacatcaggctggagggacatagctatagaaagcagtaaagaatctggagatatatcgtttgcaaattgaatggtttgtagaatgatgagtagagatttctatgatagtcatgtggtcagagaagctcaccaaagccatcaggtagcaagtttagaatccctttggacgctttgtctgttctagatgtagatagtagagagatcaatcctttggacacgttgttggcccgaagtttgagtagatcgttcgagatctaggaacataaacagaatttgaaacgcgttatatgagcctcttccacatcttcccgaaactggaagtactgttgttccatacctttatttcatagatgaatcgctgaggacatttgatgtctgctatgttggcaaccgttttcagtgagctggcaggtctgagagagagctagcgtgcaggacgaggcacgcgatatgatcagctgtattctgagagctattacctaagcataggaaactcgagagaaagctgagaccaaccggggaaccatgacctgtggcccaatttcgatagattccactctggttcttttctctggtggccgagagatcactctgcttgcctaagagtaaaggatggaccaaaggtgatgggcgagaaaagtactttagatacgccgccatgcacacggtgatggagagcaatatgagcgacacgtcggacagaaagggttctgacggcatgacgatctgctgatcactgtccggaaaaggaaggaccattctttgatgaagcacaactagatctgtgagctgtttggaatcttgtacgatggaaagagcgatgtgtaggaaagtataagaaggagcagcaagatggaaaagcaaaagaagcgagtgagcccatcggctgcgataaccctaaccgagccggtgcatgtgaacttgtccggctgcctcagccgatcatacctgagtgacgatgcattcaatgatccactcccgtgatcctacatagacagttatcgatctgcataccacccagacttctggtgtggccaccttttcttttgacaagccttcatccatggaggttcattcttataactatcaaccgaaactaaagaacgaacagaacacacacatacattggacaacaagatggctttgggaacggcatcatacctggtgagtgtcttgctgactctttgtcatatactcattacaaccattcacaccacaaaatcgaaatttgttcaaacctttgtctgatgactgatagatggtcatcctagccagcatcttggcattcacattactcaccttaatttcccaccttttgagccggaagaagcttgagccgatccacgagcctacggaagaaggactcgcagctctccgagagggaggggtggtgatgtgggatatgcaggggaacgaagttgtcgaaattttcagccaaacgtggaccaaccccttagatcagagtcgtattgttgaacctaggttggaagaagtgtatctgatggaaggcgactgggatgtagagatcgaaaggagcgtggaaggttatttggtgcgtgccgaacgcgtcatctttcagtactattactcgaggtcttgcaactgacaagtcgtgaaaccaatgccttactcttatccatagccgttagcatgctctctacctcctaccggtttatctgagatcgaggttgctgttatcgtcgcgttgccatgtccaccttgtcctccgctctcttcgtcctctgccacccatccatgctcacgctcgatatcatcatcatcgccatcacctgcagatacggaagaatgctttccggatgttatggtcgggtcttgtcgattttccatacctccttcggctgtaagggagctatcgcctttagcccttcctccacctagtagtttggtcgagaaaaaatcgatgtgggtcaggactggccgtcgaaggacgacgacattggatgttgggtagggatagcattttaccaaggggtcctactttatctatcaatcttttcctctttcaattttgtatatggttattctgtagttatcttcctccacattgtaatcctgatcttgtaagcggttgtatccttttttaatctttgagctgttttcctgtcgaatctttgtactcctggttgtaagctctctccttcctatcaagatgatgctggctagcaaacacgcatgtcatgcacttcgatattgtaataacttggctccctatgtcctttgtttcaaacgcgtttatataaagatgtattttctacttatctttaaacacgttcatttcgttgtttcagctcccggaataaatgttgtttacagaaaaagaagaatcagaagattcacaaaggctacaagacaaacagttaatatggtttctatatggtagcagctggaccaaataggcaaataggcaaataagcatgcttgccatgcataataatgtctgcatccgctacccctatggcgtaaccagaacagaatagactctagtgatcacgaacgttccagactttgcgtgattgttcgtctggacctttcgatcgccactaggcggtgctcagcacgctaaaacatcacaaatacgccacatccgcacgaggccgggcagcgtcgtcgtcagcagcagcagcagcagcagccagctgtagaacgaatgcatcgtattccatctcttcatcctttgctgtcctatttccttcttccctctctatcacacacacactcgtattctcgttcgaaagcggttctaccatcgtcttctttctctactctctcatacatacctaattggaggaacaaaagaggtcaagaggaacacagcgaaaggtgactcttatcgcaaggttcgcttgcagcgttcccggagatctattggtcagaggtcccactaaagaggccataggtaagctacaaaggtccatgcatcagttgttcctccgtttgccctgctgatcaagcttcatttctgtcctctcatctttcttctttcttcttcactctccccctttggttgccatcatcgttgtactcttggccctggtcttggtcttgcttcgtctcgttgtctctctctttaggcttagccttgtcttccctgctcttcccgtctcatcccgttctttttgtttgcatatattctctcacaaaaagggaacaactctctctgtacgtctgatcttttgcttcatcatcatttccagtcttggtaagggcgccgaccaaggaaggcctctccttcaaggcaccattcgatatccagactgatatactcttggtagctagaaaacagagaatctcccacaacacccacttttggttccgaccctgaccgtcatcgccggacccttccaactcttgacatcctttcccgcctttcttagcacattctcttcccttgtcagaaaagacctgggtataagccttcctttcctctagactttcgctctcaacagcaaatatcatggcccaagttgtgtcttctcaacaggatctaccaattgaaccagctgagatctcagagccggctgtgcacctgtccggaggttgtttgatcgactacaactctcatcatccatctaatcacccttcaccaactccactctttctctcccccgcccgcccggccttaccggcaactactgactcctcgtcccatccttggacgaccggtttctccgtccatccatctccaccttcagactgggctatctctcctcccaccacgcctactccttcaggcaagcgacagggcacaccctctccctccgagatggggattagagaccttcgcgatcgagaaggctatcacgaaggtcctggagcggtagacgggatcgagtacgaatcggagtggctgaacgggttggaagttctcggcaaggtcggccaaacggtcgtccgagggatcaatgtcgatcaggtccgtaagcgcctggcgcgtgttccagacgatttcttatgactcaccagaggtgattaacaaagttatcttgggtgtaacaaaccgacatatagtacgctcatatcgaacaactccacctctccctcgatgtccccgagacctgcttgtttccttgggttggttggattgttgcttgcgtgcatcctagtctccaccatatgctgacgtccctttgtttcttgtcccttctagttgcatggaatgggcgatggcaacaaactcttagacgactttttcagttcttttccggggttagtctcgtcacaatgtagaagtgctcgtttcgtcagagactgatcttgagattatcactgcctccttctttacatctcataggttcaaggcccagtggcctgcgtacgtgattccggttattctctctgatccattcagagctgtgcttattgtgaaacatgttgtatacatagccctcgttaccgtggattaactgtcctccgatcacctggacctggaaatgacgcaccttcatcatatacatcaaatccatcatggagtactctcgtcggaaggaagcgcaacggctcgctcgcaagcaattatagcgcttcgaccgatcttagtagcagtggagatcgaagtgcttggagctcagaatgtttgtgcctcttcttacttcttacgcattctgcctctggaaatctaatcgtcttcgctctctcaaaacatttctaccagctcatgcttcgtcctttccaacctcggtatcatctctttcctccatagggtccgccggtgataagggagacagtcctccggttgatatctctaccttgcccgagggtacctatcttcacccggaagtcaccatggcacatgcagccgctctaccggagtcgtccattccaacttctagaacaaaagaaacaggaggattaccttgctacttgatttcagccgtggacgccaaagaagttctgactattgctcgatctacaaacaaagctgtgggtgggagatcaaacgaggatcttcgacaagcaggaagattaagcaatgggtttcagcgctcaacccatacccgaagctcgttcgatctcgatctagctgcttctctagacccaactactgcggcggatgacgaaaagggacagtttctgaagagaagcgtcggagatactatctgcttgaggaacctaggcttacaggtggtatgtgtcctctctctgtaccgtttgtttagtcctcatcaggtaaattctatgtatatgcgcttatttttcgcggctcttcctcccactaggccaaatacgccactatatctgatattgtatgtcgcttccaagtgaatgcatgttttcacggtacttgcgctctgaactttacttcttcactcaggttatctatcatccccaaggcctttgcacttccgctttaaatgtggccgagaggtatgttccgttctagtttacatacaatcgagaagctattttgtattgacacctgtcgtgttgctcttcagatgtgctgaagctatggaagccgagtatcttttgcgaaagaaggtggcaggaagagatcaagatcccgtccgatataacgtcttcgtagtcaccggcaggtcctttgctacatctcatcgagacaactactgtgccgtccatgctaactcgcggtttgttttcatagatcctttcgaggagtttgaagttcgacaccctgatctcattggagtagattcccagggcaaccgtgtcaacaaggttgatctatttgagaaggaacagaccgaatccgtgagccttaccaaagcaagagaggtctctccaaacttttgggtgagttctgtctcacatctgctggcttttgatattgacacacaaatcactcacagtctgctcaacgttcactcagatgggaaactcttttgactgtccggtactcctggggagagatcgggaggtcgatgacgggccccgggaagacttgaacccccacaagtttgatatctgtatcgaggtctgtcgaagtatcccttcatgatactattctttcgtgctctgaatcggctggttgtgttttgtctttactacaggcctttgacggcgccgagatgcctgatcaggatcgattggacgataccaggcgaacgctggcatatattgctaaacagagagaacactcacaagagtctctggtcgagtctctaacaaactcacatctccactctgattgccgatccggtggttgctctgatgatgcgtctgatatgaccgcctccgggctgcctgtgtcaggctcccccaaaccttgtcagatctaccatttgcagacaatatcgacctcactcgttattccacaaggtgattggagggcccttggggtactcgcggccgaattcgtagagtttgtcagatggacaaaagaaatgatcgacgagggtcggcgagtgatggtccacggatttgatggctacgtgagttaattctgtgaagatttgtccgtggcttgacgagtttttccgaatactaaagctgcacgaatcgtttgccagactgagtcttccatctacgctctggcatacatcatgtgttgccatgagctcagtctgcccgaagcttacctgcatctgcaccttgagtcaaagaggtgcttctttgtctatccccacgatctcccactacttcgcaagatcgaagaacttctcgcttcagaccgactcaaacagagtgttggtagtagctcccgaccgtccttgggggaggccgggttctcgatgttcaagtcaaagacaaaaaacagcaagccaacgtcctcatcgccaaaggcccagacttcggtagccggccttgtgagctccaaattggacaaggaaaggaaagcgtttaacgcaaagaagcatggggtttggttcaatgtttgtccttttctactccttcttcttcttgcgaagtccagtttgttgacgagccattcattttcatggccacgcttacagagccctacgttcgaaggctgcttgccttctaggatcaccgaatttctctatctcggaaatttgaatcacgcttccaatccgcacatgctacatgcattgggtgcgtagaatgacagctggatcgagcgcgtgctcgtgttagatatagcagaagacctaatcaaccttttccctttgtatttcgcctctatgtctgcgctcaggagtaacccatgtggtctctgttggagagtctgcgctgctagatccatcccactcgatatcccagtttccacactcgtatgcaccgaatacgtcactctggtacgagcatcaggctggccggatcaaggtgctcgacatgcagagcatctgtgatgacggggtgagtccgttgaggcctgcgatcgctgaggcagtagactggatggaccaagcgaaacgagcgggagggaaggtgctcgttcattgtaaagtcggggtgtccaggagtgctacggtcacgattgcgtaagtgtttccttctcttaacataccgcgggtctctgatactaaattttgagatggatacggcttccctccccttttagatatctgatgaagtactgcgggtattcattgatagacgcatatatgcgtacgtatttgatcatcttgtggccaccaagaagtccttttcttttaactaacgccatctctgaccgatctaacgtgggcagtcgttcgagcccgaagactgaacgtccttatccagccaaaccttaagtttttgtatgaattgaccggttgggaaggtttgttcttggactcgggttctttcccgtcttttcaagtcgtcgattgactggctgatttgttctggatatgcgcgcctctttatcggcattttaacaaaaaacgtaatctagtcgagctctcgtgggaaaaagcagaggcggctcggacgctggcgtgcgccgagaacggacaagctgaagcccagcaggaagcgcctcgggttcatggacggaaggcaatgagttggccggtgatggctaaggagattgtgagtgactgacggtttgacgttttcgacgactctgacccagttctcactagtgcctatgttttttttttaaaatccatcgttcaggccatcctgaaccaccgatacttgcgaggagcaagctagttgatgtacttttactttttttttctctttcttctctcttcttgtcttcatcctcataggtttcccttgatcaacactattttctttttccaattctgtcctcacaaccttattatccgcatttcccatttatcttattcctttcttctctcacgagaatgtattgtttagtctgtttcgtttctttaccaatccgtgtttgtttctctctcttctttcttttcttcaagggtttcctaaatttgcagtagatcatgtctttgacgtcctatgttccggttttctcttccatcattgtatgcgtttctttcctcttctcttctcttcttctcttctcttctcttctcttctcttctcttctctgtgtctctttctattcctgttcttatgaatattatacacctaagctatcgttcttcttgaagtatccgagtctgtgtcttcttctcttccgtgctatctagccgctataatctcacttggtcgttccgtcttaatttatcccgtttatatctctgggaatccgaataatcagtcgtccgagacggaggacgaggggtggttgtcgatcaagtttgtgccgacggcagagtgataagtcgtcatttgctgtcagttgtgagatatctgaggctgcaagtaagagaacgagattttgtctgctaggaatccagatcagataatgagaagagaaggagaaccggacaaaaataaatgacaacggcaaatcgcacttcctcttgccctttctcgtctgcgaagagagagagagagataaaagccgacggaagcgcttaaggaaaaaacagggttaatctgattacttgtaggataaactgatcgacagaactttctttgcaagggggttcacctgagaaggacagacgaagcatatatcgcaagaactttctggaacaaataaacatgtttattacaaaacacggtcaccatgatccaaggatttctctggtgatttccaactctcgttcgtgtcgtcttgccatcctggcttctaatcgatgatttctcgagttgcgtaatcccgtggctgcatgatgaggggtttacgttttttttccttctttcatcttgatttaatacaatatacgaaacagaacgagaacagcacagtgctgtctgatgaaattccaatatccctttggttactaccctggttctcctcttttcgattcacccggtcagatccgaatcgctgtctggacctttttgtgacaaagaaaggggaagtgaagaagagacggagaaaaggggcaaggaagagcagcaagaagaagaagaggaagatcatgatgatgatgataaaaaagaaatacaaaaaaaaagagaggagaaagaccacccacggcgaaggaaaagacgagggaacatgtcgatcgggttgatccgtccgagtgacgggcgtttcttcgcagccagtcagcgcgtgtgttctctgactggtttgaaaatcatattcgatgacggacggacggacgatgggattctgtatcgttcgttaacaatttgcaatctatactttccagtattcttacgtcttgtcctttgtctctatcgaacccggtctggtgtactcagtttcttcttcctcttctttgtatggacgggcaaagtagggggagggagaacaggacggcgtggtcttaacgtgtgatgcatggaatcttttcttttctttcgatggggcacaagcgaatttttattcgttttattttaatttaatttaattttttatttctctgctttttttctccgggcttttttcccagcaatcctcacactcacactcacacataaggtgtaggagggacaaaccctttcacctgtttcctttcactctctcttccactctctctttcactctcctccatcttggactctggacgtgatacggaggtgcctatctagcctagacaagtctttcatctcagaacatcaaggcagaataggaagaaaaaaaaaagctatttaaactacaaagttaaaccgtagctcgctcggtttcttctccttgatcctttcctctccttccatccaccggactatgtttgaggaagtatgcttgttctgtggtttggtcagtacattttctctttcatcctctcccattcaatctagtacgcttctgactgtcctttcgtattcacacacacacacacacacacagccttcgaatggattgtacgtgctggagtcattctccaatccctttgttctcgccgtgttgatcaaccacgttcgtttttcttccttcaaaagctgacattgttttttttttctttcttttcttttttggaattcattcggtttttgcgaatcactcgtcacccactcccatattttctctacttcttgttcggccggcttcttttacggatcgactcggaacgttttccatcgtcgccaaacgttcctctgccgtcgcccttgtttcttcacacgacgttccgttcccaaggctgtattgttcggacacatgtagagcaaaggacaatgaacccagtccggctattcgtccggcagatcatcctctctctcacctgtcgtcgacccatcgaaactcggcaaccaacacgaggtcaccgtcgacgttccaatcaccagtcatcccgttgacatccccgttcctaggtgccctcccctcactcgttcactcacgtcctcatggaagagcatccaactcggtcacatcctcccctgccacctcgtccgccaacacatccccttacccatggacaaacccaaaccacccggccgtgccgaattcgcctcctcccacgctcgctctgcctccgcaggcgtacccacagccaacgtcgacaggcaagtcgactccttcggagaacggagcagccaggctaccctccttcaactcatcttctctcgactcccattatatccgaggagatgaaaccctcaggttctccaggcgcccaggactcacaaaccatttcacctcgcccagagcactctatccgttggtagtccattccagaacatcctcttccaacaataccaccatcaccaccaccaccagcagcggatcggccaagccagataacgcactcggcctttccggagcggagtccttgagcccgagacggtccgcagaaaaactcgctcactatcatcaaaagtcaaaattggacaggccgccttgtcagacggcccactcgagcggtcgttcctttttcagcgacggctcaaccaagattcgacgagggagcgaggaggatgacgttcacccatccgacaacgaatacgaccactcatccaccctttccgcccatccacacagtcatatgtacgcaaactcctcaagaacggacagccaccccgcccatcgtcatcatcacgactatgcctccttccgagagtctccactcaagccggccgaagaatggacgtcgtccgtctcgacgacgacgacatccttcggtcgacaggtctccaacccttcctccaaccactcggcctcttctagctcacgtacatccccatctgcaccctccctttcgcccctccagcaaagtgagccacaggctgaacctcgtggacgcagaagaggcagggacagaaacgattcgtccgacagagaaggacatgtgtacgaccgaagcgacgtggtcgaggagagagagtctcggagtcgatctagagcctcgagctcccgacgcagtcggtccagagtagcagacaatagtccgagacggaggagcagcaggtcgagtagaaacagggagcacatcgaatccagcagagaacgcggcagacggaactcgagtggcgctagacgttccgattctggaggcagggcaaactcgagagaacgctcgagaggtcggagcaatctctcccaacgacctcgagatgagtcttcgagaggtcggagtcgtagtcgggacgagtcttccagaggtcggagcgactcccgaggtcgcgcaggccgtgggacggacgaatcggtttccccgaccagcagcattcctcctcttggtcagccggcaacccgaacgagacggccgacaatcgtcaacaaggcgcccccaccgtttaccgtgctctttggccagacgacgctccgttcggatgaatcttcccaatcccggtcgagagatcgcagcagacggtcatccgaagaatccagtcagaatcgtctccagataaacgcctgataactcactggatttccattctgatcacctcgtcccaatcgatctctattctacctgccccctctgccctctcgttcatgcactttcccttcttacgacaccgcaacgacctcgatcatgcccatcctccgttcctctttacctttgtgtttccatccgtctcggtttccttcctctctttctccctcttcctcgtttttctgggcttttgcctctaccgctcgttgccatccatgttttcatactttcagcgttctctccccctcactcgtccacatatcgcctttgccattgttacagtatccgatcccctctcttaccactcgcattcgaccatcctcactttcctcctgtccgtgtttcctcggtgtattccttgcacgtttcgatacgattttaatatttccaaaagaacccatcgcatccttgcccccggccacttcacttcttctctccatctttgtcaaagataccggtcttgttccacccgtccatcttttcgccttcacctctccctttctcttctgctcttttcaacaacaaaaaacacttcgatgttgcctcgtcgtctactcggaagattttactctttattgttactgtatcttgagtagatatccccctctctttgttcgtctctttcttctttctttttttgatccagacgtcctgctctcagctctcttgctagttgctttgatcttctttcattcgatttgcatcttcggctcccacaaggcctttcttcactttcactccttttgttgtctattcgaaacacacacgcatatatacacactcccctcttctctccatcccatctcatggcttcctctaccgttctttcttttggaaggaaaaccacttcccagtttattcctctgacgttaacactaaaaaaaaacaccccgatgggatcgttgatgttgtttatattctctactgtctcttcataatttattaaaaacaaaaacaaaagatgaaaatgcgatatatgcaatgataccagatatccttctttggtgcacacccaatttctccaccgatgctatcggcgtccctcgagtctcccaccttgtttcttctcatcgttgacggaaacgagaacaaggaccacgggcggcaggtctacctcatattggatgttctccctcctcttgtttcacatcgccttaaagctcttgtgtactcttcttgaacctctggctcggcgggtccatcaccttgaccgctcggacgcccttcaaccctttgagaccgtccaacacatccttctctatcctagcccaatcttgagagccagaacgaacgttctcaacagaaacgatatgttcgtcggggagttcaccgacgggcgagatgtaggtcaccggcacgggggatgtcaatagttgtgaagaaggactcaacaccaacgcgtcagtaaatactgagaccggggaggacagggtaagaagaaggtaggtgctgctttggaaatgtagttgtggaggttgaactggaccgagtgacatcgcaagataggtctctttggttggtggatgagtgggtgagtgggtgagtggataggttgcagacaaagggtcggatcctggttttgaaaggtttcttgtctaggttagcaggcgggtcggggtaatacgtctcataccgtccagacaaagcctgcttactctgagtatctgatggctaaaggcgagagcgaagacaaggacgataagaaataaaactgatgagggaaggttaaaggagaaaaggcgaataaatatctttccttaaagaaagacgtcatcgggcaagttcaacattgatcctccaccaccaccatcatcagcactcacaccgacaccgacacatcgctcaggctttgcaagctggacaacacaacatgaacagatcatttcaccaagcactccgaactggtccagctcggatgaaaggctcgtcggttgctctgagaaccagccgtccaagcgtgatccacgctcagcgagcacctttacacaccactcttcccactcggtttcctccttctaatcctctactatctcctgctgctgcctttacagattcatcctcgtcctcgacatctgcagagccgggtccgttggaagctgcctgttggtcatgttcggccgatctggcgagtcagcctgtgagccgagcatcgacttgttcgacctgtttagctatccaacctgtcgtccggtcgacgaatctgtttgaactctttgggatggacaaaaacgggacgttcgatctggatgaaggctctttgaggagagagtttctgttgaggagtaaagaagtccaccctgatggtttcaaggggaaaggagaggttcgttctttttttttctgcgttcgctctttctttcctttctctctttgtctttcttttttgtggtgcttggctctgttcgtgtatgaacgattcactgatgcgaggtgtccatggaaatcgatcaaaatacaaaccgccagatcgagtaccagtttgcacagcagcagtcttcgttactcaacaaagcatacgaaacgctgaaaaccccgttatctagagcgcaatacatcgtatgtctgctctctttgttttctcttccttgtcagatatctggcaaacatagattttcaagaaaagtcgatactgatgaatgatatttctttcgtttacacccaaaacgatttctcgttcatctaaaaatcagttgtcgttatccgatatcagagtccaagaggctgacgcaataaccgaccaggctctcttgatggagataatggaagcaagggaagctctggaggatgctgaatcagaggaagaagtcgatgcgatccgagaagagaacagaggtatgtcgtcaaatctttcgctctgctccctcttgctgagacttgactttccttgtttatatggaagcggaacgcaagaagagctgatgactgattgcttctaaatgattatgggttggggttctctgacgaaacccaaaaaaaaaaagaaaaagcgaaacggacaactgaacagctttcggaagcgttcatgaaaggagatctaccgagagcgaaagatttgacgatcgagcttagatattggaggaacgtagatgacgcggtttcgaacaagttacatcctgtcgattgatgtctctaccttttgttgcggaggctgagaaagagagagagagagagagaagcaagaagctataagagatacaaaaagagtcccaattgtctgactttgagggcagttcgacaacactgttttttgctcattcgatttaaacttttaggtggttctctttgagatacaaaagaaacaaaatagacaagatcaggtctcggcctcctcgacctcttgtccctctccgacgacccatctggagccaccctcgatcctgacggtgacgtccctactctctccccagatcttgagcacctcgcctacactcttgttgccctctgcttccggtcctgggaagaacataaagtgctgttcgacaaacacgtcggacccatcgactacagcatgctcgccgttgccacctttgaaggcgtagatgtggttgcaaggcacaccgaccatctgccgggcgagcgcccgaccgagagcctcggtatccttcaacagtttcccctgtgccgacggggctttcgttcccggaccggtcagatgaaggacaaggaaggcgccgacggtaccgacattggcaggtagaccggtgggtgtgtgcgcgaagaacgaagggtagaacaatccttcgtgggtctcggctgtgggcggggcaaacaccgagagtcgagcaagagaaatcttttcaccggttgtagtgacgagtgaggtgatctgttgggcggccgtctgggacgtcgaagggaacgacgggtccggattcgggctcaacaaaggcgcgtccgagatcacagacggagacacgggaacgaggtgcgacgtagggtttgcttcagatggagctgtcggagggttatggaagaagacggcggtgtggtggatcgattggagtaggtcagtgaagccaggcgttcggtagacgaacgaggtttcgcagtttagctgcaagagaggaggattgacgacaaggaaaaccccagagaagaaaagcaatcagtactactgaaaagaacgcattgtattctcatcaaacaagaatagtttgatcgattttgactggaatccaaatgacaaaagcgtacgatacagctcgaacggacatacctctacgattcctcctcgacggccccaaccttcaccaatgacaccgacggcaatgagaccttctttggtggtcctgttggccaactttgcctgtttcgctgcaccaccagcctggagatccttctcgagccattccaaagcggaaggaatgtcaagatttgcagcggcaagtgcttctcgagctttgacgatcgagatcggatgttgagctctatggataaacccagagatacaagtaagaacgaatgaccatgctagctcgaccgaaacaaacgacgggcccacctgagctttgcgatcaacgcgactggaaccttgacgggaggcgcggccgagtacgctctaaggacagggcgagctgcagatgccctaagaggagctcgaagaagagagaacatggtgtgaacgtccaacggaccaggatgaggatgagaagaaagatggaggaaagaaaaagaaagaaaaaagaaacactagaaaagttttgtagtgtttttcaaaaatcattacgagctttttctattgcccacgtcggccgctctcttttccgtttcccccccaccggctcttcttccatccacccaaccaacatcgtcatcgtcatcatcgacagtagcatcgacagtatcgcccactaaacagagaccaagagagagagattcactggctatcaggcacggcttctagtttatcatagagatatcggatattcaagtctcacactcattcagtaggtcatacatcatctggaagtcgaagcactcgttctgaccaatttcgtttttcttgttcatcccggtggtctgcttttggaaacattcgttggaacgttttcgaacgcaacagatctcatcactgtagctcgtttgaatcgccagagggcctgattgttctgaatccatgccatccttgttttcgttaccatcatcatcatcagcagcttcgtcatcatcatcaccgccggcttccataccggaatcgtcttcaaagccaaccacatccgacaacacgagttccacaccgaacacaacgtccacaaacaacaggtcgataccggaatcgaccgttccagtctctgccgttgacactccgacagattccgactctatagagccagtttctcccgcgaatcttcttcagccatatgctactctcttgaccccgtactccgccacaccacacccgtcctcgtcgtctcctccaccggcaccggcacctctaccgccgttccccagctcatctctccggtgcttccttctttcgtcgtctctcccgcctcttcctcagcatgtcgcgttcattccttacacaccatacacgccttcgcttgcgcctccttccggaccgaacgtcgagcgttctcgagcggtctgctggcgccggaaagagctcaccaaggaagactgggctcgagaacgcaagggtgtcgagaaatgggtcagatggctagagggtaaagagctcgtgcttgtctctgggtccgaggctgtgagaagcgtgttgttcgacagggaacccaccggcgggtcggacgaggataaagagagcttgatgagagccaagcaggagcgaacggtgtggggagacaacttagaaaagtatccgagacaaagctcaagacctcttttatccgactgggttcaagggcgtgaagagtaagcccaatacatactttctctcccctttgtgcatgcaaagcttgtgtatatgcatagtacttgaactgacacattcgatttcactctctcgtttgaatgttcttcaacatcttctttctctccaatagcttcattcaacctcttcccttgcaaccaccattcctttctgtcctccaggcggctctaaaggtgtccaccacgatgagtacgatggtgacccggtacgttcaatcgttcaccgatggtactcaactcggcgcgttcaacctcatctgggagcgcacgccgctggccttggagttccttgtggaaaaggtgccccaagcatggaaaaatttgccggacaacctaaagagtatcatcgatccagatggcggtacgggtacagcgggtacgggcaagacggaataagcgtctgtggttgaggagaacagcatgcctttcgtttgttgtacatacatgctttctcttttctttacgtagaaactttgattaggcgccgtactctcatacaggctttgttttgaacggcgataaagatatgtgtttgatgtacaaataaaatttcatcatgattcctcgaaggatgagggaatgctggacggaaggattctcttaccgttctagccggtacatctttaccgcgagacccgaaagagcttcactctgaatcagctctttgagatcctgtttcttcagtcttcagtgtccgctctttacatctcaaacaccctcctcacatcgtctctacagactgaatctaggagaagaagaagaagaagaagaagacaagggagaaagaaaaaaacaaaaacaagatgtccgacacagtcatgcacccaaatctcccacagacgaaccaagggactcgaatctctcagatgatcgttctagatagatctcgtttggctgactatgaggcatgccatcgggatgtatttcctggagtgctggctgctcttcgaagagctcatatattcggtcagaacatcacttccttttctcggctcttcatcgaatgattcggacagtctgaaaagttgctcagactatcgtcttgcttgttttgacacgactatagattatagcatccatctgtacgacatccctgcattgaacccaaacccaatcctagtcgccacaatgagatactgcgggagcgatttcgagcgagatatgagctcagttgcgcaagatacagagacccatcggtggtggaagatggcaagcacgctcatggttttgacccttgtattttctcgatgaagcagctgactccttctttcctcttcatacgcactatactccgatgcatctgaaaacaccaaaaggtcgacccgatgcagaagtcccttgtagagggagccacaggaagcgcctcgggccctggctggtggatcgatggcaaggaggtgttcaggatggagagctgagggagagaacgattctgtattccttgttgtagttgttttcgtctatactctgtaatgttttctagtcaatttttttaataagacggactttctgttcaccttcaagttgcatcttaccattccgttctatctcccttccaaaaccagagagttcaatcggctcttttgattctcagatgacggatcgtcctatccagcctgcttatccaatggccttcaaactactccgtcagccagcctccaagttctccagcagactaggacaattgacgttgaccaggtcgggtcctagttcagaacctgctccttccgaacactcaatcatacttcctacccctggtctgcttcgaaagacaacccagggagctgtaccccatttgacgaatgataatctggaccgtctgcaggattcggttccgcttgctcatgtgtctctaagttccttgtcagtttatcttccatgctcttggtttatcgggctgatttccaacgactgattcgccttctttcctgaacctgctctgtctggctgcttaaatatccagctatactcatcctcaaacgataccggcgatctctaaagcatcctcctcacgtccactacataagtttcttgttttctcaccttctactaccattctctcgctctcactgtcggatccaggatcatccagccctcctccgccagccgcaggtaacacccaattatgcttttcctcagtccgaggaactcactctgttgcgttcggcgacttctatcgagctgcgttgagcctccgaccggacatcatctggtcgccttcagacctcttcagcggttcggttgcgcctacaggcacaggaaagaacagccggggtcgaaaggaacaacgaggagtggaaaggacgatcaactggttggccgaattgatccttgctcgccagtcgattgatccgaacgaacgcccagccatctgggtcgagctgatgggtggagctgagccaagaaacagacgagcgttcagccaatccctcatcgaccccccgcctgtcaacatcgagctgactgaaccgctcgataaagaagtcactggctacgtccttccgctctcggctcttcgacatcgactacacccatcggattctgccagtcggtcgattcaaggcattcaacatcatccgtcgccgacacctttgttcattcaagagatcaactccctcttggaatcgtctcttgaggaattgtcagcggagaagccaagatacgcgccagcggcgctgtcgccgtttgagatgttggatctcgttgagcgtggatgggacttgtttgattacacgccggctgaggaggcggccgaggcaggagtagcattctcgttcgagttccccgttcctaccgagacggaatcaacggaacctgaagatattggaatcaacctgtacgatcctcggtttgagttcgatttcacgcccttgaagcctactggaaagaagaccttggtgtcccacccaacgtttgaccaaaatccaattcagcactgtccgctctcaaaaatcgacgtcgagaaggacacccagccggctttcacaaaggcctatatccatcatttacttctgacccacgagtgagaacacctctttggatttcttatagtgctgctctcttcttatctgtgctcatgcgtgcgactgattcatggttccccttttcttaacgtacacgtctgaaacgaataaagaatgctgtccaacttgctgatagcaacacacaacaacgcccacctcgacgccttcttctcttcaattcgtcatcttctctccggtccagacggtccggcccggtttgcggccgagaaagctcgattcttcagccactatgctcagactaccgaagagctcgagcaaggttggcaaggccgagcgggtgtcaagtttgtgagagggaaagggtcgatgggcaaggatcgggatcttcaaaaagcaaagaaggatattgagcaagggaaaggagaatctgtgaaatatgtcgtgcccggggtggagagcatgcaacaatagaattccttccaaacgtcttcctctgtgtcctaatcacaccaacaagcaagtactgaactaacagcgcaaggtcaaacgcacgaagaacacgttgctagtcttatctgacgcgtctacgccacatggcacgtgagcacgcgactgatttcatacaccgctttcgcgtatggttacatatcatttacgcgtgcccagcctgcgcgtgacctccttcttttttctggatgagattatctggaggaagcagagaaacaacgctcccgtttgaccacccaaacatcagccttcctcctcttcttggtagcttcggggctctatagatcttgttaggttactaatatccaccaagtattcaagatgacatccgctcaagacagagttcccgtaagtttttggctttctgccctccttcgacaggaattttctcgtctttccccgttgcttcggttttattttgatctcttcttccgagcgtttaccaagaatatgatcgattctaacaaaccttgattccgctctatggctccgttgtctttgtagctcgctctccacgtcccgctttcttcaatcccgttcaacccaacgaacgtccctcacaaaggatccaacgggtacaataatgcttcacccgccgaagccagaaagaccgcagtacagcttttggtcgaagatgctcaagctagagatttcgatcatgtttgcctcagcctgaccaactcgtgagtttatctctctgctccgaatgagacgaatgttcttgttgatgtttctgtgtgtcgtatgtttgcatatgtgtatccaacacattgatcatttcccccggttgtatgtcttttctttaccgaacgcatcgtcaacagaaattggcaaactcgatgggagagactttgtctccgcgcggcggacgcaccggacgatccagagtctcgacgaaagacagaggaagaggccgaacgctggaggatgggaggcggtttcatgagaggcgaagttactgtcactcgacttggtgggctcaatcgaatttcatcctcctccctctccctacatcggctgctgctgctgccgagtctttgaagctaacgtgcgcaagagatttatcacccaaattcgcagaggaaaccgagcatctcattggaatggcttctgaatggttggatctcgactcggcagatgaaggtattcgattcgattctgaactcgtaagtaacaccttttgctttttgtaccgcttatgctagtctgctgtcatgagctacgcctgaaccaacagacctatctacccatttcttcaaggcactccggcatgagcttgctcaagcagcttatctcaacgtacccgtcgtgatccttcccccaccccggaaccgagcgctcgtcgctgactacgcccgagctgtgaatgcctgcctagccgctggtggtccgtatacccagatctctattcgaatctcgatctctgatccagcagagcttatcaaccagccaggagataacgcaaggagcagtgggagcatcatgagccggaacagtgtccgtctgagcactagccggccgggcggtccggacccaagcgcgacttgggaattgtgggatgtcatcagaacgatgtgtggatacaaccccagacttagttgcagtgagtaaattgtgctcttcatcaaactttatgatccatcagcccattcaactgtgcatattctgctcccgagattgactgtcgacttttcgtgtttcccttcccagctttggatcttaccacccctcttccgccttcccctggcgctctcgctcgatgggcttccgaacctactagacatattcttcttcccgcctctagctttatctcgaacgccaaaggatatcccgtgctcagcaaggccacccaaaccttcctcaaggaagtcatgaaggtatctttctctatgtttattcctgatgtaacttccatacctcttgtttttctgactcggatcttatctaaccctaaccaacagcaacgaccaacaatcattctttctcaaacgacggcaaaccttcacccttcaggtggagccccggcctatcctcagtatgttcgacatctcgagcgggcagccaggcagcttcatacatctcctggcggaatggatgactttgcaagaggctactgggactggctccaggcgccactccagccacttatggatgatctgcagagctcgacgtacgaggtgtttgagcgagatccggtcaaatacaagaactacgaagaggccgtggtgttggcgttgaacgacagaccggcagggacccccctgtgagtaattgttctttctcttcccttaactgatcatctcaaacctgatggtatctcatgctgattgtcatatgatactacttatcaagggcaatctatgtttgcggagcaggaagaggacctttggtcgccggtgtgttgcgagctttacagcgtgcgaaccggcaggctcatgtatacgccattgagaagaacgccagcgcttttatcacgtatgtaaactcttctgcactgacatcacagtagacttgctaagtctcaatgctcaatgaacgggctcgccttccttgaaaatcgcatcttgtccgagggtttatagactgcaagagcgtaaggcgctcgagtggggagatgcggtcgaaatcattcttggcgatatgcgaacattagaagtccccgagccggccgatatcatcgtatcagaacttttgggatccttcggagacaacgagctctcaccagaatgtttggatggagcgatgagattcttgaaacgttcgttctcatactcctttttgctcacaagaagatcaagacagatcgaaaacacactacgagtggatgttgattcgtcatgcgttttaccacacattttgcttctcattcaaacagccgatggaatctcgatcccgtcttcctacaccgctcatcttgcaccactttcttcctccaaacttttcaacgaggtcaacgccacctctagagaacccaagcaggcagagacgccctatgttgtcatgttccaggctgtcaacacactttcaggagatgcccctccggacagcgctcggtgtggaccaagggttcaggaatgctgggcgttcgagcacccgaggagggatctagtgctcgatgattcgggactgcctctcaccaattctcacaacactcgatccgcccacttgacgttccatatcccacatgcgggtgctctccatggtctggctggttactttgaggctcatctttatggctccatcgggctttccattcatcccgaccgacagcacatcatcagcccggacatgctcagctggttccctctgtttttcccgttccgagtgagttccaagttgaacgcctgcttcttctctgggaagtccacataattcttacgatcattcgtcctttgtacttggcaggaacctctcttcttaccgagcaactctgaactagacgttcacgtttggcggttgaccgactcgcgcagccgcaaagtaagtccgcttgatcccttgatcttagcatccttcttctaatcgacaaacgtttggataccttgttcatctatttctcttgtactcatccctctaggtttggtacgaatggcatgccgaagcgttcctaccccttacttctccaaccgctcttatttcctcgccttcactggccacgccgggaatgccttcgactcccggtaatggtgttcgaacaccattggctagtccgatgatggacgccgctcaactgagcggaggcctgttcagggaggggacggagagtctgactggaggaacagatggatcccgggggactggacggatcaagattggccagacttcattgctcaacccaggaggaagaagcagttatattggactttgatcagagcagaacgaaagttcctctcaagaccgattttagggaggaaattctcatcatactcaaaatttacctttcgatttctctcgccttctcttttctttcttgggcgagcttccctgatctctatatacacatggtcgtatttatacatacatgcgcctacttccagacgctgtgagcagatgaacatacatgaatcatttttgaaactatttaaggactaggatctggtaattacgaggtgactcgggtaaaaacactttgtgctccgtcctcgatcgacttcttctttcttctgctctcctcactaccctcacgtttttctatctctccctctcctttcagataggaaaaaaaacagccgagaccatcttagcttgagttagtcccctatcaagagaaacctggcttattctgttgtgaactgaatcgattgtgtctcatgcgcatcgccctccgctgacgttgtatccgtttcgaaacgacaaaaaaaagttaggtctcatctgttcaggaccatgtccaacgctagttctaccaatgaccaggtggatattctcaaagtctcgtacgcatctctctcttctccattctccttgagtatcttaagagaaacgtcgactgatcaattcgatgagacattctctccttctctttccgtacagaatcttgggcaaagagagcatccactgcggttttcatttaacccctcacctcgttcggaccgtcttgtccgagctcccttcttcagcctatgctatcattaccgataccaacgtcggttctctctaccttccagctctcgtcagcgagctcgaggctgggatcgctgcttcgtccaagcccgacactcgagtcatcaactaccaggtcgacccaggagaggaggctaaatcggtcaccgtctgggacgatcttcaccagtggctgcagtcggaaaaatgcaccagagataccgtcatccttgccctcggaggtggtgtagtaggtgacttggctggtttcgttgcttccaccgcgtaagttgtcggtcgtcttcaagctcgctctttgattgatcgaacgtgtgtgcgtcgaggggcattttcgatcatcactcagcgttagcttacccctcttgtcatctttatcggggaaattcgactattgaatagcatgcgaggagtccggttctgccagatccctaccactctgttggctatggtggattcggctgtcggcggaaagaccgccatcgatactatccacggaaagaatctcgtaggagctttctggcagccagagttcatctttatcgacttggcctacctcgagacccttccttcgagagaattctcaaatggaatggctgaagttgtcaaggtcagtcaagcctctgttctatcgaccacctctaagtgcaacagagttgacccctattctctgtcatccagactgccgctatttggaaggaggatgatttcgcttctctcgaatcccgagcggctgagatcacttctgctatctcttctggttcaacaacgtccaccttcgcaggtcgaacggttgcttctcggtctgaagcccaaaagcttctccttaccgttgtctctggatctatcggcgtcaaggccgagatcgtcaccttggatgagcgagaaaccggactccgcaaccttgtcaactttggacacaccatcggacacgccatcgaggctgtgttgactccaaagattcttcacggagaatgtgtcgccatcggaatcatcttggaggccgaggtcgcccgtcagcttggaacgctcagccaggtagccgtcggtcgactcaagcgagcactcaaggcctacaacttgccggtctcggtcacagacccgaggatttcatccttgccagaagctaagggtctcacggtcgatcgtttgcttgacatcatgcgaattgataagaagaactctggatcgcacaagaagatcgtgcttctgagccgaatcggaaagacgtttgaagagaaggccaccgtggtggccgatgaggtcatcaggaagactttgagcgatactgtcagggtcatcggcggtgttcctcacagtcctatcaagatgaccacgcccggatcgaagagtatctcgaaccgagcgcttgtattggcggcactcgctaacggaacctgtcgattaagaaatcttcttcactcggacgacaccgctgttatgatgagctctttggtggacctccaggtcagctaatgtgccttttctttctcgaggagaactttgaactgacccgtgtccttctgtatgtttgttgacaacgtcttttcacacgcagggtgccaagttctcatgggaggacggaggagagactttggtcgtcgagggaggaggaggattccttcggtccccccctactggaaaggagctctacattggaaatgctggaacggccgctcgattccttacttccgtctgcgctctcgttcagtctcctgccgagtcgaacgaaaagaccacgacgatcctaacgggtaactcgtacatgaaggtccgaccgatcgcccctttggtcaccgctctcactgctaatggaaccgatatctcttacgttgagggacaaggcttccttcctctcgccatcaaatccgatggattcaacggaggaaagatccagctagccgcatctatctcgagtcaatatgtctcctccatcttgctctgcgccccctacgcctcggaacctgttgtgctcgagcttaccggaggacaggtcatttctcagccctacatcgacatgactatctcgatgatgaagacgtttggtatcaacgtcacccgagatgtcgatgctgacggcaccccgctcaacgtctatcgaattccccagggagcgtatgtcaacccggctaactacagcgtcgagtcagacgcaagtagcgctacctacccgcttgccatcgctgccattactggcacgacctgcacggttgctaacatcggttcgtcctctctgcagggagacgctggtttcgccaagaacgttcttgagcccatgggctgcaaggttgttcaaactgaggatgaaaccacggtgactggacctccagtcggtcagcttaaggccctcggagagattgatatggagaccatgacagatgcattcttgaccgcatctgtcttggcggccgtcgcacttggcccggctagggacgagaagggaggcaatatgacccgaatttatggtattgccaaccaacgggtcaaggaatgcaaccgaattaagggcatgcgggatcaacttagtcagtatcttttttcttcactgctttcttttccgacagcaaacttacttattcttcactccacctgaaacatgggatctgcagagaaatttggtgttgagactgatgagttcgatgatggaatcatcatctacggaaccactatcgaggctcttgagtctaaagtcaagattcactgctacgatgaccatcgagtagctatggccttctctgtgctagcttgcgtggcctccggaactatcatcgaagagaggaggtgcgttgaaaagacctggcccaactggtgggacgatcttgagaacaaggtgcgagcttgtctccttcttattttatagtaacacagatagaaaaaggtatatactgactggtacctattctgtctgatatcttgatactcgtatggtatttagattggcatcaaggttcttggtcttggaaacggacaggccgaggcctctacgtctgcggtcactcacgtctctcctactgtcagctttgaatcggatgcgtctatcttcataatcggaatgcgaggagctggaaagacttgggttggagaggtcgctgccaaggctctcggatgggatctcgtggatgccgacgtgttctttgcccaggaggtcggacaatccgtttccgactatgttgccaacgaaggatgggctgctttccgagaacaggagacccgttgcctcaatatcttgatggagaagcattctaaagggcacatcatcagcctaggaggtggagttgtcgagactcctgaggctcgaaaggctctccaaaactatgctaccactatcggtcctgtggtctacgttatccgacctgttgaggagatcatggcattccttgagaactgcggtcgaccagcctacggagaagccgacattgacgtttggaaacgccgaacgctttggttcgccgagtgctcgaccttccagtacttcaaccacactcacctccaacaccgacctgtgcccacctcgtatccttctgtgaatactcagaccgaccgatccgagatctccagattcttcaacttcgttgttggtcgaaattacaaccgaccggagagcctcctccctcccaaacgaactaccttcctttccctcactttccctgaattgacgcccgctctcccgttcatcgaggacatctctgttggagttgatgcgattgagcttcgagtggatctcttgtcggatgatcaccagaccgtcacctctcccaagctaccttcggaagattacgtctctcttcagcttgctggccttcgacagcgaaccaaccttcccattgtcttctccgtccgaactcactctcagggtggtatgttccccgacgatgccgagagggagtactttgagcttcttgagctcgccgttcgatctggatgtgagtacatcgatctcgagattgggtggtccgacaagagcctccaggctttcgttgagaagaagggagcttcccaaatcattgcttctcatcacgatgcatccggaaagatgaaatgggatggttctgatgtcaagagccggtactcccgagctgccaagtacggagatatcactaagcttgtcggatttgccaacaccatggaggacaacttcgctctacgcgcgtttgccgccaaggttgcctccaagtcggacaagcctcttcttgctatcaacatgggtcaagctggtcaactctctcgagtcctgaacactgttttcagcccggttacccatcctcttcttccagttcgggcggcgcctggccagctgtcttttgctcaaattcagcagaccttacacttgatcggatctatttcgcccaaggagttcttccttttcggatccccgattgctcattcgatgtctcccactttgcacaacacctgcttcgaggctttaggtcttcctcaccactacggtctccatgagaccgaggtggttgacgacaagctcaagacgatcattaactctgccaactttggtggagcgaatgtgacgattcctctcaagttggatgtgatgcctctcttggataccatctctgagcatgccaagattgtaggagctgttaacaccatcgttcctatcaccagggccgatgggactcgagagctccgaggagagaacaccgattggctcgccatccgagatctctgctcatccaagcttcctattcagagccgaatcagcaagtcgaccacgtccctcgtgatcggtgctggtggaacttgtcgggcagctgtgtacgctctttaccagcttgggcttcagacaatctacctgttcaaccgaaccaaagaaaacgcccagaaaatcaaggaaagcttcccggaagagtacaacattgtcatcatcgactctctcgcttctttccccggcgaggcgcccagtatcatcatcggtacgattcctggccagtcgaccactctggttgagggggcttcttctttaatacacttgcctgcttcgctcctttccgccaaggaaggaggtgtcgttgtcgatatggcctataagcctttccctacccctctgctgaagttggcccaggagaccgaaggatggaacgtcgtccctggagtctctgcgttgttagttcagggatgctacgcgttcgagatgtggaccggattgaaggctcctcagatcgtggccgaaaaggtcgtttggaccaagtactctgcagacaactaatctggaaggattgccgtccttacccacttgtttttgagtctataatgaaatttcttgcttctcatctatcatcgcttttccttgtcttctagctgtgaatcatctctgctcagaaccaaaggacccggatgtgacccgcgtctcttagcatattcctgttaaaaatgttcctctttatgtgcaccaatagggtcaatctgaacaataaaatcatattattcaacaaacccaatgatagaatacaactaggaacgagggatcctgcaagtgcgcgcgaaaagagaaagagagatatgagaaattgatatgaacactttgacgagatagattcatagacgaaacttactcgtttacatcaaaatttctcaaaaagaccagctttttgaggtgaagaaacacccagcgcaccctccagccttgtttagccttccactatcttcatctgtcccaaactgtggttatttcgcgacaggtccaaatggtcatgtcgtgttgcactttgtgtcaggcctaagcctcgcgcccgtctctgatgtatgagccgaattggtgtttgaacgagcgcgcaagctcccgttcatttcatcgttggagtcgatcgatcgatggttggtcgatgctttgtgagatttcatagcagcctcggaggcgtcctttgcgaaatctttgttggacgaaggtgtctcccggtcctgatcctcctcgttgtcgttcttatctttatcttcatcgtcgtcatcatcgttctcatgggagctcaaattcgagtccgagtcttgatctttccggagaagcttgataggaagggaggaggatacactttgcagttccgaaccgatcacgggaagaaattgcaaaggcttgtttgaaagaatgttgcccgtagagatggactgtaaagtcatcgatcgacaagataggcatcaatagcctgcggacgtcaatagagaaggtaaggatataacctaccggagtcaggatatctcggaaagtcttggaatcaacgtccagtacacctcgatgcttctgttcgatcagatgaagggccaaggccgttccgacctttaagactgagctaacatctcgtagggaaggcagaaaggatatgcttacgaaagtagtgaagtcacgggcgtgctctcttcgtccgaccaaaccgaatggtacttctttcagatcttttataatcttttttggctctgccagaatttttggaacggtttccaacaacgggttgccgagctttgtcgtcaaggtgtctcccaactagaaggtcaattccaaggtcatatgcgaatgagcaaacgcgcacatgggtttgacagaacaaggtatgatattcgtacggtagtcaagaaatctcgaggatgtcttcgtagatcgggccgcacaaggtccgagaacacgcttgggagttcatcgagaacatgaacctgcacgacttcatcgagagtactctgtgcacggttggccattcggtcaatgatttccttgtcctcgatttcgttcataaattgagcacggggctgatggtgaggcatatcacaccaacgaaacaaaatcaagcaccaatgtctttcgatcagcttccaatgtaaactcagatctgcgccaactaggatgcgatctcacagtcagccccctaggatgcttcctcgtgaagccgaggtttggggatctttctttcacactgaacgagtgctgagatgaagagcgtttgagaagagcacttggctccgttgtcttgtgtgggaaagagcgagaaaagtgaaagcagtttgtgacgcgctcaattgaaaacttaaggactgagtgagaaacggtgaggtagaaggtttactaacgtctgcggcatggacgacactggaagcgaggggaccggtcatgttttcgaccattcccaacgggactaagtcctcaagaagtccactccgttggagtgaagcaaccctacttgggatgggcgcggctgaagcggagttctgcaacgtcaccaaaagcagggcgagcgtgaaagctgaggaggatggtttaacgtatagcatatttaaatgtgcttgaaagaaggtcagaggtcagggaaaggaggtggagaaggcacgaaggggcttgatgatgaagaaagttcttgcacatttgattagcgcggcaagtctttgagtcgttgaatatatcagaggcttacttgtgagactggctcttaaacggggcagaaacggagcttgaccagcaagacgtgcgcgactgaattcggaaaaaagagcgtgggaggaacttgtcctattgaacgacgagacaggagaaaagacagacgagctcgaatcaatcgaggtgttggttttgaagggcaaatgagtgtggggaagaggtgacgcaggagggagagggagtgaagggacagaaagaaagaaaaatgagagaaagaagagaaaagcaggccaagaaacatagacacccagtttgtcctttatacgatcagaggagcaagggctcatcggaacacttgatgttgttgtttacagggctgggtgtcgtgagaagggtttgcgtcagttcgttaggcagagatgagtgcctgacctcacccaggaacagacagaaaaaaacgactacgatgttgtacatccaggttagctcgcacggcgatcttacagggtcagcatattcacaactgtctcctttttctttcgttgtaattttccaatctaaccagccaatcccacaagaatatggagaaaaaaagcttttttcatccaaagcattgacaactatcaaaatctaagcctagccaaccctagaaaaaagattcccaatgaagagctccttctccaaaaaagatggcccaaggactctgactttaacaaaagtgagtgcgcgcttagtaagccttcttggcagactgagcgaggaagagggagaactggtcgtagggggtctgtccaggggcaatgtctcgccagagatcgggggtaaggatctggtaagacttggagagagcgacgaaagtggccttcaagaagttaggggtggtggcggtgcttcccttggactgggtgtagacatcggcgataccagccatctggaggagcctcttggaagcgggggcggcgacgataccggttcctcggggagcggggataagtcggcacatgacggatccggtcttaccagagaccttgcaggggatggtgtggggctcctggagggcggctccccagtatcctcgtcggacagggatgatggccaacttggcggcgatgatggcacctcggatggcggtggcgacctccttggcgcacttgacaccaagtccgacgtgtccgtcaaagtctcctacggcgacacaggccttgaatcgggttcgctgaccggcagaggtctgcttctggacaggggtgatgttcatgacctcatccttaagggtggggaggaagaagtcgatgatctggaactccttgacggggagggagaaaaggtagatctcctccatggacttgatctttccgtccttgacgagtcgaccaagcttggtgacgggaaccctgaggaatcgcgcgagacaggaggacagcaatgagttgaagatcgaatcaaagagtaggcgcgctcacgcgctgatcaacgcgtgaagaaatagagcagaagaaagaagcgcttaccactccttgtcctcgtcctttcggcctcctcgtcgaggtcctcgtcgtcctcgagtgtcacctcgtccacctcgggcaccagcgcctcctcggcctgtcagtatgtaaattccacatgagcacgacatgtcagtttcccactccaagccaataatctttcggacacaaatttcctttacaatcaaaacaaagtgacctaccgaaggctcctcgtcctcgaacttcagacattttgaataaagggagtgtttaaaaagggtttaaggtgaaggcgagaagattaggtctcggactcgggtcgacctaagaagctagttgaagtgcagaaaacgatccgctctgtcagcatcgattttcctaaggtttcttatgttgcctgtataacatatagcatcttgttctctctcgagacttgcaacatagcagatcaaagggctcacttgtttgctgaggaacttgcttggggagtacaagcgtctgcacctgggaagctgatcgatttgcctgggctttctagaaaggtcagattccggggacaaaagtcatgggaggtcaagaatttgaaggaaaagatgaatttcaaaattctttcaaaatcgagaacaacctgaaattcagctggctcaacgcacttacgtaatgtaaacatccgcctcaggtacaccagatgttacaactgttgcatgttaccgcgtctgaatgcgcgagccccatgcaaacccccgttcacccccaatgtacccccgatggtaacccgacgcaccccacgtgtgatcaccccgtcgaacgttggctcggtatccctcctgttacgttcgttatactctctacgcctgttacatgtgccattctgatactcggccaacactccagttcgcccactcgttcccccttggataccgtctatcaactaaccacaacgttcaataccaagcctccaagcataccttcttcagctttgctctttagccttccctccttcctcaacatcaccttccccgtcttcagctctgttcgatttccagaatgatgaatttacagtccaaaaatattatgtttaattcttgccctgcgtgagttacggttatctatccaagcttatcttgaacgtgtgaccccattgttcctcccggaccaactctcacctttgttcatctcaaacacatctgtatatgcatgctctctagcggcgtatctacgaccgggaacagggacaacactaacaacaacaacaacaacaacaacaacctcttcgggttccctcataatggacaagtgaacgacgctctggcgatcgcttcggtcggtggacgaacgttcacctacaaattcaccggcacgggcggcggcgggccaaagtgttgggtttgagggcggctgggtgaaaaatgccatcccttcgctgggatggtcacagaggtttgtcctcttcacatctctatccatcattcagcataatcgtcgtcccaagacatattctgtcgatgagaatgtcttggtatctgccagaaagggctcatactgactcggttgtttctggttgtggcgtgatcttaggcacgtgacaggtgcctctgtgcgagaaccttcttccatctccccttccccttcctatcctcttctatcctcctcgatctcttccctctcttctctttcgtctacctctctctccgtcgtttcctcttctgcatcgatcgcctcgacagcttctccgcagatcatcagccagggatcgatcatcattccctcttcgaccccgctcttatctcctcctctctcccccgaggtcttacctgacttttctcttcccacctggtttatcttcccctcgtcaggtagcttggctcagcccaagcctattcgccaggtatcggtcgacctgccgatcactcccgattccactccaccgtctccttcgcctttgggaaatgcacccaacttcaatacctctgccggtcgtccttctcaggaacgcgttcggcaaggctccttctgggacactttgctgcccaagaaggaagaagttgcggccgctaacgcccgatctgaaccggtcgtggtaagaagtgaattatcgggcatcgtctgggacggagtcttgttgaacagtgggtcgggcttgctccccgttccggcggacgacgaggagcgtgacgctagcggaaagatcttggtgatcggtttgcctgatgccgttggagttgagattagagaatcagtcgagatcctagttcgtcttgctgtcttgttgttttcattcttttgacagcgcatactgatttgtagaatcgacctgaaacaaacgttcagatggatctcgcgtctgactatctagacgttagcaaggtgatctttgtgcttcggaaggcctcgccagatctgcgcgaactccttcatggtttgctcttcatcggaggatctatcattgatcctaaaggttcatcttctactacatcgaacatcgcgatcaacgggggaaagaaacgcggaggactgaagcagaagaaagtcgagaagaatggatcggggagtgagggagagagtacaggaagtgaaagtgagacaacaaaggtaaagaggtggaggattgactctggtgcagtcttggtgggtatcgagttttgagtaattcacagagttgctttagtcaggcggtttagctcccgcgacattcttctttgcttctcctttttttattttatcatctcttgttagtcctctccgtttccgccatgtcttcgttcgttcgtcttgctgtttcctttctttcacaattgcccagatagagaagagcaggagtcggttcaaacgtttgagcatcgagcaaacatatatttttaccatttgatatcatcctgtctacagaagttgacttttctatcatatgcgcctatgcttttattgtttcgacgagtaacgaggggagaggaagaaaaaggagagtgataggatcggcacagaagcgtttgcaaccttctactggtcccaaccgacctcaccgacccatctcaagacacctgagttgttcttccagatatccttgacccaaccacctcgttcggcttgaacggcctggacaaaagcaggaacaccgccatcctcaaggccgaaataaagcaccttggcggccacccatgtctgggtccgagaactacctttactatcttctgaactttcggatgatgttataaaagaggaaggaagggaaggagaacgacaaggaaaagaaacccgtcgtagaagttggacgagtggacggagagaagtcgactggtacaccgtttcactcgtcaatacgatatccattttttccttctctgcccttgtcatgggagtttcctcttccgaatcggaagcagaagaagagggagacaggtcgaatgtctgccaacctcctgagaagaatcgaagttcgatgttcctctctgctaggatcttctcgaacgcttgaattcgagtggccgagagagagaaagtgttgtcctcgtcctcttcgtcttcctcctcatcctcgggtttcgcgttagacacttcaggagaagaaggtgtgggagatgttgatcgaatttctgtagaactggtactcgcaccaggtgttgaagacgttgaggcggaggcaaggacatcggaggaagttgatagaagggaggcaaaggcgagaagaacgtttgggagagtgacctaaatcaaagacaacgaaagcagagggtcaatgttcatcatgttcagacgcgaggcgcgcaagaaactcacgagtttgagaacgagctcattgtaatccaagaaatggaacgttgtccgcggaggaggttggttgttggaaggagaaagactgctgctgggctttcgcaacaattccgataataagtaaagacttggaagagaagtcccgcatccgaccttgtgggttattcgtcacagaaccgtgacttcatggtcagcacgggaacggaaagagggatcatatagtgataacgaaggcaaacctccatgatcctttttccttcaatcgacttccagccgtcggttggactccttccattcttgtatagatcgtccttcaacaggttgactagatctatcgagcattcccaagtcttcatccctccttcgtaaactcccttcacaagatcagtctccggtccccacctttccttttcatcatcatcatcttcggctgtatcgatctgttggaactgggcgtcaaacatgtctctccggaggaggtcaaatgggatgttgggtaatcggaggggtgtgtaggagagcgtaggaggaagcgttcgaagctgaacttgatacaagagcagagaaacgggtcaatcttcgagggcaaagagagacacgagaggagaaccaggagacggaccaaggtctgaagactgatctcttggaaagaagcgaccgagggcgcatcagcacttatgtccgatgtggttgtattcgagtttgttgctttctctgtggtcggctggataaagtccaggttatcctggccttcatcatcttgctgtttttgatcgaaaaggaaagcgactttggtcaatggcatgtcctatccgtttcagaatgtcaggcatgagaaactgatagcgcactcgaagatcgagatcaaagtcgaacttgaacatgtcacagaggagaacagagtgaagttcgaaggtgaggttgagtgatagagaagaaggtgaagatagaaccaaccatgcaaacggacatacgccacaatacgaaactgactacaaatgattgggaagttttgtagtcgtccactagaaaaatgactctccactttattatccgagcacagccaagtttttagtagaccaaattttggagctttgcatattcaacaccttgctctccttgcacctctcgttctctctgacccactttccttccccacctgtaccctagccatgcctttcatcgacgacaagaagccaaagaggcgaacgacagtcactgagcctgccgacaaagagtccgtcaacccaacggtcgccgagcaggtcacagcaaagtccgccgcccgggacgtcacccacaagccgtggtccagacgagttcagcaagctccccagcctcttcccaagtcgcttacccagaagaaatctaccaccaccgctaccccttcctcctctactcagcagtctcagaagaagcgaaaggctcctgagcctaaggtgattgacccagagtctgaatccgtcaagaacgctccgctgctcaagggattagagcaaactggctaccactcaacttccgaggatgacgaggaggaggatagctcggatgatgaggatgaatcagatgttgatatcaaccatgaaggaccagttgagggaatcgaacttacgaagcttccgacaatcaacaaagacgacgaagtggtaaagaaaaagttagagaaggccaagaagtcctcggttcgtgtatagttctttattaaaaatcttctgtaggacatgagaatatgcttgttctgacattgctctcctctctcgaaatactttagaacaaggagaagggtgtgctctaccttggtcgaattcctcatggattctacgagaagcagatgaagtcttacttcgagcagttcggtactgttgagaaagtccgactcgctcgaaacaagcgagtgcgttcaaattctttcgtctctgtccttctgtcttctttaatgtctttgttcttaacgtctgtgttttgtatcggcttagactggagcctctaagcactacgcgttcatcttgatggcccaggcttcggttgcccagatcgtggccgaaaccatggacaactacttgcttctcggtcgacttctccagtgcaaggtatctttcattcattctcttacgacttcttgcaacatctttcttatatcctctttttgcgtatcattttcgaccgcaggtcatccccaatgacaaagtccacccggacttgtgggctggcgcgaacaggacgttccgacctattccttccgtccgtgccgagcgacttaagctcgaggcaccccggacggcaagtcagcaagctaaagcagagggccgactcaagaagcgaggagcagcaaagagggcaaagctagcggctctcggagtggattacgacttgagcgaggttgactacgtacgttttcaccctcttgtctgggcttcttatttctttaggacgcgcattcaactaactcttgcaatccgctttcgtccaaatttgttttggtgatgtagaagaaggcttcagcatagattcatcccttcgttcattcttgtttttctcctcatctgtagtcattccttctttgcttttttttccatcaggtgttatatttttcggtctcttgtcctttactttcatgcacatgacttttcacttccttcatcagaatctcaaagtttcaatctcatcagaagaccgcacagaaggaacagcagtgaggacgcgctgccagcaggatcaacctttttcagatcatgaggacattgtagaacaatctctgcctcttctctcgctcctactagagaactcatattcagtttaaaagaccttgcctcttgagatcctctgagtttcgatgacagcacaacaaaaaagatacatgcgttaggaataaaagcactacgacggagtgaggctgagataagtagaagaaagagacgaaccgtatgtccgtcgatcgtagacatttccatcagcatcctcaagttcttcaactgtttctactgctctcgcgtcctgtttgccttcatgcttcaatttctcagccactaatcccaaaacatgatcaaaaacgatggaaaaggatcgattgttcagtatggagcacgaagctagatatagaaggaagagggtcttgatatagtagacactcacaggccatggcatcttcgatcttagtaatctcgtggaaatgcttggtatttggtagaccaagtgcgcgcattccgaatgcgtgtcgggattcctagagaaaagtaggaagcaattcaaactggtttagcagcaatcccttaaaagagagatatcaacaaaaaaaaaaagaagaagctgagcgaacctggaaatgtcgttcaaagttttttcgacccatgtacgggtatcctgagcaaatttcgcacttgtattcgacaccaagcccatgtagtttgaagagccaatacgggatcggcttcccgtcccaaccaagaggcaacttcaatgggttatacacctttccatcctcatcctcatctgatccctcggcctcacccccatccatgccatcccccactggtggtgcaaactcgggaagagattcttcctgctcgagctctctctctcttgcggtcagcgctgatcgtctttcgacatttgccttggtatctgaaagcaaagaggcgaacgtcggagagagtaaaagtgactttgtctggaacgtgagtaatgccgcaggtcgaagcttcgcatgtcggagtgccgaaagggactggacagaaggagaggcagaggtagacgcatcggtggaaggaccacttgacgtcaatcgggcggcagctttctcgtgcttctttgacttcaaatgggcatcgtacaccgtctgttttgagtaaagcttttggcctaataaattttcagaaggtcaatatgatgcacgtaatttgcagatcattttgcctggtgggggtttcagtatgaagcaacaaagaaatggaccaacatgcagggcaccagattccttcatctttcttctcgtctccatttgcctgcactacgtccttctcttcttcccagccttctactgtaccctcagtccattttgtctcaaaatccttttcagcctcttcctcgtctgctgatagatcggccaggggccgggttcgagcattgaatgcaagtagatatgagtgaagcgaggtgatatatctaggggtgttatgcaaccagtcagatatcagtaggttggacaatatcgtcatgaggccaaacaacagacctactcaagatatgcctgagagcccttctctttcagaggtacacgatcatcaggcgcacccctcgacaagatatcgaaatatgcgagatagggaattctttgagagagaagaatcatgcggattgataagtatcatcaaattaagcatcaggtctgaaaaaagaagcgaactcacttgggaacatttttcaagttgatgtattgagagtgggaggcataaagatctaggaatcgtcctagagactcttcaccagagaagagactcgagatttctgatccaccgtgaacggcgatttagtgaacacgttctaagtaaggactgctgttgtgtctcataccgatcgctaatatcagaaacaattgacttactatcatacacgacctcttcttccatttcttcctcgctaggaccgtttactaaagccgcaatctcattttctactgctcgagagtcaacctctgggttctttcggtgaaactctttgatgtctacaagtcgagaataaaactcttcgaggtcgtctgccggtggaggaggtgcggaaagagcagcgatctcggaaactctctctctatcataggaacatcgttgcacatatacaaaagaattagacagatgatcacctctgtacaacctgtataagaacgaaggaaagcaacagacttacccagttgcatctttgtaggagtccctgagaaactgtttcttggccacaatacggttcaacacatcggatgccctatgttccttctcaagacgtgatttatactgtaaggggtgtggatgatgtcaaaaagaataagaatactaggttgagccacagaagacgcgaacgtgattcggtttcggttgagagcaaccaaagcaaagcaactgactgtcttgtctgtctgttgaaagattgaggcaagagccttttcataaagatctatctcttcatgagcctgccgggctgattcgatgaccgagttcatctttcagaagtatgtggtctgtatgtgtgttgtaggcgtgggtggatgtatgaagtgaattctaatgagagtgagatccatctgaaatgtttcatttcaatagagattttcgactttttctctattcaacctttgtagtttcttagcgaattctcttaatagatcgtttcgcaccttttgctggcagaccaccaacatctctcatccttctctcttcttaccatcagtcctccaaccgtcaacaagatggttgctatcggtctgcttgctcctttgggtacgttcctaaatcaaacaactttgtttgagatcaccgcgttgaatatcactcacatcatatcctcgaaattacgttgtttcttgaacatcagcatatggtgagctggcacctcgaacctgatctcgtcttaacgcaaccagacgccggtgtacttatcctcttctaaatttcttcctacacagccgccgttctcatcacagccctaggcatattttctcgtgtatacagaaggcgaatagctggtttgtccatgtttcgttgtgtatcttgtctcgatgtttgaggtaccaagtgacccttctcatcatttgctttgtactcgaccttgctatagccaaagccgaaaccgagccttggtttccttcccatacttctagagatctctatgtctctctcttacaagctgatcccgctcctccagaagccctcctcaaatccgccctgttggtccgagcgatgaatgacgttcgtcggatccttaagattcgagacgacaaacctgctttgcagatcttgatacaaaagggctgcgttggtgatgacctctgggctcgtttcttgaaagctgagaaggaactggaggccgaaattctagatgtcgtcaacgaagccaacactttctcccccgcttggggtccaaccatctttgctacagccagcgagatggttcaaagggaaaaggcaagacctgattgggagtgtcacgaaaagatcaagtccaaagctggtaagctaatgtgtttcttatatgaccaatgcctcagagtttgcatacaaaagagagaaacaaagactgatttccataacgcgtcttgtttggtcaaaccataaagctcggctaacccctgtcgttcgatcaacgacaaagtcttccattccacttacttcagcacttgagtccgcgtcctctgcctcgtctgttacctctgctccgacgacaccggtttctgctttttccccggtcactcctacaaaagctcctctggcaagcgccccaaccactccctcaaagtcggaaactagtgctcctgcgacgccttccaaggtatgtgctttaaatgaacagcaactctttagagaagttggttgcggtaaactgatgctggtatggatggtctctccctttctgtcataaacaattggcataggatacaccttcttcggcgaaaaagggcaagaagaagaagtgatgaactatgatgatgcacgttcaacagaacgaggatacgctggataactgtcttttgtcttcttcatgtcttataccatccgctttgtcctctgttcttgagttctcgaacctccgcctgagctgcaacaaggcttcgcaaaagaccagcttctcattcgaataatttatcgccaatcactacaggacacagctgcatatataactttgggttcctgacacctctttctatatctgccctgacttttctcgttgactgtcacatcatacttagacaaaaggttactgaacgcgatgtccaaagaacgtagaatgcttgcttggccaacctgcttctgtcgcgtctccttcaacaactctactcccggtgtttttccctttgtcactcacgatcaagtcgatcgaagctgccttcagttttaaggaattcggtacaacaccgaacaagcgactcctgaacaagaaaactagttgttcatttcaagtgtatcggaagctgtccgaagtagtcgggcgaattgtcataagccttagttttagaattaattaaaccggctctacgagttgggagtggacaagtatttggaaaagagaagaaagacaaagttgaagaaagctgacgaatattgacacaaagcatggacaaacggcaccaattgattgatcaatccaaacaaggtaacgggtttctctggagcagggattagatggcaatgaagcagaattgaaaatttgtattgatccgcgctttgatactaggtgtccaaagagagcaagtgaatatgcagatgtgagcgtgtgtgaggcgggtatagatagcggggaaactctttttaacaaatttaaattcacaaaggaggggatgagaggttgaagaacaaaaatggagaacaaaagacgtcggaaaaaagccaatcatcagacaagacgggaatgtctttgagatggatattgtattgtatttgatagatatttggctcaagggatgacaggactgaattaatgatacaccaaaaacacggaagaccctacaagaccaatctcgatattgcgtgaagcagaacctgactattacatgacgacgcagcatccttgtgccgggggggctgttcgtagtgtgtgaaaagagagagcaacaagcggtttatgttgatcaacagacgaacaaaagtatccttgtcgagtttgtgggaattaatgaagtaagttgagagatatatactaaccatatggatcatctttcttgtcgacaggtccccatacggatggaaccagtggatcttttgttgtcttgcagaaccgaatgagacttttagccagaaaacaaaagaagaaaagacccaaaggaggatgagtagtcagaagctctgttcacaacgcaagatgttcaaagtcggtcgattgactgtctacgtctcaaacacatgcctagaggagagcaaagatgttgtatagaatgttgtattccatagacatcttcgcatatctcccattacccacaacataatcgttcctttaaatattgacacttactttgcagaggcctcactgacttttgcccggggtcggttgagattctctcgtaaacgttgattgtgttctgttaatcgacgaagcttcaactcggacacggctgtagaaatatgacaccaacgacgcgtgacacaatggatccataagaattacatcagtggatctatgaagtcgcgttttataagagcagaaggacataacagaaggagacagacattgtttatgggctcgagaactcatcttctatcagaatacaagggtggaatgaagaaagctttgttcttttgtttgagatatattggggcctggctgctgttgttggattgcaggtgatatggatggaccgttttatgaagagaaagattggtattcattagtccacttcaacgcgtcctaatgaataacacatcaataggaagacaaatgcccgaagaagaaaacacagacacataaggagatgaagccctatacggattataaaggagatcgaagattggcttataataactcacgttatctccaacgagtgagcaattgatcacaaccgcaacaagcagacaagtattggttttgatctgatggatacaaattatgacgaggaagacataagcgcatatgttcacgtagaaataatacttaagtaggtggacgagtctcacaaatatcggaagacgtccagattgatggatggtgaatgttctattgtctgagagttgaggctaataaaaaggcggcatagagggaggcgggaagggtccgcacgtgacttacggctcaacgccgctcaaagtcactacgacatcgtcaaagataaccgctttgcgcaggtgcaacattgctgagagactaaacgaaagttgctcacctagccagagctcaaagataaaggatgacgaacaataaacgagagaatttggcatggagcaacatcatatacgacttgtacgtctctagcatgcgctcgtacatactagatgatgctttgttcttggagccaacatgagtgaactcggaaacatcagtacttagtaatctacctcgcaccttctcttcaacttgaccttgctcaaagctgaggcaatgatgttaaacaagtatatgtatattgggctgcatagaatggaatatatttatttgtaatggcctctttctcttcttttgcagctttcggattgctcttcatgatcatcaaccttcttatctagactctcccgtacattgatataacgagtcctgatgaggtaggtgaaaactttttaaaacagagtttatccgagtattctgagggcttctctcgcctgtcgagatgtcgaaatagctttcagcaaggtgtttctaggggttcttcgaaagaaatgatggcttggcgagaccgaaagggctgtgctatacttgtaaagggtcggggttcacaagcttacgaagggttactggagttgactagggatgttcaaggcgcggagatttagacttccaggcaaggggaaagaggatgaaccacgattgtatagcacagtggtcaacagggatcctaacttggagaaccatatctgaaggagcgcgcaagcgatcctttcatgcgttcgagctacgatgaagtggcaaccaagttgccactcgattactaaacgacaggattatcaaccagaagatcatcaagaacaacaacaacgagccaaatttatcaagcaacagatcactgagcgtatcactagtcaggagaaacagagatgagaataattatccagcgcataggatgaagaaaaggagcataacgaaatggaaggcatgatgaatcatggaatgtgagcatggtaactggcgtgtatatgttacctaatcctagtttctgacaatacttgcagtttggcgatcccacgtattatctgttgcacagccgacttcagtcattccattatccagattacaggcttacttatatattcttaatccgctagccttgatcttcatctgctgtattcgtccgacgctgactcatgtttgtgagtatgttcgtttgactgtattggtttggcttttctgatgactagttcatgtgttgtcggacttgtttgagcaggtcaaccatgctcgattacctgtaatatcggtcttctgctcattgaatctccgacgacatacaccccataagtggatatttcgaaagtatgcatcgcgtcctatacctccgatggatgccagactgaagcccggagacaaaggtatgaagtcaatgagaaatggcagctatctctacaacttttttttcctgaataatctttttgggttaacctaaaagtatatatcaattgttttggctggtgccgtaagtggttatggccatgtctggtggtgtggattcatcagtttctctccaacttctatctgagcaggtacggttctgccggtcttttcttcatctgttgcgtaagaaatgttaatcaagtatgtttttgttatacttacaggatctttctctttcggcagtcttcatgcgcaactggtcacaggaatcttcagatcgacttcgaggttgtgaatgggaaaaagactgggaggatgtccaaagagtatgtagacatgttggtgtttccgttcgtatggtaagtacaacttaacactacaagataggcggacgcgttggcttagctccctgtgcgctgacctggctgtctggcttcctccaggtcgatctttcaaaagaatattggacccaggtttttgagcctgccatttccgaatgggcaggcggattaacacccaatcctgatatatcgtgcaataggttggtcaagaaacgtttcaaagattaaatcgcctcaagtcgatattgatccattaaaacgaacttcgaacttctttacttatcagggaaattaagtttggggcattgatgagccgagcgctagttgatccaacagcgtacctggctacaggttcgtcacactacatcttgcttttgaatccaatatccaaatccttctctatatcaacttacacactattgatcttatatatgcaatgatattaggacactacgcgcaggtagacaaaactgcagatggacgtcaccgactgctgagatctgttgactcaaataaggatcaaacttatttcctttcttcccttcacgaacaacaagtggcaagagtacgcaacattcttccctttcgggtctcctcccctcatttggttaccctgagtgctgattgcgaagaaaagcgtgggacataattgtaacagtcaatatttccgattggtcatcttacaaagacaaaggtcaaggagctagctcggcagtttgatctgcctacagcgggcaaaaaggagagcatgggtatctgtttcgtggaaaaccacaatcaaaatcgaaattccttctctcaatttttatgtaagtatcaaaagaaactactctcatcatggacctgcttcttccgttctttttttattcatcagactgacaaaaacattcactatcttttctcacaagccgaatacatcgatccgaatcctggtccgatcttgaccgagtcaggtgtacaagttggcactcatccaggtttatggagatattctattgggcaacggtacagatttgagggctgcaagcaggacgaacgttggtatgtagcaagtaagaatgtgtctgacaactcgctacgagtcgttcttggacagtatgtatcttctccttcatttgatctgagacgagagcttctcactaatcgcagtatctgtcaatatttgttgactcttcttacaacatcgactcattttcaaaaaaaaatccgccgttcgtcagagaacatcccgctctgatgtctaatacgtttcagactcatcgatggagctggatttggcaggatcatcccccaccctcaattgactctcctgaaggtttgatctgtcagattaaaataagatcatcaaatcgaaaatcggcttttccagcgtccatccgtcgttcgtgagtaaagtctatgttctcaatatatgactgtttgctcttgaccgtggaaactgagacgcatgtaccttacttgtcgtcattcatccgttgataatcttgactggatcgttcaaatcatactgtacgataaaattgagatgatcagactgaatgatccgggcgtctgcgatgtgacatttcttaatgagcactctgattgcctgacgcctggtcaagtttgcgttgcctggattgatgactggtgtttaggaggtggtatcgtcctagaaaaacagtgggaatggaattctacatcatagctataatgacatctataacatgcgcggcatatatccaggcgatctctttggtcttctcacagtctgacacaaagaagaatgactgctagatgttctttggtccggttcgccctgaaacaattgatcctttgtgactgacaggttgagtggctcgttttgtgccaggaaccattcctgtcaactcaacccgtactctgacaagtttgtctgctctttgcttctctgttacccatctgccctctatttctgttaattcagacctcaaccatgagcaacagttcgtcctaatatccttcagaccgtctggtcacaccttaacttgttagtgcccacgcctgatcaggacgcttttcttaatgtgatttgtttcaggtttcaagtcctatgtcgggagaacatcatctgtcggcacgtcttcaaagccaacccgaaaaacaccaagtcggaagaccgctgagaaagattcattcaagtctctgatctttgaagaggacattgagacagagagtgtcgatcaccggaaaaaaaatacattcgaaaagagaaagagaaagaggagagaggacgctgtcgtcgaagagccagactcttttgacgagagtgataaacagatggagactgacgaagaacagggacacacaggggaaatttcagagggagtcgccggcaggtaagctgtatcattatgaagtctctatatgcgaaatcatcgttgaatgagaagcccgggctcatcttggtaattctgatgagcactctatgatcgtgaaaactgacactttgttccttccgtttatcgatccctggtcgctagccagattgatcttgtcagattgtctgaagaattccgtgctcgtcgagccaacaagtccgcggtgcttcgtgatagttatactactgttcgctcatccttacgtctcatagctggtgatgcattgtgtccgaatcattcactgatcgaatttggaaaatatggcatctgtagaaggtcgtcgcgcctatcataaatgctcgccagtccgttttgagtcaatgggagaagatggatgcccagatgtgagtacttttcttgaaaatgtcttctcaattcagcctctagttatttgccagcctaagcattctctcgttttcatgactagggctgaaaggatggattgcctaagaatgaccttggccccgacgcaactagacgtgtctatctactcgagtctcggagctcagcgggaagtaagtcgtttcaagggcaagtgaggcgaataatgaaacgtcgaaacaggtcattgactaggatttcatttcttgtctcggctgatttatccgcgtctgtttcaaatcacagcttgcgtctcaaactttatgctcagcttacgagagatgcactcgtcagctagttcccgaagttttaggattagccgacgatgacctaaacagctgtaagcctacaatttcccctgtcctgatatgatgagacactcaagaagctcatgtgtatctgtgtctactcgatactcaaataaataattcgtcggccctcttcgaacaatcgagtaaacaaacgagtcgcatacgtacgaaaagaaaaaaaaaagcattttgcttcgacgaaaaagaagatgaatgctatacaggcagaacaaaaggtgcgcttagccatatatacaccgacgcatgaatctacgatttctcacgcaatcatatatcgtttcggccctgcttccttcctcctctaggccatcacagattctcatgatctacttcgaaacttcagcgagatttttcaaaagtttcgtccatcgactgactcggattttagtaataagggcaaacttgagaaaggagcggggttcgtcagttcggctcacgagagaataatcaagccaatgaatacggcaggcgccataagctgtgtgtcccgacctacgttacatcaaatcctctgatcctagtgatatatcttagccgctctttgtgttcttgtacattcatctttctgcctttccgtcattttgtaattgctaagcgacatcgctcctcctgtgtcatataatgttatgtgggatgtatagaatgtcatcactacgatagttccaacgacattgggttcatttttttcagaagaatgactccccatctccaatgccaccatcgtcctcgaaggtttctccccaaacctcttcttcctctgagctttgaccccatccagtctcctgcccgaacatgccctggtcgccattcgaggagttttctttttcccaccaagggaggtcgtctgcttgtccccttgtggatgttggaagatcaggttgactaggtgttgatgttggagcagggtaatcagatggctgacgagcacttgccatgtcatcggctactccggcagcgccggccatcgtacccattccaggagacaggttagcttcgtcatcgagtacaggtcgttggtcaggttgaccggattgattctctaggtcggcaccatgaccacctccacccatgaagaggaaggggaaccccattcccccttgaccagagctgaaagtaaagaggagtgtaccagagatcgtttgtcttagtggacacacgcgagagtatgaagtgagagcgattgtttcggacatactgccttgagaaatagtcaaaatcaactttaaatgtttttttatttatttaaatcgggtattcagggagagaattgatgtcagattcaagctgtgataaagagaagatgtgagaaatgtcgagactgactagagattgcagtagccaacatgatcgctcgttcatctagtgtcaaccccttgtcactttccgcctttggaggtaacacccttaattcaccctctttctgcccatcgggtacaccttcttggactgcatcgaaacggatgacatatcgaccggtgtctgtgaagatctctcttccgaacccgccaaattcacgcccgattgatcctcggacagaagaccgatcggagacaaggaatgaccatgcccagagcccctcgtcgatctcggcaaattgatcaaattcttgagaaccagaacggaatctggaaaggaatagattgtatttccttcgccaaagatgccaagccctatgtttgttaattccatcgagaatttcaagtaaacaaacatgatcgtgatcatcaggataggggaggttaacctagagaaactctgataaatcgtctatttgtacgaccacactgatgagggacaaagaaacgtactgttgagcttcacctacgagtggagaatcaggaccttcatgagaatgaacgtatatttttgaattgatgaactgaaagggtcttcgaacctacagagaaagggattctatcagatttttatgagacacaatacgcggtctgaaacccggacgtacccagaggataggatttccctctacgtccatgataacggatcggaaagggcgatgggttctaaagagttgtcgggtgatggtacccatgaagcctgagtcttcctctgcgatactatagatcacaacatgaatcgagaaagcgcaggatttacaccgtcagctgaaattctgataagtgaccgtacaaagaaaagattccagggaaacacacaatccgacgggaagtccctctgggttagtgatttgatatcgattggcttgctcgaaccctgcaaacagattcagcatttcgatttgtctataagttcaagtcccaaagcagcatcatgagttcaactcaaccacagcatacccacaaatctgaccagggtgtttttgcttaccgagtgacgacaagagcaggctgttccaaaagtaaacttgctccgtgtgtcctcttcaacacaccctccgcatcctctggtacttccaccgtgacgttccacgctccaggcagctgtgtgtattctggctgagcactatgaccatgttggtgttcctcattgaattgtgcattggtgtcgtaagagggcgacccagagggacggtattccggtcgacgattgatattgattgcgttgcgaggaccttgtgtagagggagatcgacgagggagcgcaggggtcatgctcaacgggcgtagcagacttgtgctagccaagccaaatggagcgattcgatgagcattcaatagagtaacagtgttagggataagacgtgtgatcatggatattgtgtgtatatgtgaatctgtggatgtgtgtgttggccgggtgagaggtaacgtggttgtagtgactttgatcagagattgtaagtgatgttcagatttatgtctcagtctcagccgggtttgagccgatgacgaggcggttactaccatctcggccctctcggagggagagttttccagaacgccacgacaaatataatattaccctcctcgatattttctcatcaagctgttatccgtgatagcttatgatctgcgaggagaagcgatccgcgaagggatgagatcgtcaaggaggatcattgcacttcctgcatttcaacaatcaaagataatctgaacacaaaagggggtagtttagttgaactaaaccggacgacataagcattgcggaacgcccaagtttatggcttgaaagatatatacatcaaaatcattgaaaagacaacgagtcttcctttcgaaagggcgagaggacagtaggaaaaaaagcatatccgatgtagatgagacattgacaagagtgagagatacgatggcaaggccatagaaaattgtaaagaaagatagaaaaaggagaagtggtatcgtatagagggtttggagagaacaaagcgttgcaaagcaggattaacgaatgcaggaagggcccaaggagagcagagaaagcgaaactgatacagctgtaagggataaaacgggaagaatgataacatggataatttaaatataaaacttgaaactaaaggcaatactgggcccagaagatgaaaagtgatatatcgacgaagaaaattaagagtcaagacaagagaacaaaaaagtagatggacagaagaatctatagaagaaagatctaacacgtaaaaccaagtcagatcggagaaaagcgatgatgccgagaagggcgcagcgttctctaaaacatccatggttgatccatttcgtacggtcccgtgccaacagccatggtcccctcatacgaattctgcgttggcgtcgtctctcccgatctgagttccctggtcctggcaggcctggatccagccggcacctcgatagacccatcgtgatgggaaccgaacgattggtaagttgattgttgtcccacttgcggaatctcttccgagggaggcggcggtccgtaaaaaaactcagaggacggcctggatggccgatgaccagtagatgaccccagttgaagcgacgttggtcttcctttcttccggctctctagattgagagagcctcgaccaaatggagattccgctccatgagatgctgggcggtggtcgggataggtattgggatttggtgtcacactcggactgagggcctgatcatttggagagtaatgcagcgggcggggaccggctggccgggtgtgattgtagggtgggactgaagaacttatcatctcacccgcaggtctctgcgcaacgaatagttcttgttcatttatgtgccagttcttctcattttttccatcgaacgcggcatcagaaggaccggatgtcgaggatggtatcactgaagacgagatcgcaggtcggtctactttgttgaatgggggaacgagaggaacggaggcgaagagttgccttgactggttaagagctgacgataggctctgcctctccctctctgcatcatggtcttcagcttctccggtagaatgcgattcagatagatcttccaccattggcggttcgttctttgtcagattttctacttcgaccggcgacctcgcgatgattgaatttatgaacgtctttgtcctaggtgtctcagtttccccatgtgggcccatcaggaacgacggtctagaggctgatgtcggacccgaacctgagccttgtgctgagagcgtcccaggattacgtccatagttgactctcgggttcagtcctcgagaaaacccaagactgttattgccatctctttcgctctcagccatgcccacgcctggtaggctcttccaacctgtcaagctcttttttccttttccgtctccaacttcgagaagagaggacgaaaaaccgggtgtgatgggcgatggatcggacgtcggaagaaattgttggttcgcgccagaccgattcgatggaccagtttggtgcctgagattctctaatcgactgtcgatgggggtgtgggcatctacgagggagtgatggtcagatgagttcggatatgtcgatgaaggataccaggtctgtatggatcggtaagccggttgatgtggttggcagtacctaggattcgactgatcaaaatcgtgataatttgccgactgaggtcggtgtgaatgatctcgattcggataatggggatgaataggtggattgtcatgtgccgtagggagttgaggcatggcgtaagcatcgtagggcatatacgcatagagttgatggggaggtggtggtggcggtggtggttgtgaagaaggtgaggtgagatgatgggaaggatgagagtcatgagtatttgggtattgctgctggggttgatgctgggattgggatggttcgagactttgaggctcaaacccaatagcgataccgtgatctcttcctggtctatctcgtcccaagtcgttttgagagttgtacgaacgacgaacatctgacaacgcataaggttgagggtgctcgggctgatgggcaaacgaagcataatgatggtgagatgaatcgctcggacgaataggcgaggacgggcaatcacgggacgatctcggtcgttttctgaaggatacgagcgcaacagaatagacggcgtcaggaacaaagagggtcagggcaggtcggatcaaaatgttgagcgaattgaccaggtacgcggcatcaagcacaagtaactcacgtcgagtattcatcatccggggaatcgtaaccttccatcacctgaagatatctctctatgtcctttttctcttcaacagctcttcccttgtcgatctttagtttcttcgaagagttctcaagcaaactagccgcctttttgctggccttgctcccttgatgaagcctgctaggtttcttcttcgcgccggccggttgatagatgtaatcagggtatctattttcattgggtgagaaatgaaagcagagatgggtggcgcatacagtcagatcgccgtagggaaagatttgttgaaaggtaaaggaaagaaactgacaatcgattatgctcgtctttctctttttgggcagccaatcgatagggtgcctgctgagtgtccgagagctatgtagagaaacatttggggattgagtctcgtttagaaatgatagtctgaaagatgcaaaacttactcctttccacatcagtccgacaatcttactgatgttctgatgcttggtttcttccttgatcaaccctctattgacgacgtccattcgatacaacatgaaactgtttctcggtctgggcacgtggccttctggggtgggcttcgtgtgggaatttgtctttttcggagcagatacccctggttgagggaccggtttgaacactccgttctccaacgacggactctcagtgaccgacgcgttcgacagttcgagggtcaagccagacagcgaacttgacgcgctggccactgagttggacgaggcagtggtggaagaagaggaagatgaccagggtctggacgggaagccggatgagactgaccaagcgctagattgcgaattgacctggttttgcagatgatcactcgaaggacgcgtcatcgtcatctttgccgctgctgctgatggtttccaatctgatgatgaaggccatgatgtgctggtcgactgttgctgttgctgttgctgtcgcggcggcggcaacggcggcaacggctgctgatggtgataatgatggggatgatggtgcagatcggaacttggagtgatggctggagcgacgggaaaggtggacactgtctcgggcaatccaggagatgatgggaaggaggctgttgaggtgatataaggagaaggctgtgaggggagtagaatgctgggtggttcgtagaacaatgcggaagagctttgttctggattgggatgagggtagtgttgaccgcggtcagagagtctcggaaagctctctgctcgtattggaggcgctgttggactaggttttggatccgacatcgagcaagggcaagcgtagtgggctgcagcgaggtatagaggagcagggcaggatggggcaggaagagaagaatttcaaaaaggtatacaggggttctgctcgccaaacaacctgaagaggttgtatgtagggtcgaaacggaaaaattcaagtcgagattaggacgagaggcggaagcgcaatgcggaatatacaaactaggatcacaggtaagaatccctacaacgggtatcagccagatgcgattgaagaggagaaggcaacaaccaaaagaagtggatggtcaaggaggaagaggagaaggttgcacagtaggaaatggagcaaaagcgaggagaagaagaaggaagcgtgtgtatgtttgtgtgtgtgtgtgtgtgtgtgnnnnnnnnnntgcgtgtgcgtgtgcgaaggatagagagaaagcgaaagagtgaaagagaagccgaaggacagcccacttggctgagaggggtgacgaaagaagaggaagagagccagggaagacagggaagcttgtaaagaaaggaagagcgaggctaagaaaggaaacaggtggaagaaaagaagttgaggtgaagaaggaagggttgtgggtgtgtatgcgtgcgtgtgtacttttttcaagattctagaggtggatccagatttccaagctcgatcatcaaagggacacggccaaccggtttgagacggcactagagaagaggcgacaggctggcggttgatgaacgacgaaattggaaaaaaagaaatatgaaggttcgaaccgaaagggaagaagccacaggcaagagagagagagggaattaaaagaaagaaagggaagaggaaacgatggcagataaaagatgtagaggaacgggcttgtcaatcgatcggatgatggcacaaagcgggactgtatcgatcagaagaggatgaaaacggcaaaagatgtgtgtgtgtgtgctttttggtttggtttggttgtagacagggggacgcggaaagggggacaggatctgtttgaagtgttcccagcgtttcatcagtttgtcttgacgattcaatggctactgaggaagagaaggacaaaaaatagagatcgagagaatagatcagacaaaagaaagagagaaaaacattcccatctgccgttcgagtttcattctatcttgcctctaggatcagagagtaagagaagagaaggttagtgggatgcgttccgggaaaggattggtcagagaaaagggcaggcaagacaacagagagaaagagagagagaaaaagggcacggtaacagacgaacaaaaggaacaaagagaaagaaaataaaagataggccaaaggcaagaggcattacaaacgaggcgcatgaaggcagaggtagatggtcagataacccgaaggtcagtcacaaggatgttccaaacgtcagtcgttgtatgttcctttcagcccgttccttgccatgttgtgggagcgaaaagacagtgaggaccggcaggcaagtcgggtcaggcctctttctctcgatcgtctcggcgctcgtcaatgtttgaagaaataaggttcgtgaaagggaaccgcattccctccgatgactgccacgtgagaacccgcgaagcgcagcttgacgaggcgtcaacacgcggagaaacttgccgaatatgaagtggcgttttttactctagggcaccagatcgaaccgcagcaagctgaattgtcctttcctctttatatcccctcttgttcctggccaggcgccatcgttatccactgatcattatcgatcattcccaccaaccggcccagctgagcaacgcatattcccatgaatttttcttccactgagactttgcatcagcatttgtgacttgtacccatcatatacattcaatctcgagagttgttctctgtcgcctcatctcctaaggatctcaagtcgtgctgggctgtttcttcttccttctctgcctttttctcaattttttttccttttgtttcactctcttgccttctccgacatttgcatcaaattcgagttgaaaatcatctcgaaaaactcgtcatcctcccattccgctgttctctttttattactctttctcttctcgtttgtttcttctgctaattataggtcgccattattacacaaactcactgtaatgtgcttcatgatcgtttttcatcgcttttttgttctactcaattcgagcgccaaacaatgagaccctatgagtgctgttctccggatgacaatactgtttaaaacttttcggcacaatttccagttttcacacaacatccacagacaaggcaagtcttctcacacctttgtcaatgttcacagctctcaaacattcctcggctaaagcgaggttcacggacattcagaagatggtggaatgtgactgtctttgtctagagtcgtcatcggaggccgattcgaccagcaaacacaagttctggctattttgaccattgttcatgttctctcgtcatgaccgctacttgttgtagaaaacgatggaggaataaacagaacgtgtcggcggattaatgatataccagtcgtgcgcacagcctcacatgctggtatcacgtgaaacatctcacgtgatcattttttgaaccatcatctaactgtgtcttccctcgtccgttcctctgcttcgatcaaagcccgaacactttcgctctctcgtgctatggcccccgaacaaccagtgctcaataaacgggcaagattggctgcaaacagacagattcgaccggctcaacgtacaagtttgagaaagtcgatcggcccggcattaggcaaagcaaatgaatcagcgttgaagagtgagtgtgtctagatgacttcagtccgtgattcttcaaacagatatcattcctgacacaaccctctacggcgaatacactttggctacctctgacttaaatcagatggacccgaattaccagcaaacgttgccgttgaacggtttaccttggtatgcttgatcttcacggaacctctaggccaccttgacagagatatctggttaaacaaagcctttaccgacgttttttctcccttcctcgctctctcgcacacaaaatcgtaatggatataggcacgggcagccgagatcacctcaatgaaagactctatgaggaacacattgtatgttgcttcagttgtgtagctcgatgctcttgctcgctttcttcaagctcactaaaggctcaatgaccttccactctcgttcattccttctcttctagtctctcggccacgaagagagctttccagacattacctcgtcatcttcggcgaagagcagcttcgcataatgctcgacgagtaccaggccgtttgagagcgaaagcggctgctgaggtgtgtttcgcgttctccttatgaaaacacttgtatcctggctcgctcacagagagtttggccctgacgattcctcatgtccacgtgttgaagattgatccaaagacaaggacgattccaaaacattatcctcggaaaaagattgctaaaaagatcggactgacgaaaacggaacggttcaggcgccgacaacgtaggttgcaacttcgcgctattgtcatattcatgtgtttgttagctgattctcactctgtattggtctctcttccttcgttccttgcgtttttccttggctaggttcgaaaatatggcttgagacacatatctggcatgcaaagcgaatgcacatgatcaacgtctggggcttccgtctagcccatcatccgaccgaaaagtccttcaggccgtcccatcgagcggcctcccatgggtcgatcttgaatgacgtgtcttacttttcgttagtcgaactcaaagcaacagagcatgttcttgaaagaattttaaagactgttgccggtgagatctgctggggtaaacggtcagtcgatcattcatggtctgtgcgaggtatcgaatgaaggaaatcttgatgttcaatcttgtcgccaacagatactcctctggttcgcgacaagcacaaacgactctctaccggccggctagctatcctttgaatttgctctgtccagctaccgttctctggcagcctctttctccgacgacaacacaaccctcctccgccgaacccgaagccggcccgtctagtcagatcatccgacactcaaagcaaactgaggagcccatcagaaaagtctggatcagattccatgcatgctcccatgctgaagtttggggtgccctccgaggcgcaatcacccacgtattggatgagattactctagatcaacctggtctggatgagaaagaaaaacgaaaatcggcgtcctcagcaacggccggagaaggttcggtcgtgacggccaaggagacaacggtcgagcttaatgacataagagacagcgtgaatgtgtttgagattattggacccaaatcaggaaaagttctgaaaggtgctctgggagcgcttaccaaaagcgaagacagaaacgagatgcgacaggtgagcttcttttcttcattgaattgtttatacaaaccgtccacccggtatatctgatacaagaggagatctccggaaaacttgcgattcaatcaaatcaacatacataaaaagatctggaagcgcttgcctgatctcaggacagcgggaaatatgccttctgggatggtcatgggattcaccgtttacgatcctcgattgaggtgagcgagcttttccctagatgatcaagagatagagcagattcttgtatgcgttcgtgtatgtatccggacttatcatcactttggacgttcgcagctttcccccaaaaaacgtcaaacatgtagatccttcgaacaccgatccattggcaccagctttcccattccaacctagttcagagctagctcgttctgatctttgggatagtaaagtgagagcgagacttgggagaaagaaaactaaaaaggttgaactcgataaacgacgagcgaaggtgagatccttcttgattcctaacacacattgctctctttactcatttagattgaaccgcacgtctttcttgttttttttcttcttcttatccttcgctactcttccttccacgatgatctgtagctcgggatccctggtcaacctctccgagcgatagctcaggatgctcgaattcctgttcttctcatccaacatagcattcccacaccaaatccggcaaactcgatggtatcaaaaagctccatgcatggatacatactctaccttccgaaggcatgggcccaaccattccttcattccttggttttcaccgggactcggatcggtgggatcagagaacgacaatcgcaagcgtatgaaactggatctggaagtttcccttccgactggccgggcactgatgcttctgcgagatggtgggcagagagggagaaagaagacactcacagatgggagaagaagccgagcgcaaagagaaccaattggaatcggctcggctggaaagagggtgggaacccttggaagccagattggagttcactcttttcttcaatcgacccgacagcgatgatgacgagggatatagtgttgaatgatgggtcaaatggaagaaatagccaggaaaccattgccgccgatacaacaaatcaaccaaagcacccttggcttcttcgaacaccctctccaaccgaaattctttatcggatttcaaacccgacagcgtcatccgtaaccccacctctcgctctcctcgccgaacttaatgcacatcggtccaagcgcggtctccttccattaaaggacagtcaggcaaatgaactctactcatctgctttgatcagagtctcagtcgccatgctgggtagaggagttgctcaggatgttggaccaatctacaagctggcgaccgatccagtcgccatagaggaagaagcagggtggagggatgggtttgcccgtgggaagagaggaagagatttggactgggacgaacaggtcagtcttctttctttctctattctgtcttgatgatgcacagttgtacgttattgacaaggtgatgtttggaatggtctgccaacagtcccagatacctattcctccattctcggatacaatcggctatcaaaccaccggagcgttttcgctctctcgtggtaaaggacatggtctaggcgcgattcccttatcggccgctgtggaccttgtaagacgtgatgtcgagcgaactcgaattcagttagtagtaggcagacgaccgacacggaaaagtggagagttgatcaatctggtcaaagtcagagcgagagacagcaatgttgtaaggccggctgtgttggattggctcgattaatggaaatgaatcatgagttcatttctttctataagagatcactatttggaaataaaccagtattgattcgaagattcaatttaagaatgaacccgtggtaagttttgggggtgtacaacttggtggatatagtaagagtggatatatatatgtactaagatgaaagatcaaaaaaggaggatatgtctgcaaatctaaactgtatcagcacctttcaaacactttgtagagatctggtaggttagccacttgagtgatatggcccccttttagcaatgactttgaaggacggagatgtcgtcggagcgcgggaaagatgacgtgttcgatttggaacgattctttaatgaagtatatgccaggcaaaatttagtccatattctttaaagcggcgactataggaagaaggcccgattgaaagaagatacataatgagagaacatacccagctctcgctctttgtctcttgtagcatccgtctcgtcggatggtaaaagaggaagggggatgtaaaagtaagctagttcccggagaaacgactcaaaacatgcttcttcatctgaccaatcaacctgaaaaatactcccgaaggaacgcgctcagtccaagtctccaaatcctaactacgcgagacaaagattagcaaaacaaaagatttcaacactcactccaggtccaagtcgcatcaaaaattctggtaatcgattcaagtcaggtgtataaccctctaggagcagaggaatcgactcaatcctaccgtcctccgtgatcgttaaagaaaagtattcgtccagcatctctcgacgttcgatcaatcgctgttcaatcatctgtttacagaatctcatgtgtcagtgacaacgaggaagagggctctctcgatgtttgaaattgaacacgtcaaacgaacctgaatggtagcctcccttcgctcctcgggcacatcttcctctagaacgatcgctaacttcaacagaggtttgatctccgcaggtggatccaggcgaatctttccgatctccccaaactgacagagacccagctggtagaacagctcatctcttcatggtattacatagcagaaagagtatgatgggaaacttgatgcatgttcagccctagcgcaaagtatgtttcgacaggaatgacaacttacgcgatagcagcgtgattgaccaagtatagtttggtattgtgttgtatcaaagattgagttcgttcacaactcacgattcctacgaatttatgatccttgatgatttccgaaaccactatgtatgtccgatggtagatgtcaaaggaatcggacaaaattgactgttcagcatgaaagttggaaagaccgaataacaaaaaacttacaattatgccttttctctttgaccagatttctaagcctcactatactcgtcaacctacactcgctcgttctcactaggcctcctccactgatccctcgttctctgtttgatttctgttttgtttcatctatcgtgcgcgtattgacctcctcattgacccactctacttcatcttcactcatatctgcgtcatcctcaatgttagccttcgatttgttctcatcctcatccccttcctcactctcaacgcgttcatctattctacgccgcttaatcggagcagactcgggaggtacgatggtagatatctttgagttgagaggagcaaacatcgagtcgagcgtccggacggtcggatctacccggactttatgcgcaggattagactgttgagtggatgctatgcgaatcataagtaagacgacattgggaatgaattagactggatcgagtttcacacacacaaaaaaggagttgaagattgagggacaactaacatcttgaaactattcgagtagaacttggtttactccctccataagtaccactgttagtaccgaaagtaggaagatttttgacctctcttggttcttcctcttcaaactctgggtcggaatcgtggtgtggatcagaaccctgttgcacggtgttctgaggcttcggggtatcaagagagatattgttagctatcatggacaattattggtggatttcaattagaaccgggctaacctgagtactgtatgttctcgatgaatttgctccgatcaagacctcctggactgtttcgcagacagcttcgattatctcctcctcgttaagaaaatgcacctgaaacaaagcaggatatgtaaacaggtaaggccctggagcaagaacaaggatgctgaaggacacattgtagaatgcctcacgaacctcactcttcgtcggatggacattaacatcgacattctcaggcttaatcagcagactacgtaggccgtgttagatactctacttatacatttaaaccattcgttgagaatgatctgatggagcgcatcaattgatactcgtctaagacttactctatatagacccaaggatacgttcctttgggaagaataaccgaatataacgcttccacggctttcttcagtcttggacagtctaccaagcgatctacccagcccgattccaagattttacacgctgtaagtgagcatatattcaagattgcggatatttcgaaatcacctacgatttatgaacaccaaaaaccctccactgcgtttggtattccaattggcgcctgtcagccaaccctcaaattcaaactcaaattgggtgttctttgttttcggaagatgaaggagctccttggccagagttgggccatgaactatcctgatggtttgtgcagaagtggagaggcatggagtagaaagtacgggggcagcctggccagcctacacagtatacagaggtatgtattgggaagatcagcaacttgagagcttcatacaaacaaaatgacaggccgacggaactctcttgaagacaaagacctgagctgacctttttgcacataaatgagacggaagggttgtgtatcgaatatttggttaccacgtccaaaatcctgctaaactcgtccgaggttgatttcagcgcctttcgtcgagttggcacattaaaaaacagatcttcaacctatagacgtttggaaagtacagagagaacgcgccgaatgtgtcagaagagaccaaactactgagactacaaagataaagaacaattctgaaacacacgattatagtagttccctgatttccggccgctgattttggctctgggctctctcccgggcgaagaggtatgagtacaccatccgaatagtttgctctgtatgatagaggccggcaacaccgttcacatagtcagaaacatgtgtcattgacatctattcgaggagaaagcatcgcggagacgagcactcacttccacgcgcaattgccttctttcgtctttgtgaggacagaaacatgagcaacgtgagaaatagatgctagagcttcgcctcggaatccataggttgcaatcgtttcgaggtcggagaacgttcggagcttggacgtagtgaaccgttgacagaggatgggaagatcggcgtgctgtcaggtaagagggcacgatgctcgatatcagtccacatgcggtccttcctggaaagaacagatagagggattgcatatacccggataccacacccatcatcttggatctgtagaagtttaagtcctccatctttaacagagactcttatggattttgctccagcatcaagacagttctcgatgagctctttgagtgcatttgccggccgttggatgatctataggaatcacatttacccagacgcgttagaaacatggcttcatcggcagctgctgccctatatcgtatacatggctttacctctccagctgctatccggttgatcacgatctcatccaacgcgacgataggctttggttcgaacggtgtatcctgttctgattccatcggtgtttgatctctcggtgttgttgctatgaatatctggctgacgggccacaaaggtgacgaaccggccttctcttcttgggcgaacgtgatctgttttaaccatctggcccaatccggaccgacttgcttctcatcatatccttcatccttctcttattctagaccgtcttttcgttcttcttgttctccttctccctcttgaatcctctccttcgttttctttaatacccgcccggatcgttcggttggtttggcgacccggtctacttactatgctttccttttctctactggcacttctctcggtcttggcaaactcgtccgcaacgttcgctcaaaatagctcaacagctacctacaaccctcctcccgtttcttcgggagtcagcaactcttctctaacctcggttcaacaatggtctaaccttctcggcaacgctctttacttctacgatgcccagaggagtgggcaactcccagacgggttcagagttagctggaggaattcctctgccttgaatgatggacaggacatcggggtggatttatcaggagggtgggttccttcgctctcggtttgattcagcctattaaaaagaggcgtatcgaatactaacagtccgctctccgggcacttgctcggatcataactaacaggttctatgacgctggagactatctgaagtgcactttccccttgactttcgtgctttcgtccataggtctgtacccaagttttctcgtatatttcggaaaaaaggtaaacaaaacgctgaacctcattcttttcttgtatagcatggggaggaatcgactatggacaagcatacgacacctccggacagacatcatatcttgacggcacgcgtatgtcctacctcatctctctaaagcgtgaaactgagcatctgacatttctttctgcgcattcacatttggccaacgttgcagtccagtggggtttggactggttgatcaaggctcacccggaatcaaacactctgatcgtacaagtaggaagtggtacggttgacaataagtacgtgaacaagatgtgaatcccaagtatacatcctatctgaccattctcgttcgcatgttcttatagctactggggagatgatttagatatcccgtctcctagaccatcctatcaaattaacggctcggcgtaggttccatctatcgggacgtgcgctcactttgacatcttatctataagcttatactctcgtcttatactgctagtcctggaacagatgccgctgcttctgccgctgctgcctttgcgtccaactccttcctctacgccggtcaatccctcaactatcaaaacgtatcctcgaccatcgccaacagttcttacgcgtcgaccttactacagcatgctaaggacttgtacacgtttgcgacaacaagtacgttacaagtctaccagacggacgtaccggcagtggcagacgtgtatggcagcagtggatacggcgatgatctagtttgggctggactctgggtaagtttctaaacatcaagcaggaatgatgtcctttaaaggagttacactcaagcccgtttatgttccctcgctcatatgtatatgttcacagctttctctagcagccaacgactcgacttatttcacttcggctgcttccaactatgctcaatatggcctctccggtaaatcggccgttctgaactgggatagcaaggtcccagctttgccgatcttgtttactcaaatagcgatctccaaaccttggttgatggaaggggctccgtcgaatgtctcgagtgtttcttattggcagagcgagtcagagaaaattctcgaccaagtcgtaaacgaaaagttggggaaaatgacgaagggaggcctcgtctgggtacgtccgtctgtctgtgttattgagatagtgatagctttagacgccttactgatgttcttcaaaaccaactatgctggtgacgtgttaatagttcgaaggagactcagattctgcctctttgaaccctgcattgaacattgctatgcttctaaggcggtatggtcctatcgcctccacgacagctaagcaacagcagtatttggtacgacgctggtcattatgatccatgaattcgcttgagttcctctgttggctgacttgacatggactccttcttttcctatttagagctatgctcaagaccaagttgattactttttgggcaacaatcctatgagcggtacgttctatctttttgtaatccgtgttgaatttcctcgtgcttgaaggatacacgtctaaaagcatgtgcctatagttccctacgtggtcggttcaaaccctaattcgccaacaaacccacacagtgctatggcatctggaggacagaatattcaggcgatcgatacggaacctgttgtatcggcacacgtactttacggagctgtcgttggtggtcgtacgtaactccttttgttttcctatggcctccttggattctcgatatatctgtactgataatcatggcttttctcttatctctctttcacagctagcgaaagtgacaaattttggaacattcgatctgattgggttgaaacagaggtgagtcctccctcttactttgtcaaccgaatccgtgcaatatctctatagatatcccgcttaatggtctttttgtaataaacacaggtcgctttggactacaacgcacctcttcttactcttgtcgctcaggctctgactctgaacgcatctagtcctccctattatacctctcttcaagcaggtgcttactctgttccctcaggtcagccatgtgacgctgcattaccctgctcttcgaagcgcaagctcagcacaggtgccatcatcgccattgtcgtcgtgattctagtggttctgttggtgttgagtgccttggcaggttggtggtttggaggttggttcggtggaagcaaacgcggattcagaagacgataagctcgtgtttcctcctgaacttttgtggactcactcttcatctttttctttttttctttttctatcgctatcgcttgttgttcttatcttgcaatctttattcgttcctgctaaatagctaaatgtatgatcacctcgcatcttcattttgttttacatcggtgcttatttttcttacttcttctttttaagaatttggacactctaaactctatctatcgaaactttacacatttctgtaccaaaaaaaagaaaaaagaatccccaaggatgatctttgtttgctttatttctgtcattcttcttggttcttcctatcttttaaactctccgatgaaacaatcctcactttctttcgtctggatgcgctgtctcataggaccggttttccagcctctgaggaaccctcaaggcttgcatgtgtgacacaacaagttgttttgtccttgacatcaaatcctcctgttctctaacagtgatgtgctgctgcagttactagttcttttctcgttatcataaatctttgttgtgtttataggatctccgtcaccccaccttctgtcaacactccagtcttgacgacctcccccttctcctgcatgatatcctcaatcgtctttagcctatctgatccttttccttcggtgatctctttgaaccaacctaagtgatcggcgatcaaatgtctatggacaatttgaacatgaataggatgttcaagggataaattagttcataggatgatcgaaacaaaagaagaatgagaaagaccggttgaaagaatgagagaaagatatacctgttctggcaaccaggacattgaactaatacgattccttgagtataagcctgtttagagaactgatgggtcgaccggtggtggcatagcacgagcggttctggatcatccgagactgatggggtcaacgcagcatctgaggaggtggaggtggaggtggaagtagaattaggatcaggaatctgagctgtacatgtaaatgtcagagacctagtagtgtttcgtaagcgagagagaaagacaataaggagaaaagaaagaggattagcttatggcaaaccgaacaagcacaaagagtaagacgatcaagtcaacacttgcaattttggagtttgatcaaacttaagtggtccctttgtatcgtttccttctgctggcacccattttgctttaattccttcacttccactcgataaagcgtccagccttcgaacagaggatgagagagaccggatggagaaaggagggactatcgaggtaggaacgaaggccgtgcggcggcgagtaagggaagcagcttcccggtaaaccaaaggatatctcgccagcggaaggagactgttcattaatcgagcggagatcatcattctatgtgagaagaaggagaaggtaacggacgggaatgtcgagagagaagttggaagtgtggtagtgagtttgactggaaacggattgacggccgaggaagcggcgacgtcagctatgggttagcagatgattagtcagcatttccaaccggcgcacgactccttcagcgcgatcttgacgacatacctgagggaaagaatacatgcatagaagagtggcaacagacagtgtttagaaagatacagcaaaatttcaagagtttacaacacaaacggatgtatataagaagaggtccaaaaatttggtaagaaaaaagtcgtaagatcatcttgaggccgtggtacatgatgggatatatgacagaaaacacccgggcgagagagtatcgaagaaagatagggaagggctagaagacatgccaatgagttgaaaagatgatagaatgaggctggaacatgatctacccagctttgacgccctccgtgcgcttaccaatcccttcgctctgtgtaccccagtttttccaccaagactttttagagtcggacgagctggtcgcacgttcaggcccagcagccttccaccttacgcctgagctagatccgctctgaacaggaaatcctctcggaccttgtccgttatcctgtcgttgttcgccttcccactcaagatcctcgaagaaccgtccaaccgctcttccttcgacagtctcttgttcttctttcctccctgctgcaccaaccttgctcttctcggcttcgccttcgtaagactccgactgaagtccgaattcatgatcaatctctgcaactccaacgtaagctctccggacgagtgggtcctcttccttggtgatctttgcaaatcgagcgagtgctcgctcatgtgctagctgactcaaggtcgaggctggtaatgagggcgggggtgacggtaggaggagaagatagcttcgagtttggaggaggtggggtgtagtatgaatcgtggatgggggaagcttgttgagagtgcacaggtgatgtggctgatgacgaggacgaggctcaagcgatcgttagttctcagaccgataggaaacagagcagaggcgcgaaagggagacatacatcgacgcaatatttcaatgaaatcccaatcagcgtgtcacccttctgtatgatatgtctaatgacttggccgtttggaggatcgatatcgcccgcattcacctcctctcttgccacttttgcttggtcgttcgcttcatcctccctactggagtcttccctctcttcgttatcgtcgtcgtcttcgtcttcgtcgtcttcctcgctgccatcgtcacctaaaacaaaatgatgtgtttcattttctgacagtgtgccgcgtcccttccgatcgatagacgaccatgatccctcgcagtagagacacggattccaccgagcgactcgtccttttgtctctttacagtgtttgcaaataaaccgagagcagcaccttgtcttcaaggccgatcctgacagcgagtgattgatgttagacgagcaaagcaggcagagcggcgatggagtgtaccgaggagtcttcgatgtagacatggtgagtcgtgtggttgcgatttctggctctaccggaacgatcagatctggagatagggacgatcgagacttaaccctagccgatagctatgtaaggcatatgtaatatatcaagtatatat

SEQ ID NO: 579 - DNA, 30770 bp, Xanthophyllomyces dendrorhous
attcaaatatcatttacacatctaccatgtcatccttccggtaaccttccttccacccagcatacagacttgcacctcattgatcgaacagaacagcttcatcacgtcctcaccagttcttcatgccctccctgacaaggatcacatcgctctatccatatctgaatcttcgattgtcattcggtacatttcgtagtctacgggtccttcaggaacgaccatacacatccagacccctggtcggtccacatagaccaccgtcgttggatgatcttgagctcgatccgattgatcaggatgattcggctagggcatcgccaatttttgtaaataggcctccaccttttgacaagaatgactatctgcttccttctatggtaaacaaggtaggcttgtttggccgtcatgattgagaagaaccttcactgacagagtcatgaactgaaattctttgggtcatatagactgaacctatccgcaactctcggtcctcggaagcttcaagccggcacccaacgagctatactccttggaacaaatctgtatgtatatccttgtagacctttaacatgagcgccgtcacaatgatcttatcatggcatcaaccgttactaaggtttggcctgttatctaatatgaacactcagaacgacaaacatatagcatctgcgccgctgaatacaaataacgtatctgaagagaaagcccgagagttatgcaatatcttggtaggtaaatcttcaacagctgacatgtattcgtgactcttctgatttgagattgtctatcgaaatgcctgtgcgcatattcccactacacgttcacgtagatcgaacaccttcctccccagatgacgaagcgcgaactgaaagctctattcaacgagctcgacatcagagtcaattcgatcgtcaaaattcagaatggtcgcgctttcgttgctctcaatggagaacacagtttgcaacgaatactagctcttgatggaaacttgacacttatgcaagttcgtcagacttgtcacctacctttccttcagattaatattttgcgcagagtcaattaattgaaccatcttttgaatacgattttaatcagaaaaaggttcttgtgacccagattggtccactgaagtcctcatggcgcttcgtcagtattctatgttctgctcttgaacattccgttgtcatcattactcaccgtatcggcttttccccctttagacgatggaccttcctcgagatgttactcctgaagatatcaagaaagtgcttcagccattgaacgtagacatcttgtacaataagaaactacctgttggagagccaaatggagacaaaagagtattgcaggtaattcatcatgacgatacttgcgctttaaaataaggaaggctttgcttactgtgcaatctctcctgaactaaaactttggccctagaatgacaaagggtttctctccagaagaagccatcgaacatcaatcagagactctccaaacctctcgtacggaatccggaaatattccactaatgtgtctgtcgaagaagatgatgaattcttgaggaagggaaggagagttcgccgaccgactgaggatatagtttgtttattttctcattcttcctagccgtactttcagaaaatagctctcttacgctgtctgtgcgcttttggtgttgaagggtgtcgatccgggtcctctttctgaggacagtcctcgttcatcaaccaatcatccctcatccgaggaaagcccggcacaacactcagaaataccaaccagtgcattttcaaccgacaccaatcttaccaaaccagatcctccgtccagctgggagagtatcaacaattcagtattctcatcaaattcagagccgactggcactacaactgaagaagaaagactggttctcaagagagtactggccgaagctttgaagtacgggaaaaataaaaaagccaaatctgacgtaacctctgtcgcggaactgggctacgaggagtatcccgcaaagtctgagaacgtcatcatgccagcagatgactcgaatgatgacaaggcattcgaccaggtaagctagctcctgttgaatcttttttttctcttcctgctcttaacaacggatggccaactgaatctacgctctacatcaaattcaaaatcttgattagttaacaatcgaagcagaacagagattgcatttggaaaaaattcgagacgacaatcttatctatcaactccgggtgagcagcgttccgaaactaatatctaccatacgcctattctaattgaaatctaccacacatcttctcctgtcggcaatgcatttgctttgttaggttgatgggttcggatctcaatggagatacaaagaccttatgtcactcatacaggaatatgagattgattgttcgattcccactggcccgcaaaatggattggttctgatgtctgtggtaggaaagcataggttcgagaagcttttcaggatggcaggtctcgaagtgagtttcctatggctccatcaagaaaaccttgttacgtggtgcagttgacattgatatacaactctctcgtgcacatggtccttcttgggtttatcagatgttgctcaaactcaccttgattagttgttcgactaccgttgccgatttgttggtcgccctggaaatggctcaactcaaacgagatgttcgtcggttttccacattcgtcaaccagcactgactgacagaacgtcgaccttatattccttgaatttttttttcctcacgcttactttgtttcagcatcttctcgagaatttgggtattaatattggcaagatctgggtatgattttctgtcacagtacatatccctatgtaatgtcttaatatcgtatctgacggacatattttttctctcttatcttgctttgggttctcccttagacaccaatgagctcggacgggagaaaatcatcaccatcatctactcagagcaaaaacccactacagatgattgttcctcaatatcgaccaaatacagaccaaaaacactacgcagtccatccagatgcagtattaaacaaccctccgactgttccctatcaccctccgttcctctttcctgacgatgatcctcacttcggaaggttgaaagagggcaacaaacgcttcaaggtgtgttagcatcgttacgttcagcttcttcttattcagggtgcggatgagttgataacatgactcttctccctctgaatgtctcctcgtccggttcgtctacgtttagtcaaatgaaaccaaggtgcgatattgatcgttatgaccaaataccacgaagtgcagctctcgagattcgcttgatattaagccttctctcatactatatttctctccttcgttttctttttcttgttctttcagaatccccgtaaaccgatatcaggccactcggctgagtacaccaagagcgacaactctaagtctgatagccttcataaggacagatagttacattacaattctataccgctatcatgttttcatcctggatcgtctcgcctcctcccgtctcaaccttacggaacatgatagaatgtttctgggcacgaggagcgcgtttagtacaatatgatgatatattcattgacaggcgatgatgttgaaccctgcacactttctccctctttctacttgacaagacctatctgcgtatgttctgcacagagcaaagaccttgttgtgtgttgcttgtacgcacagagtattagagtagaaagaaggaaagacgaatacgaaagcacgttctaagacttatataggatagtgatacaaacaaagcacgaagatggaggaaacagagagtggggattatatcggacccagagcctctcgaatttctgtagatggcgacatgattgcaatgtatatacgaacaaggcgtatagtaacgttatcgattagcatcactagggtggggagagagatagaaagaaaggatcaagactgactatcaacaatctctatatatcgctgggtagctggcgaatctggatattcctccaagaaggagactccgtagtcacatgatttcccaatgcgagggtccaatgggatagatcccaaaaaagtgattccggctgggcgagttggagatcaacacgataagaaagcaggcggaagggggtaagtaaaatgatgtgtcaacggccaaactcatttatcagagaagaccacaatacggaccttcttcagccaacgccttagcgccacccgtggatggaaagaaaacgtctgatttgccgttacagctcggacagacaaagcctgacatgttctcgaccactcccaacaccttgattcccacctttctacaaaagtctaattccttcctcacgtcctgtaaactgacctcttgaggtgttgtcactagaacggctccgtcaataccaccttctttcatgtattggacgacgctcagatgttcgtcagatgtaccaggaggagtgtcgacgacgaggtaatcgagcgagtccccccaatcgacgtctttgagaaactgtttgatcatctggttcttcttaggacctctccagatgatagcagcgtccgtggaagggagaagaaatccaatggagatacaagatagattcggagtgagataaatcggtgaccagccggaggctgatgtgtgaagactctcgttttgaagtccgagcaggtggggaagggagggtccacatatgtcgatatcaagcagaccggtctatttcattttcaagaaagcagaaaatgagcgacagtttggattgaaaatgtccgagagaacaaaatggaatataaagacctacctgcacatcctcatccgcactcaatgcccaaccaagtccagagctgaatgtgctcttaccaactccaccttttccactgagcaccaagatctttttcttaatcacatccattcgactcttgatagccggaagatctgggtcgggaagcttgggaacatccgaagcgcagactgcttgattgggacatccgtcgcaagctgagcttttaccggccagttcggattcagtcccctaaagtggagagacggattaagcacataacgaggttagctctgtgggcttacctcgtaggataatacaagagacaggcttggtccaagcactcacaggacaagcttctggaggaggaactgtaagttgactttctattggtagtgtggacatgacaaatgctgcagagtgtgtaagcaatgagtaggagtcaatggatatagtgacgaagcaaggctaatgggcaagcgactattcaagttggatcccctgcctaagtcacgtgaccatcaagcgccacacgcagtaattgtgacgatcccggagtacaactaacaagtttctgttgactgggactaatcaccaaacaaccagcaatcgaccatcagctagatagcatcgctttgtggagtcagatagcaggaagtatcgggccatattaagggaaaaggtagctactccttgcttataaaattgtacccggaggaatcagattcgaactatcattcatactatcaaccaaaaaggaacgaacgccttccgcccgttgaatttaatatagaaccatcatcaacgatactcgagtgactttcgtggcatcggtcaatcatgttgttctctagacaaaacaagaaagggatttggtgagattgaatatccatgctatgcttaagtttatcacgctgcgtcttttgctcatacctgcgcttttgattcattgcctacttacctgccttgctctcgtagctacatcatcttgccatatactctattctgcctcctttgtgtcgtcttttcactccgctcaaaactctttcgtagacgaaacgtgccagcgtgggctcttcaaccccctctttcctacgccccgagtcttccacctccgaggcatccctcaatcgctcatttgactcctcttcagaagacccatttagtgaacctctctgataacccaccggagccttccccgaacgatcaattcaagccctggaaagctcgaaatgcgcaaacgtttatctcacttcacaagtgtgtgatggatccagaacggttgtgtgaaaacacgtccaaaggcaaggtcgtcattcttgaagcagattatttccgatggtcgttagggggagggaacgatggggagcatatttgggcatcaagcgtgttgacggcgtttgattccctgggctacaccgtactgataagtgagagcgcggaggagacaaacgaatggtattccggactttcaggcgcggtgacaacggtaatcaagactagggacgaggtcgacaagtgcgtggaggacagtcggtggggatctaaagggagctgtttggaagggccagataacacgagaggaattcctatctggaaagtacggtttgataaaatcgtctcaatattgccttaggacatgtatattcaaaccatccttgttatgcacgggccggatacctcgttctcgttcaaaacagattttttcgatgtatttcttccccactccggcccatcctctaggctcagcctggacgttgtctccagagccataccactaccactcacagatcaacaccgaggctcggtatttaggttattctattgaaaaagtgtgtctgaaggagcctgtcgttccgtgggagaagcgtgacgaccgagcttacatgttcgccaaggtaagcacaagttcttcagatacgaagagtcctaaggaatggattgaaaatgatattcaactctgttatctctttgctcgttgatagttcgattcgtacttgacaaactcagaagcgtccgtcttgttcttacctacttccgcctaaaaaatgctcatcgttggttgtaaaatattcggctgaccccttgtatcaatatccttggttgcgtttcctctgacaagaacagtacttggtcaacctcgtctttcccaaccattcaacgcctagtcaacgtaacctttgtaggagggtttatgcgccaacacggtaatcgagcggattctcctcctcaaatagaaggaatcacgaatttgggattgctagaccgagaagactttatccaggagatggccaaaagtaaagtactcgttggcgtcggaaaccccatcatctcacctacgttcgtgttttatcctgtcatctttctgctctctctcttttgatcactcagaatcaaattggatgtcaaagcttgttgctgatgtccctatgcgcattactcatgtgttacgaatctttaacagcccctacgaagcactctgtttgggtgtgcctttcattaacccaatcagacagtgggaccatgatgatccagaggatcgagataaatgggtcacgcagcacaacggtctcatcgaactgaaccctccgcatgtatatcatgtggtaagtgaccatctttcgatgtcttgttttggtcgcctttatatatacagtatatagaactgatctctcttttccgtatatcgtttcctctgtaatctgacggccaattgatagcgacaacatgatgaaaaggccttgggcgaagcgattcaccaggcgatgaacgctccgatagaccgatacatcctgcctcgaatgagagaggaaggggttaaggagagggttaagcgaatggtggaggacgtggactggtggaagaaatggagagcgctgcccggggtacataactgattgatcgataacacaatcgtacccatgtggcaaactcttttgataaatgattcgatccgaaaactttaaatgattcttatgcacataaacccagccgttctactaccggcagcgaaactgaaaacactgcaacagcaaactgatgaacaaagaactcatccgacgaagcgatgccgttccacagacgctcataaccgtaggagacgatgaagacattccgtatttggttacgcgttcgcgactgtaaccattacatgtaattttgttcctctacccagccccggcactcagtctttcctcatcctccatcctcaccctcagtcttgaaacagaaccatcacccactatcacgactatcaacatatcgccatgccttctgtcgcagaccgaaccgtgtatccttcgtcgactagcgagtgggttaagcctgctgctcgaccggtagagattgatgatttgatcgctggtgtcggtgagtcgctttcattctctctttctttttccctctcttctgcgtatctcgtccgtcgtcttcttcggccagatatggtatggtatcttaaaggtagcttcaggaagccgggaaaaaagacttccagatgtacgcatgaggagccaggaagaaactggatcgatgggatcacgtatcagaccagacctctgaatatatatcagcgtggttatgtctttctcttggctgcatatccacttttcatttgtctttgtttgcctctcgaatgcattcgggagtggaatcttccatttttgatctctggtttatgttctctgactcttggatctaatcattctgttctttcctggcgttcagatcgatacaacccggccaacgtgtctttcctggaggactacctttacgatcaggtcaagagcggctcatacgactgcctcgctaacttagctaccttgaagttgtgcgtttttctccttcttagttagattctatattttctgcacaaagagatatgtatattgtcaagctaatcataccgctatttgacgtttggccgggttgaaacggaatgtctcttgcgactgggcggggactggatgaaaattagatatcagttcaaccccaacctcctcaacaccgatgttctcgttcacatccttctcaagactctcatcgctacccctgggcctgattttggactctctgttgctcttattggagatcgagcggttggttctttttttgaatgcaaatcttcattccgtattctcctctcattccttcactgacctagaaccaaacgtgttggcaacctcttgatgccttacgatacttatgacgtggtgctgtcagttctctgttcctgcttcggaagaggaggacgagatggagggtcacttgccggctttgcttgagttccttaccaaggctcactcgctgttgcgcacgtgccagttcagccagttctggaagttgttgaacggagacgaggaggctgctaccagtcagttttcctctttaaaattaggccagaaacgcgagaagtgcacctgactaaaccatcataccctcacacttccttcttctggtagtccttcgtcaaaaccagttggctgagcaccctttgttcgccaagcttattcgaaccgatgttgtttccaaggccgtggcatcgacgaaccagcgaatttcttcctcacttctcggaaagtggcttgacttgtcgggtgacgagttgaacaagtttatcacttctgagctcaagtggacgatcgagggagatgtggtcacgatcggtcagaacgaggacaacgatgtcaagggaaagactgtcagggagaacgttgaattgaaccgtcagtatttctcctttcttcttccttagtcggtataaaaaatggcgaaagaagagagggacgttccttatctcacttgctaacctgtttaaccttacccttcgatacaacatctgcattctttcaatatatatagagttgaccaaggtcattgccgccggacagaggtaaactcacctgggagatataaagaagactttctttcgtggtgtgaattcagcaaatcacaggggaagatgaaggagaagagacggaatctttttcttagaaaatgttcgctttttcagaacagccgacatatataaacttatttttccataatcttaaactatccccaagggtacaggaatcactaaatactgcaagactgagcgtttgacggttgcatccgaccagctagttgaattgcctgaattaactgtttgtctgatcttggggccacaatgcccggagtaacacctttcgctaaccctgctgttttaaccgactgaatccggcatcttacacccctgcgtctagaaccatgatcttcccgaatctacctaacaatctctcacctgtcaaatctggacaatgcttcttctcgtctcgagtgcatatcggaaatgtcgctgatctgcttgaccttgagaggctaggttaatggtgatcccgtatttgtgttcagctgaatggacacacctatcccaatcctggggtgacagagtctggaatctagaggagtagctacatgaggcatcaacggaggtgctcaaggtgactgagatcgtggttgaaaggacgttgcaagggatgatcgccggtcagcatggacgagtagaccttctgatatcttagttcgttgtcggtttggtcccagcaaaacacctggtaagttcggttagagaactgagttcatgcagctcgatctaattgttgtgtcagatgtatgggttcagcgccagtcatcatcgccagggacacaaatggaagataccggcggagcctcatgaggcagaacgatggttacgttgtctaccgatgatggtctggaaaccccatgcagaagagcaggtagaggatcgcgagttgtaagaagcaaccgaaacttctttagctacgtgcaagggttttttctaatgaaccatcatccttcgctcaagtgaaacctgtttgttaggaacataagaccaaatgaatgtaaataagcaactctagagtatcgatatcgaacatggtaaaggcgaaataattaataagtccaccaacaacactgacaatactttccatatcagatgcggattacctctggctcctcttcatcttttagttcttcatcgtgtatgaatacatcaagttcctgtacgctctgattgatactggcttcctgaaggaatgtgaagtcgagaagctccaagaacgggaagaaagagacagtcgttttcccttctgggaaaatcgtcttctgtcgccttcgcagtcagtgatcttcctaaactcttcagtctccaccttgcgctcgtcgtagggaactatttcgacattcagagtaagctcatgctcagtgactctagataattggcaagggagggttggtagatgagatgaaggatgaatatctccctccaacaagcactgctatctcgattgattacagcactgtcagaatgagaaaaacggattgatgagtgtgaattctatgtccggtagaatcccgtgcactataacagttgattttgaatttctggtccggaggaagaaacaggttcacgtagatctacgtcctacacaattcttgaaacacaacgagcggttcaaagatgagtctagcttctcgatcattggcaattgttggaaagctcagttgcaaatcaagcgaaaagagaatatcactccccgtcatacttggcctctgcttatacgacctaggttttccgtttctggaacagctgacgagaggatttcaaacttcgatttgtagagcgctcgaagatgcgtgtatcctaaactcttgatgacccgtcaggtcatcccatctcctcagttcgtctgctgaccctcttgaagtcaagcttggaaagcctctgcgtcttagaagctagcctcttgtgctcgaagaagcaactagcaatagtgcatttatgtatgtcaacctgttcaattgaaggcatgtaaggcgcgcgaagccctggagtttcagccgataagcattctggtctatcctttcaagcatcgtattttctcttgatatccagatgctgaaacagtagtctaaatgagatctgactctgggtaatcaaccaggaggagaccggagagaacgaagatcgaattaagttcgaatgaaatggtggtatcaaaaccccgagatggacgactttgaatcgagagtattccagttcaagatttaacttcttccactaatgtctgaatcttggcagacatagaagggataagagtaggtgagaagaggtagaaggaacacgatagtcccgtgaaaaatacaaaggagcatctggcgtcgtaacagacagctcaacaaacaccaggagagttcaccctggaaggcaatgagactggatcaggagctcgaatgatcacaagttgtctatcggtggacacagaaagacgtcttgctgagaggaggacatatagatcgtgtactttaggaaaacgcgtcggtctgggacgtgtcgcttaaatgagattacagcccaccaagtctctcttacgtgacacagatgccacacttcatcatacaactatagatcatcatatcaacttcagggcgagtacatactctacttctggccagaacttcctctcaaaaagccatccatcacggccgctttggcgtctctggagatatctgaattggatgtatataactttgagatccatttagttgccagcagatcaaattctttcaaagttgacaccgaaggcggaggaatgccagtcgcagagggagaagtgggggccgagagaagagctcgaatagtctacgttgaagaacgaagagcgaaaggtagaggaaatatgtctgttcatatctgtctatgcgtgaaagtgccaatagtattaaatttactcacagtcttgagcccaaaccaacaccgaacgaccatacctttaccatcgctactcttttcgctcaagcttaaacaaaggagataggccttgaatgctaaaggaaggtctccagcggtgtaagccgtttcagcttgtcgaagaaaatgtatagggttttgaggggcaaggagaagagggtgagaaatgcacgccagagcttgagtgtagctgcagtaggttttaatccagcgtcagtatagtgcagcttcaggagtaatatgatagcgctcaaacttacaggcctagggacgcatatagctctgagagaagggaccacgcatcgatatccgtgtaaaatacgtccaagtatttgagcaattgtggaatccgatcttgaggcgttagcgaaggcaaggacatcaaccgtcggagaacaggctatcacgatacccagaagaagaataagcccgagttcaaggtcttggttcgcctaacaggactttctcgcaatgcgcacggtttcaacgaatggacatagactcacgatattcgtcgagtccttgaccagaagtctttcgtaaaacgttttggcttcatcctcttttccattagcctcgaggagcattcccatcaagacttccactcggggagagttgggaaacttcttcgacagtttgttgatgcagtcctgatagaatcatatcattagaccagatcatggacgtatgataatgagacagacaagatcaaaagaggacgtacagcggcaacctcgaccttgcctaaatccattgaggatatagcgagctgttccagcacggcccactctacaaagatgagaagcacgctgatatgtcaaccgacaaaacatatatggatgagtatgccaaagtcgatgttggtacggaccttcatcggtagaagctcgtccttttcccttaagggcattgtaggctgattgaaaggtatcaagagaatctctagactgatgaatccgacgatgggtaaggacttctgatggatctgacatggattatcacaatatctcttaagtagtctggaagagatggaacgggatgggatggagaagagaaagagaagaggacaagattgtgtgtaatgttgcgtaagtaacagctaatgttacactaattacggttgccaacactacaaaattcccctaatgaatcaatacagaacatttgtaatcccagcctgcagaggatgatccggtgataacccccggtcatggctggacacaccatctcatctctttccttacaagagggcagcgattctcacccgccgtcagtgctcaccgtataattttccaatctacgttcttcttcctcatcaataaccacccccccgtcctcccaatatttcttcaaacaactcgacaccttctcgcaacgaagaagtcacggcaggtccagttcccgaacagtcggaaggatccaaccacttcaaccttgctcgcgacctaaatccctccacaattcgtccgcgtccgtctaggtcttgctctccacctgtatcctcgactaactcaccttcgaccaatcaaccttcgcccaggaaacgacttcggctctcatctcctagcatgtctttacctggctctcagctcgacgagcttcccatgcccgcagatgatagcaaacaaccgggttctttggcttcctcgcctgcgtatcctgccattacatcgacgaatatacaatcacccgttctgtcgccttcatccgctgcgcttggatctgtcatatcatcgccctcccgcctcaaagactcccatctgaactctcaaaccaacggacattcgaacggcaaagctcgaaacggattttctccgatcgaccattcggaagctgggccaagctcgggtaagagacaagctggtgtacctgttccaggagctaggctgtacaatgaaggttcgcatttggataaaggagagtttatacggataacgctgcaagctcttagagactgcggttacaagtatgtcttcctactttttggagatcgactgcttaagactatgctcacattactattgtctatctactcggtggtatcccagagattctgctgctttattagagcacgagtcaggctatgtgctggaggctacccctgtagcggatatgcgttcagctataatgggaggccgatgggatgaagctctaggtctgcttgaaacgaccggtattgccggcaccaagaatgagacagtgagttagctatcacagaggtcttattcataccgctcagaatgtatttgctcaacatgcttatctatcctcgttgacgcgcgatcaggcggccaggttcttttttgccgaacaaaagtatctagagctattagcgagctcaatgtccagcaaagctcttggagtgctacgtaaagagcttgctcctctgaattacaactctgaaaggttacatcagctgtctaggtgcgtctctcttctgggtgtctgtgatcttggctgatttctaatcaaatagacaggtgacccttttcttacttttatcgctttgtttagctatgtgctctgtataggcgaacaggagttgtataatcgatctggctgggacggtgcccaaggcacctctcgtcagaagacgctggaccaaattcttagtaagcttgatctgcctcgtccatcgttcgaggtatgtctactcatcgtctctttcatatgccagccttcatacccagcaactataggatacccgaacggagaatgggaactctacttgatcaggctcttcgacttcagagcgaggcttccctctacttagttcagccgtcaggatccttgtctctcctttcagatcaaacaagcagtcgatctcagttcccactcatcaagtttgcagcttgccaagagcatactgatgaagtatggaatttagcatggagtaacgatggaacaatgttagcaagtacaggcaaggacaaacatgtcgtcgtgcatcatgtgggagtaagtcagcagtttcatcaactcgtattcatcaatacttaacacattcctcctcctcatgccaatataggtctcgcgcgaaggatcctgttctaaacgagtatttaagcggatagcaaaattcgaagcccatccagcacctatcggaaatctatgctggtcgccggacgacaaaatattgattaccacagccgaacatcaaatttgtgtctggaataccaaaacgtgggagctgatcaaagtgctcgatcagcatcaagactttgtttctgctgtaaggtggtcgcccgatggaagctttttcatttcgagtggcgaagacgggaagctgttgaaattcgtgagttcaggcgatgtgcacggttcgcgaccgttagagttagattctaatcatccactaatcatccactattcatctccatacttcttctggaacaggatcgagcaggaccaagtcttgtgaagaagagcttagtcaagaacatgcgtctcttcgactttgacttcaccccggacggcaagcatttcatcggtgttgcagtgtttcctcaagagcctcaaccaaagtcattatatactaattcgacacatcaacgatctggaggttatcaggagccaaaattttatccatgcgtattcgattcaaagacactagccgacatatcgtgagcctctctcctcccttgacctcgaagatttatctgataaatgtgcacgtactattaaacgggaactgacatgttcctccttaccttctcggatctcgattctgcaaattgatccagccaacctgaccgaccgtcagtcaagataaatggtgatgcaactagctttcgattgtctagagatggtcaatgcggaatcatcaatcgtcaaccggatgtacgtgcctgttctaacacatttattgcgaatgagaatcaagtatcgttgctcacctcttttctaaattggacggcttcctccgattttatgatggtcttctttacctcaggagatacagatatggagcttcaagaatcttcaacccgaactaaagcagagtcttcgtggccatcgccaaaagcagttctaccttcggagttgctttgctggaccaaacgacaaccttgttgtatctggaagcgaaggtaaaccttccaattgtgtttcacaacttcaaaaagaagatcgtgacatgatactaacatggttacacgccgtcattgtttgtattgtttcatcgtctacgcactattctcagatggatatatctacgtatggcatcgaggatctggtcagctcctagagatcatcaaaggtcacaaacgtcccgcaggagaagaaagcaacccagagttgatctcccgatccgcatccggcacagtgaatgcggtatcgtggagaccagaggtggatggcgaagattcggcaatgtttgccagttgtggagatgatggccaagtgtaagttctcttggtcatgacatacaacgtgacccgtataggacaaggctaaatggttctgttctaatctgaccactggctgtagtttgctctgggagccagcaccacctggcacaccgcttcctcctaaagagctatccctcgcgcatgctcctaatcgcaatgcctcttaggttcacatcttcttatctcgtccacacaactgcatcttgatcatttatggttgaagtttgacgtcaatgtttgatatcttcaagatgtctttacaaaacctaacatcttatcgatcacctagcatctactgtaatctttatttgtatctcacgcctttcaaaggatcgcatagatccattttcgcctcttccactcatcttacacatatcacgaattttcatagcctctcgatgctatctctgttctatctttcttaacattctttctccggaaccacgatagttgatggatctttaagttgtaaccacgcacggcagaagggtaagttgcagtattctgtctaaccatattcatgtaagatgtgactagagtcagaagcgacagtcaatcccgtattgaatgacaggaacacacctgatgacatctgctgatcgctgtgaacacttcacctgtcaatctctgtcaagccctgttcctgtctgattctttccgtttgatctcctcaatcaacaactatcatctcctcaagagaaccgccatgcagccatcagatcatacgattgatattcccagctctgtatctcatcggtcgtttgagacagcaagagagggtgatcgcgttcaatcccgtaggtacctcaatatcagtcgacttgccggaagagcaaccccccttgaatcggccgctcgtcaggacgttcagtcgtcttcaaagaaaactatcaagagaatcaaacacaatacggagcagactcggtgtacgtcctattctttttcgtgatatcgaatgcttgaaatttcttcacaacaggccatatcggcacacttgaaacaaagctaacaattggatcgaggcaatctatggcggcgatagtcagctttgataccacccctgtcaagtttcattctgaacgagagtctttcgctccttctctgacgtccaaacaaactcatcaatcgacgaacaacttcattactcccggaacacgaacttcgatcaatcgctcacctctaggattggcgaaagaactgagtatcaaaaacagatcttttgcatccggacgttctttcaaaaatgtagtaaaagaggacggagaggacgcggtggtatctagtggcagtgaaggagaaaccattagggatggagaggatggggctagtgatggcgaagacggcgagtggggtgaggaagagtcgaccatgatgtttgtcgagactgtgaagaaaggaaaggatttagttgaggtggaagagagcgagtcgtaggttcttctttgtcttttcgatagtactcgagcgaaactcatctttcaatgacttcaacaatcctttctatagtgacaacaacttactgagccagcttctaagtaagcccgagctctggcgcacatgcacgatagataactcaccggggtcttttcgatattgacagatgctgatgtaattgaagatgataagataacggcgaatcttgttgacttgacgtctgtcagttttttccccttaatgaaccttatcgcgactggatcaagttgctgatccttaaataagcgcatacagcctactggtaaataattttgaaacattacggatattttccttctattcatccttcgtcgtctgtttcggttgcatggtatagagcgattcgtcaaggacctatgggccagacaagatcgacatacaaactcgtatatgtgagtaacatgtccttttcatccatcgagaggaacccccaaatcttattgataaaacatacctaaatctcttctagtcagaatcatcaagccatcacgcgcgccaacgaaggtttacatcgggatctgagtgctcagaacgatgagttgatgagaacctacataacttttaaggtgtgacttgtactcccaataggtgcatgatgcgcacaggaaacaagctgtttcagccattcatacctaatctagttgattttcatcttgcctcatagagtcaacaagagcttcttgttgcccgtgtagagtcagctcaccaggcatgtgaacgtaggaagctggaaattatcaagaccgaggagaacttcagtgagtaattgatattgttcggccaagatttttagaattaaccagttctcacatgacgttagggcaagagaccaaggaaattttcgaaagactacgagaagagatgaatatctccatcgcctcattcacgtgggtttcaaaaactactaagaattatttgagtgacctcctgatcttatctcttccgcttagttcaagagccgagttgacatcatccgagaaggaggctaacaaggaggtcaacaagatgttgaaggtcagtgcgctctatcattgcgatgatgtgactacctaatatgctaagtcaaatgtgtgttatgtcggtggacgtctaggccattattggaaagtgatgtgctcgaaggaactgtgtctcaagtttagatgttgtatactctcctagctggctatgtcgtctatacatttcatggcactcttgattatacaatacgtatataatctacaatgagttatattgaatcacgtgatccaaaatgtcacttgcgtaacgcttggcctccctccgctcagggtataaattcgtcagtttctgcccaatcaattttgcttttctccattgaccacgttagttcactttcctccccctctggtttttgcactctctcctcgatagctgaccttgtctcgctttgatacgcgtcttccctccactctacagactctgcaggattcatttctatagagatataactggtcttgctagtttacactagctacaccacataaagcgagatgctgatactccacccacaccccttcacggaggacatgcggtcttatgctcttgattctcacgaaccaaggcaggccgtcgatgaagtggattgactcttgacgctctttgcttgcagagtagccgacggacgacatcggggctgtgggacgtatctgatcgcttctactttttatcaccctctgaagactgtcttgcttgctccttgagcgagtgagaacgtttttattggcaggtttctcttcaggcgtgttctggttcatacaacggcttttatcaaacattttaacggaacaaggttgagaagaactgaaggtcagtatgaggccagattatttggaaagctctgttcgaaatatatatacagggcgaaactgagctgatgaccggatggttacaagtgaagtaaccacaccaagggtctgaggtttcaagggataaattcaggctctcggggctgggaaacaggatagagtagaaatactagagaacaggaatggcagggataacaagtcacagagaatccattactaacttttctatctacaactggtagagaccgcccgttttacatatcattcttagacgctgtgaacactgtagaatgcgctggaagtacaatccattggaagtgggagaggagggatagcgaaattgaagggtctttgggttacggtttacggtttacggtctacggtttacgaatcaagtgtagtcaggttacgttcctgacaacattgttcctaacattagataattagagcatcacgtgacactacagagatcgtgagcatgctgtagatattctcactcaactttcttgagcagcaaggcaagagagaaaatcctatcaaccaaccacttgttcaccatagacatacctatcctggtcgtatcgataccatcaggatcaaggccaaggccatcaacatgaatccgtcgaccgctgtcctcctcaattcgcctgctctcaacgcgcgtatgtggatcaactcattctctttctataagaatgtacactgaatgactggctggctgattgaacctgatgtgccgcatggacgtgttgtcttcccatttctggtaccttctgttccacagtcaaccgaaaacagcttgtgagcttatgtaaacgattccatataaaggcttctggaaaggtcagtagccatatatcgatcgaaacgagacctatcggtttatttcttatgttggtggaattgattgtaatgttttgaatcgtggctgcctggtttagaatgccgatcttgttgccaaacttcaaacattgtttgtctctatatttgacagacatttttcatctagagattgattgatgctccaactgacttgcttgaatgttcatccgtttatctattgttgttatcatctcagcgccaaaaccctccctgatgcagttgccgacagtccagattcttcaaccgcgactcacttagccggaaattcgaccccgtatcattctagctcagacgactcggagactgcatcttcgtctcccttcaagagacccactatggcaagcagtcgagttgacgaatcctggtcgaccctccaagagaaagatgaggaagaagtcggaacatgcatagggacaaatagctctcggaatgttgagaacgagagggcttcatcatcggtcgctctttcttcgcccgagccaagtgtatcgcgcgcgatgtacccttctgtttctagagaggagtctgcgattcaaaggaacccgacaacaccagcagctgatatcgagatggatgaagaagaatttgaggttttagccgctgtctcccccaagaaacaaactattagacttccttcgatggcgtttgcggcttctcccattaagcgtctttctgccgcaacttcgctttccacacgatctcccatacctggagcgttcccttccttgaccaaccatgacgttcagtcgggcaagtctgatcagtcttccttcagcccttcaccctttgttttcggaagcccacgacactcggtaagaaataacgcgttcatgactcctgtgctcactgcagcaacctctcaaacccctggtgcagtagatgccaagctatcatctgaagcgacctcggtatcagtcggattgtcaatgcgtgagatcatggaagcagagttgaaaaagcgagtagaggagaaagcctcgaagggagagttggtgcgtggtccagggttgctgagctctttgacaggaatctcctcattaggacgcgcagatggaaagaagaggaggttcgacgacgcgcatgagagagagtttgcaaagtaagtcgttcttgctcgccttattcccaactctatgcagtctcaaattcttatcacgctttttctctttgatttctcttgatcaattgtagaatgacttcgattgcagatcattatgccgctcgtcgtcccggccaatctatcaccctctcatctgtatcgtcctccgctacccttcagaagaagtcaaccgctcaaagacggccttcctccataactcatcggccttcccttattgtcaactcaaacgggagagcacatcggcctaagatatccccacaagcgtccactgaagatgattctggacgagcgatcaagaagactcgattttctgttctagaacccgtacaggtgccaaattcagatgtttcttctgaatcatccacggccgctgttcaacatgcagagagtatcaaaagggaactgggggacaaatctgaagtggaggcagatattcagagagagagggaaagaacgaggcgcaagctggccatcgccaaggcgagaagaagctcgctcgctgctgaaagaggtggcagatctagtttggcttccacgccaaagaccctaccacgtgagttatctttctgttcatccgttctatgagtcgggttttagacatccttctcaaagaacgaatcctcatatcctgtattatgatttctagccaaagtaaatgcctctcggttagtattccttcaaactgggatggatgccgtcaaaaaaggggtgtcctctctagcgagaagcatgcctgactcaactatcagcccgtccttcactctacaatcacctgcgaaagaaaattcagtcactgttgcgaaagggttccgaactctttcctcgtcaaccaagcctgctccttcttcatccgctgcagcgcccaaggctgcctctgcaacgttacccaataaatcctcatcaaatgcatctcgagccccgatccctacgttcaacgccagttcgcgatcttcttctattcgatcgggtcttgccgtcagttcgactcttcatgtacccaccaacactccgagtatttcccggtctgcatctcgtttgtttgcgccaacagcttcttcattagctagacaggccggcgcaaagacaccatcgacgacacttccatcctcgtcctcatcgagcagcctagccatcagatctaaagaccctgcggctctcagttcgaagcgaccaacgataccgactatgaaacgatcaccgagcggcttgcttccccaatgtcaagtccaagctcaaggaaatatacttcctgcagccggtgatagcacccctcgacccatttctctctatcctactctacctttcgacactgcgccctcaatgttaggaacgttcccctcacattccagtccgaatggactggtatcggccccttcagtaggccttccggacttttaccaaagtccgtcgagagatcggctcaaagctcaaccgaccgccagactgtcagcccttcaacctcggttggctggctcaacacctatcaggaagaagcgaagcacgatgtccgctcaatcagtaggcaagcctagtgggctttcccatcgggccatcatcgcgtctagcgtagggtcgagcggggacgggaacggaagcacgccgtcatccgcaagaatcatgacgggtaggaaaccgagatcatcactctcgatatctgtttctgctgctaaggctcgggcccgagctcaagctcgtgctcgtggtcgagctagcgtaccgaatgtcgggatgtctacttctgataccagcgtggatgctaacgaagctggtgggaggtcagatcgtctgagtctagctggagtttaaagtggatgtcgagagaggagaacttgaggtcatctcggttttcttttttcaagagggtgtggggagtgaggggttgtttatcgtttcgtcgctctagggaagactgagaagctcgtcagggtctgaatgaacgagggtttggtttggtgcgatgtatgcttctgtttatctttctttctttctttcacctttccttcgctcgcttggttctccgcatttgcaatttttttctgcttcctgatttcatccatcctcttcgcatattttgggaaccgtcttttctctatatacctatcctagatcatatctcccgtaattggtactttaatgctgcatgtccaacctaatagtatatatcctggttctttttccatctgtcttgtgatgaggaatcataactcaacgaacgggggacattctccataaatacatatcacgccgcacaaaccagggctcagagaaagagaagaggccaaacgaaaaagagagaagaaagcaaaagaagatattattaagggtggacgacacaactaaacgtttctgatagagggaaatgggccgatcatcgttggccggtctctttccctgctagtccgaacccttgacgcatgatctcgatagccgccaagtcttccctgaggatctttgtaagatgttgaagcgcggtctgttggtccgcgatgatctagtttattattagtattttgtcgaagccatcccattcagggtttgacagattgaaatccgttggagagttgaatcagttttttttctttctgtatttttctttcttcgtgagaaacagagaaagaaggaggggaaagaaaggagaaatcccaccttggcgagacgttccatcgcttcgtcatctactaccgcccaaccttccaacccatggccaccgtccgaacctctgccttgtctgtctctctccctttccgtcttgacctgaccgaggagaccccatagttccatcagccttcccttgacgttcccgtctgagcctgctccccttccgccttcgagctcgcggacaagaacagacaaccgttcggtcaacgcttcctcttccctcctgatagaggacgaccggagggtaggaatcaaaagatgaagatgcctgatgagaagtaacgttcggtgggatagctgagtttgaaggagatgtgagcgggagacccttagggagagtgagagatgggatgttttcgaaagtgtgctcagtcgggtggagatctcttggagtttaccccagtgcgcgccggccatcttcatctgagcgtctactcgtttgccgagatcgctaaacccaacggctaacgtgggtaccattctgttgaagaaatccatccccagcagacgcaaagagagattcgtcggttggtttgaacagagagtagatagttcagctccgactagtacctgaagagtcgatgggaacagctagaaaatgaatctcacgtcgatggctccggattgtctctctgtgctttgaaccacatggcgtcatctacattctccggtctggcatataatccgacttcgttctccggtacgacattgtagaaaaagtactacacgtcccggccgcccccaagaaaaagttgatttcataaacagacatatgtatcagatttgttaagcaggtgaacgagaagagagagagagagagacaaaccttgaaccgacagtacgggctactcgggtcccaagaagccttgatgtactctatcctctgttcgatcggtacgtcttccaccctcagtggcgctctcaagccagcaccgatccctccgtttgcaccgtacggtcctggaatgaacgttgagctacctagttggccgttgggattccctaattgactgactgtcaacgtattttgttgctgctgctgttgcggttgctgctgctgctgctgctgttgttgttgctgtccaaaccctccaccgaaaagaccaccattccctccggtcgttccacccaaattattcacgctcgaaccaaacagacctcctgtagcagtggcctggcttcctgctcctccaaagagacctgacgtagatggttgttgttgttgctgctgttgaggttgttgaccaaagagagaaggcgtagaggactggtttgttggagctccgaacaaggaggatggctgagtggttgtcgtgcctggtggttcgaacaaatggtcagattagatcgatagaatgacatgcatagaggagatcgatcggataaagatagatgggaagaaagaaggaagaaatggggaggagaaagaaggaaggaaggaaggaagagagggagagggaaataggaaggaaagtaagacgtaccgaatcctccgaaagcaggttttgcctgccccgccccattgtcagctgctgtattcccaaacccactgaacgtgcttgtcgaaccggtaggattactgttattagcgttggttgttgttgatccaaagagacctgtgcttggggggttcgtgttcgtattattcgaggaagggttagaggcaaccgctccaaagagaccagttgttgcttgtgctggttgttgctgctgttgggcaggagctccgaaggagaagccgcctatttgaatttcatagaggaggaagagaaaaagaagaaacaaagaagagtgaggacagagaagggaatcagttggtgtacagacatatgaacgagcatctctctctcagccgaatttgacgaaagagaatcatatcctcaaaagaaacgaggaccaatgggcaaaaggagagtgaccataaatgggcacgtaccgaaagaagacatgtcggtctgattaactacgcactcaaggctttcccaggagaggaatcaggttctgatgacggtggtggtctacagagattcgcgaggaggatggcggttgaacaaaacgaccggatgttgaacgatcagtaatgggcaaaaaatcccataacttacatcaaggatttcgactatttgtgatcctggctgggcgttctctcaatcatctcctcaattgttgaaacattgccagatgctcatacctcattgacagaagaagacacataactagttccgttgactactggccagacaaacgatgaatagagcatacacttgtgaattgagacagacagagaagggggaccagtatggaagcgtaacgaacgaaagaaaatgggccaagatcagtccaaaatggaaaagagggagagggaaggagaaggcgtttcatggggggacagaacaacagaacgaaaagaaaagctggtcatgtattatagatcaatgaagagaatgtacggctgaagaagagggagttacaatatgcgagaagaacaggaacaaaaatcatgaatcgtcatggggggttgagaaggaaaaacgcatgaaaagcataagctgggagggcgttgagatatgaccaaacacaaaagcccttggcctacttccttggaaagatgtcgtaaagagtgagaattggggacgtgaacgtgaggagggaaaatacaattacggccaccaaatggagaaagaaattatacaaagaatgacgaaatactcggagacgaggtatttgagaccgatgaataaagttggaaacttcttgaggtggacaaagaggacaacttgtgtgtctgatgagaatcagtagtcagatgagggtgggcaaaagagacctctgcctccggtgtgagcgctgcaagcaagtaaagggacgatccttggctgtcaacacttcacaatcaaccattaaaaaaaggcgaaaaagaggggacctacttcatggcgtccctccaaaagttcatcttgtgccaactcgcgatctcgccgttcgatccgggaattgcgccaacgcttcctgatgtgcactttccgcgtccgctgaaaagcgacagaaatagaaaaggacatagagagaaatgacatgagagactgacacgactggcgagatggtagatagaagggcgagacatactcggcttgaccggagaacgggcattgaccttcaagagtagaagccgaccttgagcatgcgtcgtcgagcgagatcctggttttagagttacccaatagtcgaactgatgtcggaccgggtaatatatagggctgatagaagggtgatgataatccgtcagctttttttcgtgttcgactggcttaaacgcgctgagaaatatattaccttatgggacgacatgttgtgacagtgaagaaggctgttgtggagaaaggagggtacgaagatgccggttgatcagagcgttgaactaagcgtcctgtcggacgatctcgttcttacgaaacgaaacttactggtatccgtagccggacatcctggtcagcaaccctttctctccacagtactcgcaaaagccggctcgatctcgagagtctgatcctttgatgtagcgtgcgccgtagagctgtagaaggaagagtagaacatgcgttggcaaggaaaggtcagaggagaaatagtttcaaatatgaacagaggtcaactttgaagaggaggccgacagatagacgcgtacgtttgattctggaaacgacctaaagacgtaaccttcctccggtgcgggcacaaacatccgcggtggtagctctggcggaaagatcaaggatcctgtgtgaacaaacaaagaacgggctcgacggttaagtgaatgggtctttttttttgacaatcccaaacgattggaacgtactggtcttgacgtggtcggccgagcatccgcctgactttttcttttggggactcgtgccgttagggccgggctttgagatccgccctttgagccgaggagcgtctcgcggtctttttcggcccttgacggtcttatcgctatcggcaagaacctcgtccaagtgtttcttgccgttccgtttaggtccggagccggacgcagacccggagtcatcagattcgggaggggaagcgtctctcatctgctgaacagtctgtgcatgtctggtggtctcgaggacgaaggatgtgggaagtgggaacggatggaacggatgtgccggcgcgaccgagggaaacggtggcagcggatcgggtggggtgaagaagggatgggacagcgaattttgttggaggcacaccatcgggatcggtccagggaacggtccagtcgagtggtgggtggcggttgatggtggaggataggttgatgattgggctgcgacggcgaggatgtcaagagcggatccgtcgatggggtgcgactgctgggagggatagagtgagtgctgttgagagtaggcggagtttgtggaggtagtagaggtggtgggttgaatggagctgaccgactgggacggatggccataggaagtgatgtatctatcctggttcggataaaacgacgcaaacgacgaatagccaaccgggttaggaaacatgttctggtgagagtcgatgtacgggtaggcgtaaggaaaaaaggtgggcgacgtggacgaaggattatctgaaaagtatgatctttgtgcgggtggtcccgagggattcgtctggtcgcctggcgaggcgtaagatatgctgctggaagaagtgtaagaagcttctggggaggacaggatccctgcagcctctgttctcgagccgtcttgaattctcatcggctggagagagagagaaagacaaagacaagggtcattacagacgaaaaggaaggacaaagacgagtgaaggaataaagaccggagagagggcaggaagacacggacctgcttgttcacgtccaagtctacatgaccccaaccaaagctggtggtgatggcctgatcggctggttcatccacgtcgacctctggctgatttgtggacgagatagacgaccaaaagctggcgacatcggccggtgggttgaagtagagcgctttgtgcgagttgagttccctagttgcttgctcggctatctcgagcgggatctcgactgaggacgggtaaccgggtggagagtgagtgtctgtagaggagtgactgttgaggacctgctggtcatgaataaaacccggtgggctatctgtgtgcgttctgtcgatcaaagacatcccggcagcgagacgacgaaggaagaaggaagagcagacgagcgaacaggactaggagaccgataagaatgtcaggcgaactagaaaccaacgaaagacgaacccaaggtggacgaaagatgaatggtgggtgaaggatggaaggaagaaggaacgaaagaaagaacgcactagagagaaaagagatgggaggagatagacagagggtccgtgcgtgggagggagagaccgtctgtgcgcacacacacacacacagggacgcgagcacacggcccaagggacgaggcacacacccacacgcgcgcagacgaggaggactgtgcgcgactctgtcgtgaccccacagcgagagggagagagagaatttgtatgtgtgtgtgcttgtgggtgcgtgtgggtgtttgtgggtgtgggtgtgggtgtgggtgggtgtgtgtgcgagtgtatgtgtgtgtgtactgagagtgtgcccctcattctatcgatcaccctctgtttgtccgttcatctgttcctctccgtctttgggtccctctcataggcacacacacacacaca

SEQ ID NO: 580 - DNA, 34204 bp, Xanthophyllomyces dendrorhous
acacacacacacacactcacacactcacaggtgaaggaaaaaatcaagcataggatgttccgctcattcgatgacgtcctggtagatgtcaaaagcgtcgtggaggacaaaaaacctatctctgagctagtctctatcggggacaccactgacgagtcagagtgaaatcactcgtcgatcacttctatattgtagccctaaatttctttatcgttgttctttgttctgtttcagtctcgtcattattttccttgtttactgtctgctagtggttcttcatccccgtcgggtagactcatggtagtcggcttgataggtccaacggttcgatagatagagagttagatatagagggagataaggaaagggatatcaacacgtatcgtccagatcagaggagaaagggaaatcggagagaaggcttgggaactgaacaaaatgaaaatgaaaggaaaaaagagaaaacatagaagaagtgaaaagggagcgagacaggatgaccagataatgatagcatgactttctattcatcgtcagatctaaattgatccaggagaggaagaacaagattagcctatcttttcccattattcaacctctgagggaaatttaaaaaagaaaggaaagagagatacttacaaatctacataagccggtacgtatcgaggtttggtggctgccgccgctcgtttagaccgagaggctgccggcggagggatgtccatatccattgatctgatgaaaattctcagtcagctcacctttgtcttcacttcccgctctcttcttgcattcccgaagacagtagaaggagaatgctcacagatcaaagtcttcctcgtcggattccgctttcttcttcacagctcctgccttctttgaggccgctgccgttggtttcttaacagctggcttagaagtcgcccgaggtgacttcttgctggtagaggaggtggaagaaacaggtttggcttttgattctattttcgaggcacatacagacagacatcaaaaccggaagtaaagggacagaaaaaatttggttagcaatcagttacatgacgccagaacagcttcatcaatgtggcttttcatcgcgttaaatagctaataagagaaaaagatcgactgactagccatcataacactataatcatcatcatcatcctcgacattctcatccccactcagaacgatcgacgatttcgtcttgctcttgggaacagctttagcaggttctacagaaaaagggagtaagcacatcgtccttgtctataacatccatcgccgagaagacaggagatcatcaaacactcacttggttcttcctcttcttcatcgtcggtcagaacagccgagatctttgctttaggcttagtgggtgctcggataggttctaaaacaaagactcacaaggtctcagtcaaggtttggatcaaagaagaggaaatgttcactcactcttatcgatttcatcgtcgctgagaacagcagacttagactttggcttggttgctgggggaatcttgacagattctatcagatttgcataagataacccgatcagatcaaccatattttgtccgctagaaacaagaactacgtactttctttctttattaaaccgtcctcaagatccctgtatgtgaccaaagatgcgcacggtcaggtagttaatacgagagaattcgacgtggatatcaagtacctaggatcactcacatttcttctactttcggctcaatcttgggctttgtcgcaggagccttccgcttgacagcagcgaccttcttggagggagctacaaagtcatcgccactatcatcatcatcgtcgtccagagccttgcccttcttgatcttagcaagagccttagtggcgagggcttttcctttggttttggatctctggaaggtactgccggccgcaatctctgcatccttcttaagaatgagctgtgaaaagaataacgacgaagatgcatttgagtcacgagaactttctgaaggacaataacagaattgaatcagaccgacctcccactctgcaaggaaactatccagatcaacattccacaagtccatcggggtctttcgaaggagctcatccaattcagatcgtttctcctcttgagcattcaggagtttttgaacctataatatgcaaaattccccaaagaacaaagaagattgtactcaactacagatcagttgggtcttcgagacatagttgacagcttagacgcaccttctcggcagttagacttcggatggccatcccaagtagataattataatcactggccaagccatcatcctcttcgtccagaacatcttcatcttcacccgcctcgcgagcagcccctttgatagggaaaggtcggaatttaagctttcgaagttcatcgacgatggcggccgtctttcggttggagataacgagctccccgtcgatgcacatctgtcacagattgattattagatcaagtatgttgatggatgatgaatcaagatagtgagtagacatacctgcacgaaacgcgcttggttggacagcttctcgtactggtcattgatctcatttatgagtttttccttgaattcgaagtatacaagtgatgcataagtaacccagtatcaaaatttagtcgaggaaattattggcttacctttcgcttgatataatactctagtcgcacaccatagaactcttcgatgatctgctcaggggtagcatacctctttatccttccttgtgggtcgaagcagaccatgttggtaacactaagcgtggagtgaattttgaatcgcttgtctagtccttcgtcttcggcagacttcatctgtttagaagacatcttgacgacaaacttgaccgattgtgctgtgtgaagctcgtcataagacttgaaagaaaccatgcattttagtaccggcgtattagcggggatgcactagaagaggcacagaccttgattagaggctcagttttatcagttcctgcgatccaggcttcgagcattgctttgtagtcgatcgtccatttccgaatgggtaactcggtgaccaccaccgtctcatcgtcggtcttttccaaacgcccagacacagtgtatttgtcgtctgcattcctggtgatagttccctagatagtttgatgatgagaccatgtcagtcgatacgtacgttgaagcagaacattcagtaagacatacattgtatcctcggaaccaaggatcgatcctcttctgcggctcgcctctcataattcttcgaatattgtccacgatctcggcaggattatagttaggaatttgagtactccagcctaattgagaatcacagatccgaaaatcaacagcggtctcaatgaaggcagcagaagtacggaagaccgtatgatcggaggtactgaagaaactagactcacctgttccaataccatcggctccgttcacaagaaccatggggatgacaggaacataccactcgggctccaccgtgtcgttgtcatccgtcagatagttaagaacagcatcatcgtgaggatggaagatggttcggttgattggggtaagatttgtgaagatataacgaggagcggcgtggtcctttcctccctgaatatttgatgagagcccgatgcaagcacatcagaaacttgatttcttcctctcttatctgttgtaggatgcttactaacctctgctcgactaccgtattggccggagggaacgagaaggttgatgttgttcgatccgatataattctgggcaagcccaataatggtagtttgcagactcacgtccccgtggtgatatgcggccttctctgaaatgaaacctgcaagttggacgacctgaaggacaaacgctggtttataaatctggtttatctcccttaaacaagatctaggcgcttactttgatctctgttttcagtttctttagatagcacccgtagagcaccttcctttgaccaggcttcaggccatcgacaacagaggggatcgatcggatgttgtcagccatggagaacaagataagttctttgttgataaagtcagaatatggaatggtcttgatggactgatccaagaacgttccaggctgaaagatataattttttgtaagaattgattgacctagaaaagtttgcagccatgctgcaacgaaaagaaaatggaagagatttacaaaccttgaacaatctcaaccactccttacggtcatctgccttctttttgttgaatgcaagatcaatcaagtctcggtccccttccttgatggtatcaaacgtcaacatatgcttgcctagatccgagaagtactttttaccgtcttcagcgtcactcgttcccaaaccctataaagacatgcgtgaatacacaaacttaagtattgatgaattgccaggaatgaatagtgaacaaccaaccttcagatacttgatataccacccccttgcatcattattagcctctctccactccccgaactcgggtaaggtgtagaagtcctttactacttttcctttaactgcctatatcaacaacgataccctcaaagtcagcacaaacaggtcaagatctttcaagatataacaagtaagccgaaccctgatgataggggtgataaactcgaccaagaagccaggaatcttcagcaaggaagggtagaaatgatccaggaaattgatgagaaggcctttaatatgagaaccatcatgatcctgaagcatttcgatcgagtgagatgaacatgagtgtgttgaataataaatgtcaatatgtattgaagacaggagaactaggaagagagtatatatatacctgatcggtcatgatcatcaaacttccgtatctcaacttgtccacgcttgtgtatgtaacaccttccttcagccccataatctgcttcaaattcttgatctcctggttcttcatcagttgttctcccgtagcctctcgcacattcaatagcttacccctgagaggaaaaactccaaagcgatctctgccgacgatgtcaaacccggagacaaccatggatttggcagaatctccttccgtcaagatcaatgtgcagtccttcccgttcttcgttcctgccagattggcgtcttcaagcttcagaataccggaaattctggtttgtggtggagaatgagatttaatgttgggtagattgtatggcgacgaaagatagatgacaagctgcgtacctagctttctttccaccatcagtcttcttcatatccttctcctgtttgaattttgcccaagacaagacttcatcaacaataccagtcttgatgactgaaaacattgtcaaacttgcgttagctctggtacacaatgctcagctgatgatttctggcctacctttcttaacaaaatcctcgctgataggacatttgcttccaaaatgagacctcttggtattcaaagtttcctttgtctgcgaatcgaaagccgggttctcgatgagtgcgttgacgaagacccacatgtggttcttgatctgggagaccttgacagtggctgctttgttcttcttgagaatagggactagcctgagaacagaaacaagaaaatggccctccccttgagatgagtgaaaaaatcttttcttcttttctttgtttggggaatttaaagaacgtcaaagtaataagggagatacatacaatttttcagccaaggcggaggcaatgctctcgacatgggtacctcctttgatggtcgagattgagttgacgaacgaaacctgagtgaactcctgttcgggtgcgagagcgaacgcgatttcccaacgttcattgacttgttcgaaaacgacgctgctcttcgagacagctcctgcaccggcaccggcttccgtcgcagcatctgcggcagcgaataggtacatttccacatactggggtttttcaagaattcacgcgtccatcaaatacggcgacctcagggttagctattgtttcaacaatgaacgacctggttcaattaagagggtataggcgcgcgcatgagagagaacttgcctttttaaatccgtctaccttgagctttgttccgtcaaggaacacgcgtactccacggacggtaccggccatatcgtacactctctttgtgagcaacgaaaaggtgtcgtcgtcgatctcggtcatgccgaatctggcgagatcaggcttgtatgtgatctttgtatattcttcgttcttcggatttgcggtgatctaaaaaacacgcctctcgaacattagtgagtcgagtgtcgagagtctagtgagagcacagagacggaccttcggtttagaccgtttcgacatattctcagaaaacgtttgtacgaacttctggccggtgttcttatcggccgtttccacagctgagaggtggtcagtcgtggcatgtaaattgaggttagtaatgcttattaaaaagaaatgaaaaaaaattcgagaataaactgagacttactgaattcaagagagtagatgtttgtgagctttgcaccataaccgtttcgaccacccgtcaactttttctcatcatcatcgtaattggatgatgtcaagcttgaatcgcgcaccacgagtcatccaatcagtcggagtacgttacagataagttggaattcgctaaccggatagactcacagatgaccaaagatcatctccgggatccacatcttttccttcgagtgcatctcgatcggaattccctttccgttgttcataacggatatcgacttcttctctcggtcaatagcgactttgaaagtatccatcgaggaatcattaatcttgttgtctgccgcgttgacaagaatttcgtcaaagatcttgaagaatcctggaacaaatgtaacagttctttaacaaaaaaggcgagaagtagatgatatgagtgtttgggcgaggtcaatggagaagagctatgaagaaggacccacttataaaccatctttttggtgtttgaattgaacacccacatgtcctgggtgagagattgcacagaaccaatgtatgaatccggtcttttgaggatatgctcgatttgagatagctagagaacctcgaatgggccaaaccgcatatagtcaatcttcgatactctatcagaccgaggcaagggggttggagatcattatatggagaaacaaacaaacaaaccttctgatacatttcacttgcgctctttccttttcctgcttgcccattgttttctaaagacggctggaagggctttgaaacagggctatcgccgtcgccatcgtccgtatcggtatcttgcccagccgaggagacggcagctttggctttcgatccagccgccttctttggtgcggccttaggtttgttggacgctttggctgatgcagcagcagcgacagacttcgatttggcggcagcagcaactttctggatgaacgtccgacatggtattacaggagaagcgattggataggaagaaaacaatgcgagcatcagtcaaaccattaagctagaatcgaacggggtcaaacctttcggcgtattagccacccaggcttcacagaacacgagcctcttaggaactattgtagtctccaggaggtaatttcttactccctcttctctctggatgtggtacccttgagagatacgtttggaaagaagaaactaaagcgcgccaaaagagaaaaatgatagaagaccaacctgtttctttgccggaggagtgttagccacaaaggcatccgaatcgtcatcctcgatctcaaaaacgtcgtcgtcctcagagtcgctcatcgtgatgtattcgagagtgtgagcttgtgatagttccgctcagaagaaactgtgtatgtgtatagttatgttcgtgtgcgtgtgcgattttgtccaacaaaagaagacaaatgccttgatccaaacgaggcaagtcttgacggcgagaggatggaaaaacaatgaaagggaggacgcgtctgacgataaccctaacatgtgatgtaaccaagtcaactcggttactgatgaccgtgccagtgtcccaaaaagttgacgtcttgcctttttgactcgtcctttctatctttcgccacgagcagtcttttttgcctctcttccacagtctctagacactatcagtcatgcccaaagtaggtcgcttcgtttgttctgaggaatcgtatgttgtggtcgattccatagagctttgatttactcatcgtgcttgcttcttcttcatgtatatgtgtactgccaaataggccaaaggaaaagttcgtgttttccttcttttttcttcattctttgatctttgattcgacaaagagaagtggcaggcttgaaagaacgcgaaacggacagagtctatgaagggcaagagaatggactataagaggacaagcactgacgggatacctctcttttttctcacgtcttgtctcatccttgttttccatcggtcgatctttgttttatcgtctatcgctcattcactccaccacctttggtacggaataccttcattcgactacctagggaggaaagaacagaaggagaggaaagaacgaggccgatgaagataagcgagagctcgtcttcaaggaggacggacagggttcgtttatcttcttttttcctctctcttgtctcatctctactcctcttctttatcccgtctcttcctcgggagtgggctttctgttgggttctcttttcttttacgcagatgaagctagtcgaatatgtttgctggagttgcgatccatccaccttgcgagaatagttcctagaagcgatctcgaagttatcccgagcctattaccagaaatataggtcgcgtgacgatagaaagaggaagggaaaggaaaaaaagaaaaaagagaacgaggaaaaggaaacggaaggaagaacgagaaagaaggaggaaagaatcaaaagaaaccgtttgagaatagacttcaaacgctaacacctctcatgtacttttcttgatcttttcagagtacgcccaggtccagaagatgctcggaaacggccgagtcgaggcactgtgctttgacggagagactcgaattgctcagatccgaggtcgactgagaaagaaggtgggttgatagaacgaatagagggggtgattacagaagaaagaagaaaagtcttgttcttactgttcttgcggtttcctgctctatataggtctggatcacccagggtgatatcattctgatctctcttcgagatttccaggacgagaaagcagatgtgctcgtcaagtacacttcagatgaggtgagttctgtttaagctctcggtgggcctgaggcacaggatactgactgaatggatttatgttcttgccactgcaaataaataaaaccccaaggctcgaaacttgaagaactacggagagttgcccacgacggccaagatcaacgagaccgagacgttcggtgatgacggagaggacgacggagtcgagttcggaggagattctgatattgatgacatctagattccgctttctcctttgtcttttttcttgttgcttccgttcttttgttttttgtttaccccaaaactccattcatgctttagtttgagggcgtgtctgtccgtctcatttctcacttgtcatcgatgcatttgttgaatctttcctgttcgtttccactttaaaactccctggcctgactatttcctcctcccttcttactgcctggataagttgtctcgataataagccacgtcttttatgatctttccttctcttgttctctgtctctcattgtagagagagaaagaaatggaaggaagaagagagacaggagggaaggaacaaggtagagggagaagcaaatgagggagaaaataaggcaagaggtagaaaaatccgaactcatacatgacagaacttgggaataatgagtaatgtttacaacattctcggatataaggagaggtaatgatcttcggcagaaccctaaccgagaggatcttccaaattagaacggccctagaaggagactcaggaatacacacacgcacacgcacgcgcacgcgcacacagagaacagagcaagaccgttcgaagagagagaagcaagatcgttccaggtctcttccgtttcgtcccctatgatgcttcaaacaaagagagcaaaaacaccagacgcacggtggaggccaggtaggcagctggaggaaagccacgtgacaagaaggcatcacttacctaatcaacaactcaaacacgttcttgaacttatctactgcgcccaaggagatttaaagagagagactgaacgtgcccagagataaactgacgaacgttcctaaatcgccaagtctcttctccctttccccttttttctctgccctcacacggcgtttgctcctgtttccctcattttcggttttgtttaaccttggctttggacactcactcgcggcttaaacccccatggatgacctactgatcagcctcataggcacaggcacctgctcagacacctcatctacccacccacctactgaccgcttactgctcacgccgttgttactaaaaatagactgatgcctctctggctgtctcgccaaagtctacgcgctctctctctgtgcacgtcttcttccttccgatcctcttcgcttcttcgctcctcgccttctcttttcagatcatcccgctcgtttttctttgcacgttgcaagacggattatatcaaacaaagcagcgcaaaaaattgattccaaggcaaaaaaaaaaagatgccacacgatcgattccagaacggactcaattgtgctataagaactcgttaagacattctgtttcctcccttcttctcttcttatcatcagaaagcagctcacctctctcagaaaggctctacccaaaccctttccttctgcctcttttagttccctggtcgttttctccctctctccctcctcccttttctctcctccccatcttcctatcaaaatgtcgaccgacatcgagtacacctctgatgcgcacaaagagtccaagttgggctctgattaccagtccccggagatgaagcgtttggctgccctccgagagctcgacgaggcttcgttctcgtgcgttcttctttagcttttgttaaatggcgccgaatggttctcagctgactgactggccctttctcatcgttcttattattactccttttctagttggttccacgtcaagacctgtattgtcgccggtgtcggtttcttcaccgatgcttacgatatctttgccatcaacatggcctctgctatgatcggatacgtctacggacacaaccacgccctcaccgctaaccaggatctcggtatcaagggtacgttttctgttatctcgcgcgccctctcttggttctgtttctcttccaaccctggatgctcaccgtgtgtactctccgatgtctccttccagtggccaccccatgtggtaccctcatcggtcagctcttgttcggttacctcgccgatagggttggacgaaagaagatgtacggagtcgagttgatgattatcatcattgccacccttggtcaggccattgccggatccggtccttccagccacgtcatcggagtcatcatcttctggcgattcatcatgggactcggtatcggaggagactaccctctctcggccaccatctcttccgagtttgcttccaccaagatcagaggacgaatgatgaccgccgtattcgccgcccagggtttcggtaactttgctgccgccttggtctcgttcatcgttgtttccgcctacaagaagcagatcctcaacgacagcaccactgagtactaccacattgacgtctgctggcgattgctcatcggactcggttgcgtgcccggagtgattgccctttactaccgactcaccatctctgaatcccccagatacactgtcgacgttgaacgagatgttgccaaggccgctcaagatgcccacacctcggtcaccaccggtacctactacaacgaccctgatgccgtcgtcgagcgagtcgaggtcccgaaggcgtcccgaagggatttcatccggcacaactccaagtggtcgaacctcaagatcctcctcggttgcgcttggtcttggttcgcgcttgacgtcgccttctacggtctcggtcttaactcgtccatcatcttgaccactatcggctacggaggagccgcccccaagggttctacccctcagttcggtgcttggaagaagctccacgataacgccatcggaaacatgatcctctctgctggtggtctgatccccggttactggttcacctttgcgttcatcgatttctggggccgaaagcctattcagctcatgggattcgtcctcctcaccatcatcttctgtattctcggtttcggttacgacgctctcctcaagaccgcttccggcagcaaggccttcatcttcttctactgcatggccaacttcttccagaacttcggacccaacaccaccaccttcgtcatccccggagaggccttccccactcgataccgagctacctcccacggaatctctgctgcctctggtaagctcggagccatcgtcgcccaggttggattctcccgacttaaggatatcggaggaaccggaaaattcgtcaagcacatcatggagctcttcgccttcttcatgcttaccggtatcttctccacccttctcattcccgagaccatgggtcgatccctcgaggatatctcaaacgagtccgatgaggactacgtcaactcctcttcccacgaccactaggcgcctggtgtttactctcttttcagccacagttttcttttctaatctctttccggtgatctctatgcttcctcttcattacttctacaataaaacatctgaaataaaccccactgcatctaatcttattttattctctttttccatatttggttcattgtaaaacttttgtttgcttcttttttcttcgctcgagtgcctttggtttcgctctttcattttggtcatttccttctatcgtcgtttctatttttgaccgggtgcacatttttacaaaaagtcttcatattctataccgcttagacatgagtttttctctcccttttctttggttacaacgatctatgcagccaaacaagacacacgttagaaaacatggtcgttcacaaaaaggaaaacaaaacaagagttcaacatttcataaggcgtttgttgtcttgacatgtatccagccagccttggctgtctatttttttgtctcatgtttatcacgctgttacccctatcctcgatcggctgagtccgaaagcgagtccgggagtagaggaaaaagaccgtgatcgggccttcgtcggtctgaagccctttgtaagatcgtattcacacccatcacctatcttcttctggtcatcatcatgttcatctaccggacaagcttcatagatcctggctgattataagtccctccacgtctcctcccaaggaaacgtcaagcagggttccttgaccaaaccggaccgatatcacacctaactgaccagcgaaggaagactcttccttgatagttctcttctttggcttctcagcccttgttcttggtactaaacataatgacaacgacaacggcgataaggatgatagcaacgatgacttttgaggggaaaatttgatcttccatcgaggctctataggatgtttagaggattaagatatatgcgctttcatgcgtcgacagacggacagagcgtataggaagaaggggaggaaagaaaggagggaaagaagaatgaaaaagaaaagagtttgtctagatatacagtatagttcgccggagaaaggatcaggacaaggaaagagttaatgagagaagaaaaagagaaatcacaagggacagatttatctggaagagatagtgatagattcaacctgaagaaaaaatcaacgaaaacatggctcgtgcgaatccaagatctatgaagctcgttggtcgtcgtggaaaagctacaaaaaagagagacagagggaaggagacagccaaaaggggaacaactcaaaagatgatccttccaaccggacgatctatcacaagaataaaagagagcccagctcgagtattcggaagaggtgttttacttcctgatatttaacccaccgaactggctaatcatccgttgggtatgggcctgcatatcccgcttataattctttatcggcttctcctcttctggtgtaccgatgttactattggtgagcgtgtgttccgtcgggtacacctgagccgccaattcggaaggctcagagtgttccgacggagagggagtcaccgtggatgccatcgactctgactcggttgatggagaccacccaggagacagttctggctcgactggaccagtcggctcggcctccaacggaggaagcgaaggaggagcgatgatctcgtcttctgctgcagcggccagcaccttgtgtttctccttggacgaatcaatcttcttccgagcctcactcgtctcttcttccggtggaacggtcgagtccgggttgagagctagggacgtgggatcagaactggcgctggaactagagttgaggacggagggcgatgggcaggaggttgattctgggttcgaactgttatcctctggttcttggaccctaaatcccttgccggtcgaccgccggaccagaatcttcttcaatggagaatctgcggcggtcaagggcgcatcagcggaggcgttcgagggcgcagagtttgtctcattcgaggaagagttgtcgaccgaagtcaatgtgctcagttcatctctcccaaatgcgggttctatgttggaagactcgacagatggtgttggaagaggagtcctgttcgaaggacgccagagaaggaaggaaaaaaagaaaaagaaaaagaaaggaagaagagaagaaaagtcgctcgacggttagccagacgaataacaagaaaggcgtgcggaagggccgtgataaagagagacgtacggtcgataacgcttcccaaggttaaacgtggtgggctgatggatatctgatggagatccaggggatccagggatgctatttgaggctggcgaactcaatggctggtcgttagatcctttggtggagttgccggccgtggtagaactcgatgaaggaagcgacgagatggccaaagattgtttcaaagcagacatgactggagaaatgtgagttcaggcagagtttatggaagagcagatgtgtaaggctttatgcgcgctagggtatacgtgcacacaaattgggtgttgatgagttctgagtgttggagagaaggatgaggagagaaaaaaaaggtatcgctttggatgtaagagtgtgtgtgtaaggcgtgaggctgcgcgggtccggataaactgcgtgcggtgacatcatcaactggctttagtctttacgcagtaaccccttaaaggggctaggctcttctgaacgtgtcatgctgttgtggtcttctgtgatgggtgcgtagtaatcttgtggcctgcttttgtagtgtgtttgcactatgtctgtggtatgtttgtagtacatccttgagtcgtctctctgctacatctatgcacgtggattgtagaaattctatcgatttctctgctccctaacctccttttccttgctttctcccacacacgcatatacgcatacacacgtactcactgatcaagaagaataaacattcatctactaacacaaattccatcttgacaaactccctgtctacatctcatccttcgaagcaactgtggttattgtcaaccggctgtgtcaatcgtccaacgctaatcttgctctgcccaggcttagaagaaccgaccgaccgactgacctgactaacccgactgactcaacttactgacaaacagcagatgggttcctctcagcgtcccttatccttctcatgggtcggttgcctatctctgccgagcgcatatgaaactgtgcccccctggttcctccttcttgccgacgttcctgatggtcactgttttcctcgtcaacaaaggaaccgttcgaccattcggtcctactactttcaaaatacctcttaaagggcgaaccagaaattcccttcctctccgttatcgttcttcctcttcctcttctctgtcctatacctcatcgctgtcttcttacctcttacctcttacctcgctctctttctctgtgtctgtctattccgaccagcccactttcctttttgcttcttacgaaactacaaacaccttctctctctctctccacactctcatttacataacagaccgtacctgataaccatcatgaagattgctatccctatcgttgctttgacctcgcttcttgcctctgtcgctcatggtctccgccctacgcccaacgaccttcctgccctgatggagcgaaacacggtcgctgtcgccgcagaattggacatttgtgttgtcaccaaggtatgccctatttttcttctgaattccaattcaggcactctaaatctgacctatacccctccgatcacacaatgataccaggtcgacattgctgctcagctcactgccttactcgacctcgatcaaatcttgttgactctgttgggaatctctctgcacgtcgacattgacatctggtatgtcttcatccgttacctctactatatccgcatcagtacccgataaactcaacatatgttcgtgttcatggtcctgctgttctagtttgtgtgtctcgctcgtcgccggtaggtttccttctttactttattgatcctagatctatccgaaacaatgcagttaattagtacagtgttaacactgttgaatatctcacccctcggtcgtctgcgcttcatgtgttggttactcagactttgtcgcctccgacgccactgctcagaagttcgtcaaccttctgacccagaagaaggggttgagtcagttggctgccacacagaaggtcatcgacggttacaccactatggtttgtacagaccctatattcatcttcggtgtcccgaagctccgtcacgcaggttgatgtgggtatcccatctaacaatgatgttcacacacgcttctgcgccgcctcgtgaatacaacagatcaaaaatcaaacaaaaagacagacttgtcctattctgacccgaggaactcgagtctgcaatgccaaggggtcccaaatctgtggggtcaaggttcgttctcccatatcccatatctgcccttggatacgacgctcacaagaacattctggcgtatgtctctcatagtgcccggctggatcaacactcaacgcttccaccggtgtgtgttctacccccgctccatccgctcgggcgcttagcccagacagaagggctttccttaggcagcgggagctctgcaaccagcccgggtttgagctttgcccagtcggggggctcttgcccaagggcaagaccccagtcaatggttgggagtgtgtcaacactttcaagggactcgagacttgtacgtcaactatctttcttctgtttctcatgaggacacagggtagaacaagaaaactcgttctcacgtatgttggttctttttcgatatttaggtggaggatgccctgcttccgatgagcttcttgcttctatttctcttggtgtctcggtcgctcctgtcagtctcggagtcgattgctcggtcttggaaggtgtttccacgtaagtaactctatcgcgactgttaagcatgagaccgaacacatctgatacctctctcaatctaccaccgatacaacgatagtgtatcttgctccgctggagtttgcgctgtggaggcttggtgcgttcattgacttgatttaaccggatccttttgctttcagtctttatgatcttatcaactaacttaactttgtgattgaccctactatcagtgtttccgactcttggatcctttctgacgatcacacctcctgcatcgcccattagatcatcctcattgtcgcttccgatctccgccgcctatagtcttgtctgttccttcttattctcgtccgcgaaattgatgtcctcgcctatagtctacacggccctgtccttgtaatcctcttatttatctatcgtcactctcttgtattcggctatccaccatcgatcgatcatcgattctggccggccgtgaatataccctccttccactcgtgtctctgtctccatcttttgtctaagagatgtcatctacaccgagcgtatcttttcctttcctttccttttaatatttcatcttacatcattcttctttccagggaagacactacggattccctaggttttgtagcattctctatcgctgcacgtctcagcgctttccttaccccttcttccgtctgtatcgttctctcatgaattctcttttagaaggtagacttttctttttcttgctacccattccgtttacttgacgagcggattacgaacaagcagaaatgtcggacagatcaaaaagacggacagatgaactgtgactaagtggttctgaagggaacaagaatcggcaaagaatatggcgactgagttaaatttgctggcgcgataaagaaaaaaaaagaaccgagtacacatcaggaccaaagtcgagaacaaagggaacgaagtcttcatttatttttgatagtggaggaaatcagagaagacgagataggcgatgatataatcccagaaggaggtttgaaagacccaagaaaagagacagaaaacgaaaggaagaaaggttgttgaggtatactagagcgaggaagcaaggcagaaacaagatcgatcaaagaagaccaagaaagcggaccagatagaacgaagaagggatgagaaaagtgaaggagtagaggaacttatggaaaaacagcgagaaagagaagtttatcaaatgaatgaaacaatctggatgttgatcgaacggtcatttcttcttctcttcagaggttgctgccgccatcgctgtcttcgtaggcgatgaaggggttggaggcccaagaccaggaccggaagcaggtgtgggagaagctgaacgtaaggaaggaggtgtcacgccaggaccaagactaggaccgaaaccagatcccgaaggttcaaaccaccccggacttggttttctcgttgtccctcctgcagaacctccattttcataccttccagtattataaaaagggttgctcgcgttctgattggcgttcggaggttggtgaccatgattagaagaagggtacgtagataaactgaacccgccagcgataggatgtccgtttttagaatctattccacttgcggctgggccggttccggagggatggtgatgaatcggttgggaagaagatgaagatgtcggcgcagtagtagaaggaggaggggttggacgtgaaccgaaaggcgaatgcattgggtggtggtgatatctgaaggattcttcctgaatagccgatgttggatacgtcagcccccatgaatgagttcctgagtggatcggaggaatcgggaagtttgcttctgggtgcggatgatttcctaacgtggcggccgactcaaacaccccgccaggagaagcgatcgcgttggatctggaagtgatatcgagcggagtaccgtttccaataccaattcgtgaagtcgacgatgcggtcgtggacgaagaagggaactgaataagcccctcggtcattccaggctgaagagcgggccgtccgagtgagccagaggagattggtcggacgggtgtgtcgtcgtcgaaccaggtagaaagcgaggcctttcgttgacgatcctctgttgcttggtcggatggcgtattaagaaggctcatgatatttatacctgatcgaggccgtgactgggaatcggaatcggctttatgaaggttcgcactgtgcgggtaggtgtagaacgtaggttgggacagatgcgacttcataggggtctttagagaaaatgaaatagaacaaagttcagaaagcagaaggttacataagttttgtttccaggattttagattgaatcgaaagaaggttgagccacataccatctcgtccattccgttctttacacccattgggagactagaaatagcaggtgccgcctgggcaacagcttccaaccctagggcctcatgattggtgtgaaagtaatttctgacttgaaccgctgttttggcaccccccaaatactgcgatactgccgtccactcttttccaaactttgctagaccttgtaggaagccagctttttctgccgtcgaccagtaagagctgaccgtggctttctttcgttgggctttatcctttcctggtccgtctccgttggcaacctgatcgagcgagatctttcggttctccctatcggcccctccaccaccctcaccattagtgggcttcttccgagagctagacaccccctccaaccctggtttccgacgtttctgtttcttccgagaagattccaccaaggacggatcgttctcaacctgatgggctggcccagccaaagtagcgagcaactcggcagctgccaatgcgtcattacccgaagaaggttccttattaagtgaagccacatccgccagatcttctaaagagagtcgactgttcgacccgttcggttgattcgacgacgagacacccagcttagagtccatcaagcctgcagaacttgctgtcatcaaagattcagtcgatgtccccgctctgctcttttttgctgtgggcggacgttcggacacaggcgtcgcaagaggggcttcgacaggggtgtttagcgcggccgagttatctgcctccccacgaggactagccgttccggacacagtgtcctccctagaaggtttcgtccgtttgtggttgaggtttgcaagcaaggaagatcctttggtagcagctcgtcgaccacccctccgcttgtgggcacctcctcgctgcgcgacaatcgttcggtaatcgaccgtcttcttcgtccggtagtagaagaggacgcactgagaggccgtcttgtttgataaatggtcggcgattttacctgtaaaaataataagacaaatgtgatcagccaagaaagaaagacgaacaggaaaaaaaagagaagaacgagactaaccaaactgcttcggatgggatgcaaatctcttctcaaagatagctctctcctcttctgtccagacatccggggactgctgaatatgaaagaagctttctggatcctcgacaagacagttcgaatcatcgtacgaatcctttgttcgctccatatcatcaagaatcatatctggcacctgaaccgtcgtcctggccgctcgaaggttaggatctctataatcagcgtcttccaatgaagcgaggatcgactgaaattctgcttcggaccgaaccgaatcggctgcaaagtatccaaggtcctggttgttgtttctcgtcgatctagatcctctggacggtcgaagatcatccaagaacggaacgctgggtgtaaggagcgcgccagaagaataattcgatgcacgggcgaaagaagaaccagtcggttgctgtttcgatcgttgtttctcagacgcccgctcgagtcgtcgacaatttgtctgccattcatcattgaacatccgatattcgtcttgaagtcgtttgatcttggtgagccggctttcagctgaacgttgaagttgcgtttgaacatatgaccgaacgttcgcgctctccgtcctcgaaggccgtccttcaaactcagggagatccaaagatggttggcgatgtgaagcagagtcggcctcgagctcagacgatcggagcaacaatgaaagttcgggagacatctttttcgacaagccaggttgagaagaatggttggataccacgatcgttgcatttaattcagcaagcgaacgttggatgctttcgccttgaacccgggacttgatcagtgcgtatacgtcctcctcgctgagtgactctaccatcttttccagaggtatctgagaaagatcaacaaccttactctcctcttccttgtctgtccttttcatcccttccactggttcttccgtttcttcctcttccaccactataccttccttctccgcttgctctccattcaccggctttgaaacttcggcatcgaccataggaacatcaaccgggacggtctcctccatgacagcattcttcgaaacaacgagtacctgatcgccaacgatagtcgcctgtccgccaagcggcagcgccgctgttgctgattcgctttttgatgacagttcacttctagatacctcgctcccggtcagagacgggacatctaagacgacagtagagatcgagctgcttgatgggtcgttcctattcggttcagcatccaaagaagaaggcggcagtggcagtggcgatggtaggggtttgttttgaatcgtggaagatacagcctccttgatgatggaagaagctagagggacgactttgtatggttctgagagcacaagaggtggtacttcagaaaccatagatcggtcggacacgatcgccgggagaggagaggacgaaagaatggcagatggggggtatatcggttctggggtaggcgacctgggcgattctatcacgtcggacataattgtttcgtacgattcaatggcaaccgactcgacgttgacgttgctctcatcgtctcggacttctccttcttccatctcgacatcctctaaagcaactgtcgatggttctttcaccttttcctctttttctatctgtacgacctcttccttcctaactgctttctgagatgaatcttcttcagtaggctggttcgtgattgtctcgctgactagtgagaccggaactttgacagcagcagggctgacaaccgagaaatctgattcgagaatatccacaggctgagctacttcatccaatgaacgctccttggactttatttcgagttcgacgtatagagatggtggcgcaggagggttctcagacgatgggtgttcaggttccgagaacgatacggataaaggaggggtcgactgcttggcagagaccaagggggtcgtctgaagatctgtcggagcagatcgaggcggaggcgaaggcgaaagtgaagacaaagttggcttttttgcaggagaggggacagacgatcttggggttggctcttcagtctgctccaagatcacaggttgatgttcgacctgcttctgagctagcccattcaaggttgtatttgggatttgattatacggaatcgctggtactaaagtcgtcaggattggggacgaaaatctggaaggcctctgtcgttttcgtacaggagggacgatatggcttgtcaagattgatactggcccggcattttcagatttcggtataacctctggtattgtagatgtaggtgcaagcgtaggtgttagtttggacgtggacgtaggcgtagacgaggatgagggtgaggatggaagcctaggctgatcgactgaatcctgagtcgatatcaaagactgttctgcagctggcgctacgatcgagggctcggtttcttgaatatgtccctcggcggttgaagatggagagggaggagaaattgttgactcgatgggcagatcaggtttgagagctgaatcaacatcttgaacaaccgggtttgaggtcaagaaagcaggaggtaacggctgttgtgatgatgaagatggtaatgttggagaaggcggcaaagtggccaagacgacctgtacatcccgctcccttttaactttgtcctcagtagaccgggcagcggtatctcggtctacttgctctttcttctctgcctccatcccatcctcgccctcgccctcatcctcgtcctcacttgcacttgagtctacaggcgcgcgtttcaagtcaacccggtccagcaaactcttcctacctacggtcggtggttttgccgttccatggtttccgccattgatatttggacttttggcaagcgcgaaatcttttctcacgggtgatggagctctagaccattgacccggtcctgggattctcttctttgccggcggtggtgaaatcgagttcgatcttgatcttgatcttgatctcaaccgtgctgatttatcgagttctagatctggttctggatcggtatagtctaatgagatcgaggcatgtctactacgaggggacggcggtcgagaaggtaaaggacggaggagcggagcttgtaacgaaaggcccatcggaccagatccagaattgatgttggtattaggagaaggagcggaagatattcgagagctgagatcccgtcggatggatggcatgtcaataggggtggaatgtcgagagctcaaaggaaacagatcgtgtgcaagatgaggaggaggctgtcttgatgggagagaacgatccggtcttgaatgattgaggacaaagaagtaaacaatgagcgagatgcgatctggaagatatgaagaagagaagaaaaaagagaaagagtgcaaacatacaagtctgcgtccgaccaggcgttcttctttcgatcggcaggcacgcttccgaacctggaccgttctcgttctcgttctccagacgctccgaccttgtccgagtcgcgttccctttgatctcgttcttcggcctcccatgaatctctttccctccatcccatactggatgacccagtgttcatcattcccatgggcggtctactctgaggcccggccggaagccaggtgtctctttctcgagtcgtcagcggaccgggagcgacggagccggtgatatcatccctgtcgtgatagccgacgtataagcgctgtctgggtcgattactcggccctgcctggggaacggcaatgatctctctcgccctcgagctggcatcccggtcacgatctcggtcacgatctcggtcgcggtcacgatcccggtcgcgatctctgtctcggtcccgaaagtcgccgtatcgtctgcctgcacctggcggagagaagtttggacgttggggcaaggacgggccggcggcaacaggtaaggaggagggaggaggagggtagatctgtccaccgggtctggatgacggttgggagcgggaatgtgtatggccatgggccgaggaggaggacggatgtgggggaggagaaagcgaccgacggtgtatgaacgaggaaggcggtggagggaggggatatcgacctgaggctcgttcgtggtaggcgggagaagagtaggaattcgatccattgacggtacttgccgagctgaaggagcgaggatgacttgatctagatccaaatgaagactaaaaaggggagaagaggaaagaagaaggaaaggcaggcaggatcaaacgagatacgaattgaagagggagacaagggaagtacattaggcttggtgtccaaggggaaaagggtgcaagaagaagaagaagaagaagataaaaaggcatatacatagagtgcggaaggacgtacactataatcgtcctttgaacgttctggtctgtagtccccgttggaataggtggaccacctggcagaagacttgaagccaccgctctcattcgagggtgaatgaggaggatgggccaaggaaggaggcccggaatgaaatcgatgtggagggttggaagacgattcatacgagggtcctccgtatggatccctgcttcggccccaggagcgagaaggcgagggcgacctggatgccatgctgaattggaggttagacaagaaaggaaagcaaggacggttcgttagcgagaccgagtggattttgtagataggatcgaatgggagtatgtgctatccatcatcttaacagctccaagattggataggatcgtcggatgagagacctggccgaagaaaaaaaacacgaatcgactgatcgtgttttcacgtgtcaaacaggaccgaacacagcagaacaacagacctggccagagacagacgcgttgttgtatgatccgatgttaaaccggtacggcaaagcagccggaagacgacgagattgaagaatcgaagagaagaaggagagagaaagaatatacagagacgaaaaccaaacgacacgaaaagaaacgaaccgatgtgaaacgtcaagagcgatagagtatgagtttatagaccaacaagatacagatctgctggcatccaggctgtgttgtctgctctgttcttgactgtgttgttcggaggattggatgagaagacggatgccagagggatgggatgggatggatgtgagtgtttgagaggagcgaacagagtcgcgtatggaaaacgagcgaaccgagggattacgaaaagagactacaaaacggagcgagaaagactatggagtgaataggcgagtgttcattacggttttcactacaagagttttctattcagactacgaaggcgactaggaaatccgtacagaacgcatcattacgaatcaagactacaacgtgtgacagaagacaatacagaagttcgtagtgccagtcatggttacagactgacaacacaaaaagactacaaaactgttaccaaaacactacaaaagtgtcacgaaaagactacaaatactctaactagacaaagtcactacaaaaaatccgacacagacactacaaacacaagcaatacaaaacactacaaaacactcctagtcccattcgtagtacgtggacaaaaatattacataactctttttttttcttgttgccaccgaggcgtaccacccatcaccttcttgtttccatctacatccatccacatccatccacatccacccacatccacccacatccatcctaaacatcatctcatccacacactctcccactttcctacctcaaacttacactcacacacaatggccagcatggatatcgatatgagtctcgacgaggtccatccaattctctcctcccacagcttcgttggcccgttcactcacgtcctgcctcctctgtacactttccatctcgttcttccctcgtttcaaatccctttccctttcctgggacaacatcattagatcatcaccaccaacaagaagtcgaacaacagacgaaacggtcgagccggcggtcgggctcccgctaacggaaacgctaaacctgccggtggagccgcccgagaacggtacgcaaaggacgtaccgactaacaagaacggtaacgtccagagtagacagcaggctgctgctgcccgagttcaggcccagggtgcagctgctcctgctgctggtgccgatgcttccttccacgctgtcaagatcatcatcagcaacttgcctctcgatgtcgacgaccaggccgtcaaggttcgcgttttttttctccctgttttttttttctctctttctttctcttcgtgttttctcctctctcccttgcgactcattctgacaatcaaggttcttcctatcaaacaggatttgttccagtctactattggcccgaccagggagtgctacctcgcgtatgacaagaacggcaaacacaagggtgtcgccactgtcgttttttctcgaaagggtgacgcccagaaagctttcaagacttgttagttcccggtagccatcttttccctactctctgatcaaccctgacttgttctttcccgctttccctcctttcccttttctttgcttctctcagacaacaacagacttgtcgacggacgttagtagtattttctttctctcactctctcttttctggttctgctcctcttttctccccccacatgggccattcttgtcgagaaccttttgtaccttccccttgtggcgacgacgtgccagacccataacccaggcccagttgttcagcaaccgcgtatacgccatctatcttgtctgcctcaccttcaatctaagaccttcctgctggccttggcaaagccttttctttgggttaggttcctggtttgaacgcctttggtcgcttcccagtaaaaagtttcgcatccatctctggaagggcacgtattctcccttccctagacaactcgatccgagtggcctggttgccgtcactcgttttcctttttcgagtgacttgaaacccggtcttgagcgacagcctcgacgatcgtgcctgtctttagacacgccggtcggttggatcgagaaaaagactcagagtaacccggcaaatgatttccaggcccccctttcgatttttagtttgatctccgcttgccatttgtcgcttttctcaacatcctttcgattcttcgcctttcgcgatttccgatgacaccggctgatcgctcctcaaacctgtccctctgcccttcctcttgccgttctcccatcttgtccctcatcgttctatcaacttgacgacgctgcccaatatctccttcggccaacggctttccgacctctccttcgcttccttcgccactcgaaacgtatccttgatgtctttcctaaacaggaaccccgatgaaggtcgagcttgtattcgctaagcctcctgctgctcccctggccgcccgagttgccactcctgtcgctcctgctgccaccgctcctgctgcgtatgtgttaatgtttacgtttcttcgttgttctttagaaatacaaaaggctaattcgcttgttcactcttttttattttattttatgaacgagtagccgacgggaaggaggaggtcgagctggaggtcgaggacccaaaaagtctggacccggagctaaggcagctcgatcggacaccggtcgaaggccgcaaaagactcaggccgagttggacgccgagatggaggtatgattatctttttctttttttttcctcctgtattttcccttttcttctcgcatgaatgatattcacatctttgttgctttctgtgttatcttaggcttggtcttcgaaccagaacaccgagtccgccgcttaaatcttgttgttgttcggttacaaaacgttcaaacatctcgttgtcgccttccttgctctatgtcctttctcctcttcagtttaatttcctattgagttttcttttcattcttatttttggtcatcttgatgtaagaacctttgtgtgtgactgagcagagtgcaagacgaccgagagagtattgagtacagagtcaagagtcacaaaccaaggtagaccgaagaggtttcatcgggacggagagaacgaggtatcaacagtcagagacctcatggcacgtcctcggtttgacgaaccagtttcaaaaaaaggtaaaggtcatgtgtagaaactccactctatctctctcttcctcctccttctcctctcctctgctccccctcacctagtctcctctgctttccttggtttcaaccctatccatcaacactcgctccccattggaagacggttggaagaatagatggaaggcttattccttagcgtcggggttccacttggcgactgtttgagagaaatcggagaaccgggagagagcgagaaggtttgggtgttttaagatccggtcgcgtatcgagtttggattgagatgaggggtgggtcagcaagaaaagaacgcaaaaagaatgggagggagaagtgataaagtaaaaaaaaagatgaaagatggtcagcaatctgaaaagcacaaaaaacggcgtcttatgaaaagattgacacaaccctccatctgtccttgagtctggagcatcgtgtagtgcaacccagcttttccttgaatgggaagacttgttgataggaagggggaaaaaaggaaggaagactactaacaagtgaagaaagacttgggaggagcctggggaggaagatcgtactttgccctggtctcgttcaactttcggttctcagcggcggtggcgacgtagcacgttccgacccagactattatttttaagcgtcgagagttgagagcagtgtcggatcgggttgaattataaaagcgaggaattgacgaatcgcaagtgattttttgaagaatcatcccgaggtgatgaagagaagatagagggataacgaatggaagaaaaaaagaagcataggacgagaaaaagagagagaacatgttaggtctagcacaagtcaaacgaaaggtgtacacgaattatcgatggatggatatgctcaaagaaaggaagaggaggaacttgccgacaaagagggcggcgttgacaggcttcatctagatggttgggttgaagaattgatcgttccatgggaaagacaagcaacatgattagctgaagggtaccaaatcaagaatacacacgtagtgtagaactagcaacgagagctagaatcatcgtcatcatcctcgttctctcatctcttcctctttttcctcgctttcgtcatcctacgaggaagaatgaggaatgtttgattttataaaaggaaaaagatacgaaaaaaagaagaaaaaaaagtagaagacataggaaaagagggcaccaaacgataaaaacaacgacactcacaaccttcataacctttcggaggtcgaacgctccatcgaaagagtgagtagcactggacattgcaaagaacagactgttttggtggtgtggatggaagaaggcgttcgtctgtgtaaaggccagcggaaaaaagaaaggcggaaggaagaaatcgtaaccaacgtatgtaaccatgcgccataacaggcagcctgcacagcagctgctgacgtaagtgatcgcggcgaagcctcatgcaaaatctaacctcacgtgtacttgtcgccacatggttacgcagatgcacgtcccccctctctcctcctagcatgctacacctcccgctagggattccctcatcgtctgtcaatcatcacggagagtatctgatcgactacgtacgtgcttctccttctctatctgtgtgtgctgcccctgatgctgaaggacagagctacaggaggccgaatcagtgcagagaaacgatctgatcgatgttttcctcatcttcttcggcccgctttcttgtgtgtgccatgtgtgtgtatgttgatcggtgaaaaacagactatctcccttttgcccgtgctctgcttctccttctggcattctactctcttcctttctctttctctctgtctctctttctatctcaacatccagcctgggtcggtacttcctcgagcatcctcccaccagagccggtaacaccaaactttgtgcatcaaaacaagcttggtatcgaactttaaatacaggtcgggaccgcatataccctatcaactgggctgcctcgcaaccaaccagccagccagccaaccaatcagtctatcaaccaaccagtctctcgtttggacctttcctcctactcgcatccgttcttcctcttcttcagccatcatccttctctagctactcactcatcgctcgtcacgatggctagtgcatccgtctcgcgcgccttcttgcctgtcctggccgtgacactagttgtccttcctatcgtgcaagcctttacctttacatttaataatacaatcccatccgtttgcgatcgtgtgttggtcgagtggtcaggaggatctcctccgttcaagctactcataattgtacgcctttcttccatatttgtcttctcggtccgaccttgtgccatgtgcgctgagcctctttcgtcatctttcgtccttacactctacacagcctgcgtacgattatccatccgaaatcacgttgtccaattcaacctgggatagctcagattcgacagggtcatatatttgggatgccaactatcctgttcgtctgttcctatccttccgcttgataacatccccatgaggttaactatgcttccttccctgttcctgatatatcctactctcgtccaaactttgccgcatcctgatccaggttggtacaagatacgtagccgtcatgtctgactcaaacggtcttgccacaggaggagtgtcaagcattatgaccattcagtcaactccccagacagaaagctgtaccattaggtccgagaaagctgacttcttcttctatctcgatcccgaaagcggtagtgtcaaccaatgcgatacttgtgaggatcactcatcctttcctttcctcccagtacgcgcgcatgcgtatcgtttggctcattcatgagcatttgtcttctctttttctcattcaaaagtgggcatcggctggacaaataacgctaccaacccagttcaactgataggttcgtccgaccgtcttttctttcattccctctttctccttctttggtcgctactgatccgagctgctcgccgtttcttctctcgtctgattactgttcttataggtgtaatcccgaacggaaacgcctttgtccttccagctacagatctttactggagtaagcatttttactctcttcactgccttcgacgaactttctctgatcgtcccttcacttctcatcttcttctcgcaacaaagactggactgtcaacattcgatcatccaccacgtacatcctcactatgcttgatgcgggaccggttgggaacggaggatcctccaacttcctcacagtcggctcaagcacggacagtagttgtttagacgccgcttcgtacgttatctctactctcgccttgcttacacaaccagattccaccccgatcgactgatcatgtcgaggctatatgttccttgttcttttctttctttccttctttcttcgtatggaaacaggccatcccagacacctggatcaacatgtgagtgctcctccgtacatatagtccgtgaggaatgtaatctgctaacacatatgtgttcgttttattgaattgtccataagggggaacgcctgaaggaaaggctgctactactgccaagtacgtctcccttctgttgttctcccctttcatctggccaatcttcctagctcacacaaacatcttaatcttgtttgtagagctccttcttcgacaaagacctcaaaatcatccgaatcaagcacacccagaaaaggaattgtgttcagtactggcgtcatcgccggtattgttgtcgctgccttactaggtcttgtcgggcttcagctgttcatattctggtacttttgtggcaaccggttcagacgaactttggtatttgataagaaacatgaaggagacgtggttggtcaacctgttacttcgagcggtcgtcggaaactcttcggccggaaagatggagatgtgtcgtcgttccaaccagacccatacatcgccgatccatcgccgtcaactccttctggatccaatggaatggggcctaagaacggccgacgaaacttgctcctcctcgatgatggtgatgagacgggcgagagcaacgatccgttcacagacgaacagggttacatgtatcctggtagtgcacgcatgtaccgaagggggtcagaccaaagcgcgagtgggaactctgacggtcatctcttggtaggcacagaaggtggaagtagaagcgccaacggaagtcgaagtatggactatctacgtgaagggccccttgggacggagcttcagagtatatcatcacctctgatcagccaccctcctctgtctctctctggattctccacctcgcattccttggcggtctacccaccatatactgattcagacccatctccgtcttcgcccacctatgcgtcttattccaacttgacctcggcatcatcatatccgacagattcttctgtcccgttctctccttctgatcattgtcgaccaggttcagaccgagcaaccattacgccttctgtcgtcagacagacaaaagcgatgatggccttgtcgaactcagatagagaaccacccgatgaggcggacagaatccactcaatgagtggctatgtcagacatagggatgctgggccagtagaaaccgatgggccaccagagttggaaggtgagatggttgagctgccgccgatgtatgatgagattcagagaggtagagaggacaggcatagaggccggacgaatggaggtgaggtcgaggtcgagcaggtcagacgaccgagccgggaagaatgacctttctggtcttctctctcttgttttttttggtgtttttgttctttttcttccttccaaacacgtatcgctctcgatcttgtcagtcattattgtaagctctgttcatctggtctttcgagtggagttgcaagccgcttatatgtttgttctttcttttgagcggcttaggcacacacacacacacacac

SEQ ID NO: 581 - DNA, 34122 bp, Xanthophyllomyces dendrorhous
acacacacacacacacgcgcaggcgacactcgtcgctggcgtatccaacacgccaggcatatcagcgcactcagaggcgcccaaatacacgcacaaataccaaacacagatccatgaaccgatcgctcgaaggtcgagactattcaagaggcggatattaaaaaaaaaaaaaggcttaaacgtcgtcatggaaagttgcgaaacattctgctcgatcgctcctcataaccccgtttgcccgcccccggaccgtttagtcgtggccaagtgccaacttgtcagcccgaaaatcatccgccccgggccggaggatttcctttcgctatttgagtacaaagcaaaactcgcaattttgggccccgccatcggtctcggacctatctcgtctgtgctcagatgtctatctcacgccttgatggtgctccagtgatcagtggcccttcggcctcgtccgcgcccggcgtaaaaagaaaactgagtgttcatctagactcagtctctatctgtgtgtgatgtatatcctatccatatatttcttcctcaatcttcctcactgcctgtagagctttctctctcgacagcctctgactggacactcttctcaaacgttctctctgttgactctgaatccctgcctggatatacgcgacaaagagaagaaaagtgattcaaaaaggacaaatcaaaaatagaacaagacgatatagaatgaaaatccttttcattcgatcacctctgaccctctctttcagcatagcccaatagagtcatcgtcgtcgggcctcgtgccagtgatcgcccaaggttacatgttcgtcacatgaacacacgcggttactaacattatgttacagtctactcacgtgaaccggccaagtccgatgacgactcaacccatcacgagttccactcccctcctcccttttggtcatctcaacttgctttctttccttctttctatctaccttgctctcactcccagtgttccgatcgacgttggcttctactcgttctacttggatcatatcgctcacacttccctatccttgtcgttccgtagttctttctgttaagccttgaaaccatgtccgacaaaacctcagcacatgtccctgtcgtcaagttgaacgacggtcgagagatcccccagatcgctttcggaacttggaagattcctgaggacgtctggtccgttctattcctctagcttgctctcgttctttctcattcttttcctttggatctcataaccttctctctgccttcgcgacagcaccctccaagtcactcaggccgtcgagcttggattctcccacgtgagtgcaccatgcttctccccaggccgttctcggttgcaatacaagccttgctcatctggtttcctctacagattgataccgcgcaggcataccgaaagttggtatctctttcttcttgtctcttagccctttcttggatagctgacacgaacggcaatgttttccactcccgactctcgtcttccatctcttaacccttcagcgaggcagaggtcggcaaggccatcagaggcttcggccttcaccgagacgacttttgggtcaccacaaagtggtccggcctggatggcaaaggcccccgacagagctgccttgagagtctcgacaaggtatgtccagattctttacagccctgtctatccttccctgtgtccatgtatgaatcctctcgatccgaaatctggtcctacagctcggcttgaagcaaatcgacctctacttgattcactccccccgactggccaacgaaaacatccctggagtctgggaagagtttgagtcactcagtatgtcagactctgctgttcgcatgttttctatggtccacgacatcatgctcagtcgttctctgctcttccttcttttctatgaatcatttacagaaaaggacggactcgtcaagtcgatcggagtatccaacttctcgatcgccgacctcaaggtacttctctactctgcgaagatcaagcctgtcgtcaatcagatcgttcgtccttgcctttgtcaaacttctccattagtcctcaccccaagtgtggacgctgatgaatcagtcgacctggcattttccatcagctctttcacccgtacgtctgggagaagaccagacccttggtcgagtttatggaggagcatgacatcaaggccgaggcctactccgctctctacgttcgtctcttatcctatcgaattcttacctcttcgaattctgaccatgcccctgaccctttgtctaccactttcttctcttgatatacttctctccagcctcttacatcccagactggaggtccggtcgacaagcctgtcgacaagatcgctcacaagaggaacctcaagcctgaacaggtccttcgtaagtcacttttgtcttgcctcgtctgtcctttggacctcatgtttgaccccgtctcttgatgatccttttcgccgcccgctccatcagtcgcttgggtcattggtatgtttaccctccgcttgcgagctctgtgattcatgtcttgtctttctctcaaggtcaatttttttctctctcttcgctctgccatcgacattcctttattcgcacagcccacgccggtatcccgatcacgacctcgtctcgaccggatcggatcacgtcctatctctcggttccccacatccatctttccaaatccgaggtcgaatcgatcgatgaagcaggcaagaagtttcatctaaagcatgccctcaaggaggccgttagacagaaagggccgaccgtcgcgttcgcttcgctcgtcgtcgccggctggcttgcggcagatgctttcggattgatctgagatccgggttcccaccaacgcgcccggaatcgcgtttgacaacggatccgtgggacgctcaatctctgtcctcacgatcgttcttctcttctcctctgtttgtatctcgttttgtcttatctatcttcttgttgtcctatgctatgcctttgcctgtgcgtttgcgtcatgcattaactcaaccccgttcgttcttgacgaaccttagcagaagaaatgaagaacagaaaacatatataagaaatttttaattttttttccggtattggaagagagattctgggccaagttcagtattgttacaaagaccaaagaaaggaagaaaaggaaaaagaaaaagaaggcaggctataaccgaaaagaggaaggcagaccaaatcaatagacgaaaagaaatggaaacagaaagtggatgaaacgacggaagggagagatggatggcgttgggaatttatcaacaagaccgggcaggccattttcgcctgcctcttggagagcgaaggaggggggaaaggttcgaagagactgtcaagacagagggattgagagtggaaagagaaacacaatgtttggatagattgaagaaaaagttggaaaaatcgaagagggttgagaaaccaaaagatggaaagaaatgaagataccaaatcaaggtggaaggcaggaaggtagacgaagataatacaaaccgaacgagatagaagaaagcataaggaagaaagaaagaaagaaggggaaaaagggtagaaaggaaggaaagaaccaggatatatgcgcatacagcttatcctaattcattcttctcagtccatcccaagaaaaggaaattctatgcgaattgacaagacgcaagatctacgaagcaggactagctgctccacagtcctgacagaccgcccaaagggatcgttcacccatcggattgggatgagaaagcaccaatctcggaatctggttacaatgcgccccatgactcccgctaaagtcctgtccgatcccaagcacgccgaccttggcatgatcctcatcgacagacattccgtcctccaccatcccgtccgagccgcttaagaccgtcttcccgcccatgatcccaaaaggatactgagcaagattcatcgggtaagccgaaacggatggtgtgcggagttcgcattcgctgtcggatgaacctgcgcaatcgacgtccatcgtgtttccgggggcgtgtcgacggaacgagtgtgacgatccaagtggagagcttgaaggagacgacgattgaaacgacgcctgagatgttggcagatttagcggcggtagtcggggttgtttctaaaaagatccatacggtgacagcgggtaggtcgcgtccacaagagggaaggcaaggggggaaagaaccaagaagtcaggcttttgatacactttaaacatgatgaaacgcgacaaactagtgaacaataaactcaccctgacatgaatgaccttccggtcgctgaaatcaatttcctcggagcgggaagcggttccatcgaggtcgtgctttcgcttgttggagaacgctgagcgcgacgcctgcggcggctcagcagtggaggtggatgcgaaaatagaagcgaactgcatcgtggtttctttttatttgtttaaaaggaaaagggtggttggttgtaagaaggaaggaaaggggttgcaagttggatgagggatggtttggatgatggtgatggttgttctttggacgggaaatgagacaaatgcccaaaagttgaaggttttactaaaatggaacacaagaggaaccaacggaagactttcttatataaaaatcgcccttcagggtcacgtgtgacgacagtttctgtaacttccggttacaacgtgattgttgcacgtgatatgtttcagtctcagaccgagacgcgttgacccgcgtcgcatgacgtggccggtcagaggcgtgttcagacgcgtcagttagggttatcgtgtaatgactatcctcacttaataccacgctgatgcatcgatcatctaacaccctttcccacacgctttgcttctcatatgcaggctactctctcagccttcagcctaaaacgttcgtgaggatacgaggaaagtacgcccattgtgtccgtactcatcttaaattgcttcatacatacacatactttgatagatctctacaaagctttgacttgtctgacaaagttcggagaggatgttcatctccaagcgttggataccgaggtgggttcggatatttacagttcagcgttctcgatgctgatactaaatcattcgatctactcatactatatctggacaagctcattctatcctcgctcaactcgtcaaagacggcccatgcaaagtttcggttctcacatgcattcttctcggattacagcgtgatatcttcgtctaagcgagggctgacatgtcatctcaatgctaaggtgagttctttcgtcgattcatacctgatgtttcaaaacatgagcttgctaacgcccacctgtttgtttgtttgtttgttcttttgttcttttgtcaaccaaataggctctgctagggataatccgatcaagaggagtcgatcggactgtcgaaaagtgtcagctcgagctgattgacccggatcagaccgatccaatccaagatgaagacgagactcgaaagaagagacaaaagactggaggggacagctcagatgaagagaacacacataaaaggcaaagaagagagcaagcaagattcgtagtcaagctgttcattcaacacggttcgtccgcctcattcaacggcgaccacgagtgtcacatttcccccattatctgccttgtacaaagccgacgtcagcttactcgtacttgaatgatcggcctctctactacacaggtttcattaagacatataaccttcatatatcgaccattcagtctatccctaatcctgtccctcctagacttgacccatcaaaaacttcaaagttctctatcactgggaagtgcattaccgagtggatggaaccgtttcctacgtggattggaactgtatccgctcccggaagcaaagaaggctttctagcttgggctttcagtgatgagggagtccgtatcagcagctgggaaggtgggattatttcttagctcgcataggatctttaataggattgtatgcggtcaagtttgacttcagactgactctttatcttgtaacttcataggaaatattaaggcagatcatctcgcgactgaattcttcgttgacgccgaggattttttagagtactatacccctggcgagacagtgaccatcggttttccgatgcgggagttcaaggtgatttcttgcacgatccaacttgtcacataaagtcatcggctgattattcagatatatgttttcttcacaggccatcacattaacagctctctccctctccacaccaatctttgctacattcaccgctcccttcgctcctctggccatcaccctcgccgactctgagaacgtgtttgaggccgagtttatgatcatgacccaagaagtccctggctttggctcacgaccatctaacagggccaaggatgataaacgggacaagaagcgccgaagtatcagcatcggagctcgaagcgagactagtacagatagtggacttcccttggatggtccagtcggtgacagtcaaggcaagaagccaaaactcagattaaggagcgtagccgaaggaagtgaagaaggagaagcacctagcaggtcattacgaggatccttggcaatacgaaaccttgattctatcgagtcaagtataaaggatcatagaagtcaatcgatacaaaatggaggaggcgatatggccgaggaaggacatagggatgttgacaatgaagtattcgagctgttagaagcaggcatagttgataacggcgctgtaacatccactactcgatttcctttctcttcttcatccatcccaagacgtatgcacccatctcaatatgctacatcaacgcctaatcttcatgccccgacgtccaatctgcctcaagaacccctcttctatccaggttcacaggagatctcaatgccatcgacaatcccccctccggcgctcagtcagctcacgcaagctcaattagaagcgctcggtctcggggatttggatgatatggacctggaccttgatatagagacaaacgaagacgggaatggccaactagcgagcgaaaagaaacaaggagtgtctctatccgatgaagagaagatggatttggagtccgtcgagattccaatgggcacagcgaagggcatcatgattccaccgacgcagcgacaggctctaaacccggaaaaggcgttggttcgttcctttctttcatattggcgttcttctcaatgcgctctaatgaagctaactttgatcgcgattctagcgatcgtttgaggactcggacgcggatgacgaagacgataagcctatcggagcgtcataccaggctagccaggaggtataatgcacatattgagtaaatccagcggagagttgtttcaaaagacacctactcttcctcaaggtttcgatctctaatctgtacttacttgaacctaccaaatacttccaaatacaaccgtgttgccttgcattgttctccgtttcggtgtatctatacagagagtaatatgtatatatatatatgtgtgtgattgaagattattactgaaataaaagggtgagaatggacttttcgttccggcaattgttcccaagcaagtcctcactggttttccaaaccatatacacactacccaggtgtttcagtaagatggattgagaaaccaggaaaacaggaggaaacccgctagaaaatttatagctcctcggaaagagaggctcgggactccgcgcagacggaggtcggaaggtgatgcctcaagagtagatgacaaataacagatgaaatcatgtcaagactgtcgaaatcgcaacagtgatcgtaacttgtcgatgtgacatacgacaacttgtctttattagatgtttaaggtatcaggggaagatatgtccgtcatagtgacagccggaactactattacgtctttggggaataattgagtcgagacttctttacgcagcagagggatgactactaagctgttcgaaacctcaccacacaaacaaacatccatcttcaagtctcaacaaccgattacctttgaagttctttcgaatctagtttctcaccatggcatctccaggttcgttaatgtgttgaatcatttggatatatttcttctcagggacacatgcgagcaagcagcacgcatacggtcattcgctgacactacaacgcactcttcttgattgctgttctcgatccccccttcagctgcccgtaagagactcggaaaagagtatactctgatgcaaaagacgcctccaccgttcgtttgggcggttcctgacgaaaaggtgagcttctttcatggcacaatggttctgacgtatttgctcaattgacacatttctttttcatggctacctgattacagaacatactgaactgtaagtggagtgaccttggtccactcatatccgagaccaggtgataacagatcggcttaaccgacgacttgtttatttacctggaataatccaatatacaacccgtagggcattttattctggtgggtagatttttcgtctttcatgagctagtcgtctcctttggatgcatcgatttaccgagcgtatcgtcttgcctatctcggacaatagagaggacctcctgatacgccctacgctggcggcgagtactatggaatggttatgttccctggggattaccctgtaagtactgaagagagtctctcaagaacatgtttgggtaacgattatgtctgaatcactaattcggtgctcttctcgctctcatgtacctatcagttcaagcctccggacatcaagatgattactccttctggccgatttaaacccgagactaagatctgtacctctatgacgagcttccacccttctacctggaacgtgagtatgatagtcagcgatgatcttcgtcacatatacacgcgatgactgacagaaccttcttttcatttgattgtagcctgcttggagtgttgcaacgatgtgcgtctgtttctggtttctagataacacaataaagcttataaactgatcactgccctaactctgcctgttgaaaccccatgatgacaacaatagtcttaccggactattgtcgttcatgctatcagacgaaattacgacaggctcaatttctactaccaacgcagagagggtgtcactggcagaaaagagtcatgcttggaacctgtccaacaagaagttcaaggtgtgtgttcataaactgacagcctgaccaatattcgactgttgagattgatgattgtcttttggcgttttgttcatcttggcaggatatgtttcctgacgtaagttactgagatttgttccgaattagtataccgaagctgtagtcgctgaaattacgcgtgtttcgttcctttgatgatgtagtactgcactcccaaagccaaggatgttcccgacatgccttcatctgcacctgccccatcagattccacatcgtctacatcagtcagctctcctcctcctgctgctcttgattcttcttttacccctgtttctaccactacttttcattctcctccttctccatcgataccgcactcgacatacacgcctcctacatccgctactgagccgtttcctctggcaacgacgactgactttcccttctctacctctcctgatcccgcaccgctgttgtcggctggtttggatgtccattctgcaggcggcctaaatatcaaagaagaccacggtttggtgagagatggttcagagttggctcctagagatcagacagcaggggagatcaagaagtgtgtagcagttggcagtcaggcgagtgcgagaggaatgaggttcacttggaaatgggtggccgtagtgttatttgctgtgattgtgatgctatggagtaagtctgttctgtctcccttctctctacacatactgaaagatttctagtgtattgacgtccggcggcttctctgattgctttgttctctagcttaatcaatgtgtcccttataagctttgtcttgctttcgttgctgttctcttcaactctaagctttacactaggagaactctctttgcttcctgttattatataagcactctttcggatacaagtagagagttcttatacgagggagacgtggtttgtgcaggtagaaagctttctgtacatgtatgtgacaacaagctagaaacaaaattttaagcaaaataaatgcacctccgcccgccccgaagggagagtgaaggcttgagaaagattacgaatctgaagctggcgaaccaaccacactctatcgatacaagctgatgaggacaatgtgtcgccgtgcagtgtcagcgatcgatacaggacagagaggtttatgacgctctctgtcaactcaaggtaagtatgaaaaacactggaaaagttcatagtcagaaggtgcaacttctgtcgtggagcaatagacgtccgtgtatgttacatacagtaaccatggctacacctgcatctgcaatttgcactcgctcgtcggtgacgcgcaaaggcaatttgagcacaccctttctctttctactcgctctcatcgcaccaaggactatccttgcactcttcattctccttgacctttgaaccctttcacataaacccgacatcccaatagagactgcaacatgcctcccaaaaaggtctcggtcgataaggtcggtgttcctcggtctatgctggaggattctgtttcatgtcttctttttcttttcatttttttccttcttccctttatgctttccctctctttctcctcttctctactcacaatctggccctctgttgcctaattagaaaatgctaatcaagctcggttttattcatgttatcagaccttcggtatgaagaacgtatgtagtatcctcagcttgcttcgaagaacattcactcgaacctctcggttgaccttccgctctggttgcgtgcatggctttcacagaaaaacaagtctgccaaggttcagcagcaagttgctactatcaagcagcaggaagctcgacgaggaaagaaccccgacgaggcaagtccatggattgtttatcagctcaaaatacatttagctaatactggactaacatctcgatcctttcggtttatcttactttttttccttccgcttctatcgactctcttgtctacccttcctgtcgtcatacaaacagctcaagaaagaagaagaaaaagccgcggctgccaaggccaaagccgatgaggcgaagcggctaaaagctcagatggagctcttcaagcctgctcaagctcagaaagttcctttcggtgtcggtatgtggcttttagtttcgtttcgatggaacggcaaagaagtataatcccaatcctgagggttaaatatctgtgtgttttccctgaatagaccctaaaacggtcgtgtgccagtactttgctgctgggttttgtgaaaagggaaagaaggtttgtccttctcagtcttcctcttcctatacgaacgacttcgttttctgaatatgatcaattcttcacatggctctctgtagtgtcgactatcacacgatctcaacgtcggacgaaaggttgagaagcgaaatgtctactctgatgatcgtgcaggagctgccaatccaggggatgtcaaccctgatgacaagacaaaggatactatggatacttgggatgacgagaagctaaagaaggttgtgctgagcaaatacggaaacccgaagaccactacagatgtaagccttctttctcacacacacactctttgtatccaggtgccctggtatctactcagttgatgctcatcccgcattttggacttctgtgttggacaaaagattgtctgcaaattctttatccaggctatcgaggatcagaaatacggatggttctgggaatgcgtcagtcaaaactttcaactctcctccagccgtgcccggtgttctgaacactttccacttctacatctctacagcccaatggagtcaactgtttctatcgacacgctcttccgccaggttatgtgctcaactctgagaagaagaagaaggctgaggctgataaggctaatgtgatcacactagaagagtttttggagagcgaggtaagccgcttctaaatgttcggtactagtgatagtccgcgagtttaaccctaaaaactgaaataaaacccatctatttctctgatagcgacacaaacttggaaagaacctgactccagtgacagcagagacgttcgccatctggaagaaaactcgtctggacaagaagactgctgaagaggatgtaagtttttctttatcttgagttgtctttcatatacatcatctggcgcgtcttctcaccagcgagggatactgccgtttctgtttctcttcttttcttaaccaggctgccaacaagctgaagaacattgctggaaactctggaaagacgaccggaatgtctggtcgagatcttgtacgttcaagcttccgaacgtctgtatgctgtattactctgactgactgctatctatccggttctatagttcacattcaaccccaattggttccaagatgaagaagtggaagaggaagatcaggaggagtgggatttggctcagtaccgacaggaggatagcgaggatgaggatgctgcggcttcagagtcgggtggcaagactgcttctgaggtgacagttggcgtctcggcgcttagcgtgagcgaacagccggaaaacggtcgagagggggctgttgctcaggacggttgagctggatgttgatgtttccatgaaatcttcttagaactggcgatcctttctgaaaagacacatactcgcttcagtatcagtatcagtatcagtaccatgtgtgcgtgaaagaggtgaggagcacagcaaaataaccctaattgtaacgtgagccagctcacgtgatttgttcaagttttcgttaggcgtgacgaaaaaaaatttgggaaaatagtataaaaactttgggcggcctgcgtttcttcttttggaccttcatcaaagaaagtgttcgtccatttcaccccatacattcaatcgtgttgaaagacagcccatcgctaacatgtccgcttgcattattctgtgttctattatttagtcaccgaagactatatttgcggctcagcccctgtatgatccgtagatcatttcgggcccatggttattgagcaagtgaggtttacgtcgggagacggagtgtcccccaggcttaaaagtctttctttttcggaagagaggcttgccctactcggggtttgggcctgtggctggaatttccttctacaaagatcgtggagctcgttttcagacgcttggcgacccgtacggaggatatatcaattttatctcgtttttcttcctattttctatatcatgagtcttttcatagatgttaaaacaccctaacgttaaatgtggttatcaagcacccacggagacactgacaggcaaggcttctgattgaaggaagagctcgttaaagaatgtctggcaaaacatgagagttttattcctggtcagtagttgcacagtgagtgtcaaggattttaactgagtatcacaccccttgtaagcttcttctgcttctcttgcctcacttcttccttaccacccacatttctcgtctggttatgatcttcgtaactccgtcgtcatcacccaatcctgaatcctaacacaatccagacttcttattcagagctgtaatcctataagaaagtgacttcctcgaacaacgccagcagggttgcacaactagagcaggagccaagaatgttgcgtgattctactagtatcattcgatgtgatcatgtctctcgatggaatgagagctctgtacaggaagcccggatgatgttgggattcaggacccacagagtagcgacggggttataacgggagcaaccgcgcgtgaaacaaaactgggctagagaacgaggttgaaactcttgctgtaatggtgtgcgacctagaagacgatgcagggatcattacaaagccaacccatgttatatatcatcctcaagctccaacgataatgcataagaagataatgcatagaaggtgccagaagtatctgcactggaagactcatatactttgcgggtcaatgcctttgtaagagcagaagaaatggaggatgtgctaaagagacgaaacagttgaaggttacagggctgtaacactcatgtcacgttcctgacgaccggacttgaccggcccgcggccgacaccgacggatcattgatttctcaagatctcgtcatttccttctttttcttcttgtcctatcacacaaccatccatccgttcttctcaaccatggctccctcaacgctgtcccacatctttcctacctcgggcacactcaagccgcgtagagccatcaccatcccccagcatgatgtccatatttcgcactctaggttacagattcttgtcgaagaatttggatcccaattaggctctctcgggatcaaaaaaggagatgtcgttagtttgtgcttgacgaacggactcgggtttgtccttgcctttttggccacaggtggtatcaggtaagagtttgttttgttcagtcttcctattaattctccttgcaatcgagcataagctgacaatgaccatcttggaactctcttgtacgatccatcttcgcgtatattcagagctgtatccgctccactgaatcctcattacactcaagcggaggtcgagttttatctccaagatactcagacttcaattcttatccttcctgttctggagtctcttaatgagactgaccgaaaggtgggcttcgaattttcactcaggttcctcccttttgtcttttagaatcacggacgattctcaataccttcttcttcttctctttaactatttctgaacgttctatctacatcatcagggagccgaacaagcgctctccgccgccaaaaagcttcatgtcaaggttgcagtactcaaactggccgaaaagacttgctctcccaagcttaaaatcatctttgagtcttacaaagcccagaaagagtcggccgggcaggcaaagctgtttgctcaggttgatgggaactcaaaggaggctcaggaagacgatgtcgctctggtcttgtaagccttttatatcttaaaggtttcatgagtctaagtctaactggtttacattctttatgtgatcaccttatctattcgcaaatatagacacaccagtggtactacgggaaagcccaagggtaagtgtatagacctgcgccatttgccgatcgagagcggtttactgattgtccatcattggaaccctttcggatcttttagcggtccccttgacccatctaaacttgttgactaccgttcgaaatatcattcgaacctacaagctttctccctcggacactggctacctcgtcatgccgctcttccatgttcacggactgatgtgtggtctcttgtccgctttgtactctggaggtggtgttgtcatccccgctcgattttcacccactacgttctggccagactttacaaaggaaaagtgctcgtggtataccgcggtgccgactattcattctattctcctgtctgcacctttgccttcgccaatcccgaacatccgattcattcggtcatgctcgagctcgctctcacccacggtgttccacaatctggaaaagacattcaaagcaccggtgctggaggcgtatgcgatgactgaggctgctcatcagatgacaagtaaccctctgcccgaagatggacagaggagacctggatgtgttggaaggggacagggtgtcgaggtgaccatccggttggatgatgggaaggaggttaagactggagaggtcggcgaggtctgcattgtacgtctatctcagtttcccttcctccgtgcgctcaggaccaacgcatttcagatagctcaacgtgctaatttgcctctcgctccatctatgcatatttatagagaggaaagaatgtgaccaacggatacgtgaacaatcctaaggccaacagggaaaacttcttcgctgatggctggttccggtaaagctctcgatcgtttgtcttcctctgtctgatcggtgaaacatagactgaatcgagtgttttctttttctatccaatagaacgggagaccaaggaaagttggacaaggatggatacttgtcgctcaccggtcgactcaaggagtacgtggagaaacccctttttctctcgatacctaaaagctggtaaacttatacgtcatgtttgcttcttatggtatgacagattgatcaaccgaggaggtgagaagatctctccgctagagattgactcggcgatcctctctcttgaaggcgttggcgaggccgtttgtttcggagttcccaacgagaaatacggagagattgtctgggctggtgaattctgttcctcatatcgatcccaaattcggattgtccgtcacagttgctgatcgactgttcgttttagctgtggtcccgaagtcgggcgccaagttgagtgttccgcagatccaaaaggatcttggacctaagatcgcaaaatacaagatcccagaacgagttttcattgtaaagagcatccccaagtacggccactcgctctttttccctccttcgctttcgactgcttccaatgattgtgattactaaatcgtgtgttggaaacctaatcttctttatccaggacggctaccggaaagatccaaagaagacacgtctcgactgcgtttgtcgagaaggccaagaaggaggatagtgagaagggcacgagggagagtaagctctagatgggctacatacgaactctatgcccttcttctcttctgcacatcccctctttcggatgtatcctgtcgttgataattcaggatcattagtttcttctccctctctttcccttttctcgagttgttgtatcagactggtcgtttcgtacgttttttcttactcttactcacatgctatccgtgtagatcgtttatctctatgatctagccacactttctgagtacgatgacactggctctgaacgaactgtaaaattctatcttgttcatgtctgatgtatgcatgcggtatttcagccgtttggtcgaagcaactgaacatcatttctagaatgtatctatatctaaggtgtatcgtgatccttatttcttctacacctctagatcgagtctttgtccatctatggactttcactgtagaagggggagaggggagagaaagtgaggaaatcattcttatgaagaacatcaaagagaggaaggaaggaagaaaaggtgataaacacttgagcgagagaatcaggcaaaaagacaggttgaacgtactcaccacgccggaaactgatctatcacaggccgccttttacacatctggcttggcccctgctttcgatcatctctgccatcttgttgccctcttcagaattcatacttttgaaaccatcgacaacaccttgccagtcgccatcggagtcttcttgactcatcttgaaacgaccttcgatccgatcgatttgaatctcgagaccgatgatggcccttttgaggatctcgacatatcgttctggcgcgtctgtcaacttccaggttgattcgtcttctttccctcgtttcctgagagaggcctgctcattgagctcggataggtcgctgacctgtttttgtaagaaagaagaggtagtcggatcgttttggtagtagacccggactctgccataaacttgtacggtcgagtagttccaagtgggaactaccttaccggtactcggctttgtttcgacgtaaaactttggtgtcacataggactgaacgggcgagttgaatatgatcaacacctcatcccccagaaagtcggacccagattgtttgagattgtgaatgattgacttggcctgaggattagctctggcgatatgagctctgaggatgcccttctctgaagacgaatcgttcaggacgaacggaatatgggtcgtctggagctttgcatgttcggaattttcgatcgaagttgtgaactgacccaaagggttttctcgaataaatcgatgaaggactggaatggaacgctcggcgtgttcttgtctgatgtaaaccatgctgggtcaagaatgatgctgtcgtggtttctgcgtctcaagctgagctatgtgtctcgaactttactggcattttttctttattcccaatcctcacccgagtcatattcgatctggtgtttcccagatttctgattgcctcgttgtcatcccttgggttggagacatcctcagatcaatgacaagagacttgttcgtttctttctacttgactgtatatgctggctgccttcaagaatgtctcctgaccgttatagaacatatggttcttgaacctgcaacgaactgacaaagccactgactgatagcgatgtaatctgattaagttatcatcccagttgacattcctgttcctctcctgcttctttcgttcactcttctccttttcttgagttaatcagatagagcaagtgatctgactatcagatagaactcacatagacatgcctccctactacagtcgttccgccgtctttctgtcgtgaatttctataggatgagaattcgttgagctttgttctggcgctcagtcttcactaaacaagcttcagcatgggtcggatcgcttctccttctcttctttttttttaatttttatttcccattctcttcttttttccctatcctttcctttcttcattttctactcatcaccatcttatttctcttctttcgccttcgagctcagatgtgaatagagtttataaccccggcgaagtcgctcgggagtatttggggattgtaaaaaccccgtcaggctcatctgattggctaaccgaagaagaagtctgagcatttctcattcatctttcacgatttttctcaatcagattcaaatttggggccggttgaaacagagtatcagataaactgcaggacgaagtttagtctatttgaacagaggcatctctctggatctatctttcttcccctctttcttctttcttccttgctccgtctttgcttgccttcaccatccattccattagggaggaagaataaaaaaaaggaaggttatagcacacaatatcctcttatgtcttcaccaatctcactcggagcgcctgtcgttcaacgaccgggcttcgaccgcgcggataccgactttgataccaaagaggcaaagagcgttcctctcgactcggagaacccttcgctcgaccagaagaattatctaggcccaggtcagacggcggagaacaccttcgagcttgaacaggacaaggctcctggtgttgccaagattgaggctctgtatatggtgttcggaaggggaccaaagcttcttgttctctgggggtgagttgaccaatgatctactcggaaggcggatagaaaaagatagaataccagaatctgtactgaaagctcttctttgattgtcatcaggtccattgctcttgtctccatcgtgttttgcctgagcagtatgaccacttactactgtaagtttggtactttttgtttccgaaacccactcaaacatgtctagcgatttttacgctgcttcctcaatcgcacctcattcctatagacaccccatttgctacatcttcatacggcgaacataccattctcggcacgattaccgtcatcaccgccatcatggccggtgtggccaagccgttcatcgctaagcttgccgatttattctcccgaccttgggccctcgctttctccgttttgttctacgccatcggttatgcagtcgttgccgcatctaagaacgtcagcactgtcgccggcggagaagtcatctacaccctcggaaacaccggtatcgactttgtgaccggcatcttgctcgctgatatcacctcgctccagtggcgaggattggtcactggtctttactctcttccctacattcccttttgtttcgtcgccggtaatattgccgactcgatcaatgcatactcagtcaacggatggcgatggggatacggtatgttctgtatcatggtcccctgcgccattgcccctgctctcgccaccctcttctgggccggttggcgagccaagaaggtcggctctctctctcttgcttcttccacctatgcccgagacagagtcctctctcggacgatccagccccgaaagtcccacactgctgtattcatcgactacctccgaaagatcgatgcagtcggtctcttgttgcttggcttcgctttcggctgtatccttactcctttcaccctcagcaccaccgttgttggaggttacaagaacgcctcattgattgccctcttggtcgtcggtggcgtcctcttcatcgctaccctcatctgggagtggaagtttgcttcgcatcccatcatgccgctccggatctttaaccgaaccttcatctgtgctgttggtatcgactttatgtactacttctctggttatctttccgatgcctactggtcttcatggctctacatcgtgttcgactacagtgccacggattacacgtacattcttaacatcctaaccgtcggcctctgtctgttctccgtgcctgccggtttgatccagcggtacacccatcgattcaagtatctccagatctctggcctctgtttccgtatcatcggtatgggtcttaactactaccttgtcgcgggtggtatgacgaatgccgtcgtggtcacctcccgagtgttcatctctctcggtggaggtatctctgtgatttcctctcaggttgcctcgcaagcttccgtgccccacgatgaccttgcgcttgccatggcgattctgtccctctggacctctatcggtggtgccatcggctctgcaatctctgcttcggtttggaaccgaagggttcccgaggccttgacaaagtacgttggcgatgtctacaaccagacagagattgctgagatattcggttccatccttgttgcccggactgccgagccccgagagttgatcatcgagggtaagtctataaagaatctattgcgtggttgtaagagagaagaaggagaaaggacttacttgctgatggtctttctcattcattattcgtctgttcagcttacaacgaggccatccgacccctctatctcgccgctttgatcacatcgatggtctcgctcctctttggtatctgcacccaaaactactaccttggcgacacccataacgtcgtcgaagacaccaagattgtcatgcggtccgaaagcgagacggatcctgatgtcattgctgcgaaggcttcagagactgaagctgagctggccgctaagctcaatgttccccgctcttaatatttacaacactatcgtaatttactcaaaaaaaaaaacctcagagataccgttttgatcaacggtgtcggttattctttctttcttctataattatttgggggtttcgtctctttgtgcattcatgtctttgtctgtgcacggtagagccttcaccacgtcgtccatcatgacccacagccagtcgcgccgatcagagagaacccaatcagagagtagagccaatcagcgagaaagccggtcgaagggcggtctcctgcagacaagcagacaagcagacaacgacctcgacctcgacctcgacctcgacctcgacctcgacctcgacaccacacgacacacagacacgtcgggcgggcgaggacgatggtgcgcactgagcactgatcggtggtgctggtgtctgcctctgctgctcttgccgccaaggctcgagtcgaccgatcgtaatgttggtcacttccgaccgaagaaacacttggcgtgagagtcaccgttgcggccgcggttggggtttttgtaaggcaaacgtggctaccacgtgtgacctgcgcaggatctgtggtttcccctccccctcccgaagattcttctagatcactagcattcgaggaacgatctaagattctgcgtgttccttctcttccttgcagcatgatgtggtaaacatgttgtatcctgctttctaatccgcagacgcttcatcggagctggccgagatggtctctttgccccattgatcaattcataagatgggatgcgttatagaccggaaaatctgttctaaagtgcaagataccctcttgagtgactcatctctcttttgttccgtggattctttataaatcagcacacaccagacaaactttccttttctcgttcacacacatccttcacaaatgagcgttctgtcttcacccgtgattatggcgacgatcgcgctcctcgtcactaacgtcgcccatggccttcccatgaacgaccagcccctcgtccgagcctattctgacctcgatccagctccagacgtacctactactgagtctaggtccggatccgacgggggatctaaagtttcatctacaaccatcatcgttgtcgccgtcatcctgggagtgctcgtcacgctcggtgtgggtggaatgatgtccatgctcgtgcgtcgaaaccggcgaagaacggacgtggcaaagttctcttcggtaggatgccagactaaattcggatcgaggagagggttgggaaggagagacgatttgccggggtacgagttgacggagcctttgcccgtctaccaggcgtccaaaggctaagctcaaaacgaaggtcgcccgtctttaacatcatcatctccttctctgaaggatcgaaaccttcaaggtttcatgattcaagaatctcacaatcggtcaactaggtgagtcttccttgttccatttctcttcgaaaccttacgcactcaactactttgcgcgagaaataacatacactccttgttcatctcttcaatcgcaagatcgccatcgagtttcaacggctttctctgttcgaatcaactccgatttcatccttaccctctctttcgaccttgattttagttctcgaatgcgccttctgattctaacccaggagcacccatgctcctgggttagaatcagaaggtagatcaggaggggggttgcgtttccgagtcttgtgatgtctatatattgtcctctctttctgtgcctctatgtccatgttttctcctctcttctcgttctctccatggttctagcgcagcctttgaggcagaaaaatccagatacatacacagtagaagcggaggtgaacaaacaaagagaaacctcggccaagatcagataacctgccccccctttcccctcccctcttcctcgtgctcctgatctggtttgggtagcaccggcgtctctgtcggttccggtatcaagttcaaactcaagagaagatcacgacatccaaatttctggacgtttgtccccttgccaatctcgccatgaagttctgatcggggaatgcgcgatttatctaacattttcgagaatccaggctttcggtctgttttttggacaagatagaagaataaagtcagacaaagaattcattcttgtcgtaagcagaaccattgagcagaacatatcgactatgaatcgaagaagcgaaccaggatgatggatgaacggatgagcttcggtgttaagcacatagtcatctagcgaaagttccgatggatcagagaagagaaggaagtaatatctgaaaacagatagagcctttggtcaatgtccagaaatctatacgccataaggttcatcagaggacaattcaacactcacttgaatgtctcggctaaaacgaaagactccatcttgtccgtcagcccaggtttctctaatttgacgtcgttgacagaggaaaatccgaaaggagcctcagtcttagagatccaatcagtgaacattctccatccttgattctattaggatatttcccccgaagccgcaaattcccttggtcagtccctcaacattcaaggtaattcgtcaatcaggagaacaaaactgacctgatacttttcgtcaccggtaatccggtacatgtaccaaacagtctcaatagcctctggtctcgacatatactgcttatgcatcactcttacccctgggggagatcctcggggaaggaacacctcttcatccgagtcctcatccacgacgatttcatatcgcttagggtcatcttgtttatagaagtcggatcgttcggattgtaagcctgaagggttggcacttccctacaaatatgtcaaagttggggcgcatggatggaaagacaattatcaagaacggagcgcgcaaagctcagggtggagggcacgaaccaggtaatagcaggtttgagagattctccgaccgtgaaagagatctttggatcgataactcaggacacgcgagcccatggctaacatcccgcctacgaaacaagaaagatgttccatggctggctgaaattttccattcttcatttcccctgtagaaataccaagaagatggcagataggtagataagttgtatcagctacatctctaatctagacatttgccagattggacataccgacagtctaaattaagcaaagaaaagaaagtggttcctgtaagtttgcaactcagatatcagcacaagagaattcgccacgtacggtgagtttcttgccatgaaccacccctacctccctgaagattgtttctgacgctttatcaatcgtgttcgagtactgtagaccaaacatgtgagacgcccgtacttaacgttcgatctagaattgagatgacgacactgacaagttgtgcataacgagagatctttcctcggagaagtatatgtctaaacaaaattcacagaatgactaacgagcacaggtacatcggcataagaagtgcagataagcttactgtttgaggagatattcgtagtaactgtcgaatgaaatggttatccagtgagcgttggaagaataatcaaagtgttacatctaaatcctctatccgctattccgtgcgttcgaagatgagcccagacatacctatcagccattcctccaaaactatatgtgccgagaagattgccattgaaaccttcggtagagaatatgactggtagtaagggtttgtatggtgatttggggatcaggacttgatcgatgtagtccatgcctcgttgggccatattgaaataggtctctgtattgttcaatattgggtagtgatttttcaacaaaaccgtcttatgagaaggaagaaagggaggaggaggcaggtggaagtgagacgaacgatttccggtgagttgggaaagtctagtgtattcaagcatcaagcttccggcctcagcaagctgtattccgtgtcccgtgtaaacaggctccggattcttaggcttcaatctagacataggcacaccggaagacgtatcaaagacaggaagaataatctttccaagttcctaaagaaagccgacaatttgcgcagatgtagtatgccatgtgttagaaaaaacctagtcctggtcttgtacatctgcactagggtcacatgttgtagtagtatcctcacttctgctcgctgtaagagtaaagaatctccggactgttatgaaaaaacattcagatggtccgacgttagtcagctacataccaactctcgagtttctcagcaaaggtgctaaccaaatcgtatgctccaagcaatcctcccatatatctgtgagcgccatagataaattagaagcagtcgataggatggtcgtccaacaaatgtcaaatagatttaagcttgacttacctgatgactgtttcgaaagcatgaatggatgcaacatctttccttccaagtgagtctggtcctttgtcccagttaataccttatccatagaactcaagaacaaatcaggctcagcgcagtcaaagatagagaacaaacgtacgaacccgagatgattccaaagtccagctctcgaacgtgctttcgagcatatatgtactcatcttgcaaccccatcagaagcaaagtgtcgagtgagctatcaaggtgatatgcgcagtgagaaagttagtatatagagattcttggcacggtttgaaggaacaagacatgctcgatgatggtagctcccctgttggaatgggcatgggagaccaacagaagatgttaatgatcattcgaaacgaggtaggagagtcaagcctgagcaccaaccattgtaagaactggttggatctacgacgggcacattagcttgtctatcattcgcaacacgcaaatcgtcaagttcatcactcacggctttccggacacaggcccaacttcgtcatgaccccaagcgttcgacttatagccttcccaggcatggctattgatatgacatcacgaggataaatagatcagagagagatcgagatcaaacggaagagctatcagtatatgcaaaaacctcagattacatgtaacgaaaggaggcacattgtagacttacaggaaggcgtttctgacgacatctctccgagatattctcaatgctttagctttattactctctgtacgaccttcaaaatcgaactggattctgttcaaaggaacgtcctcgtctctgtcctgaatatcaaagctctttggagcggtccatgtcgccgcgaacgagccctccgggggggtccactgaccttctcgcggaagaacaccttttgtaccaaccgaagcactttgtgccccatgatatagtgcctctgggaaaaggtcttttaccatctcctcagggaactctaccactctgggagatcgagatatagggggagactgaagcttatccaacgacgtcggattgagcagggacgcttcatcgggaaagtcaggcggtaggatcggaaaaagcgaagctgcattcttcacatggcgaggaggctttggtatgttctttgccggacggaccttggagggcggaggattgcctgggcgagcttcaggaggagtaggacgggtgagaggaacgtactcgtcgtctgaagtgagtgtgttggagtaggcaccagagacgagaaaagtaacgaggacgaaagcgacgaaagcgctcaacttccctcgtcgtctgagctggtaagggattatagattgcatagctagtctgccagtcagagcgatccgacgtgtcttctttccttcctctctttctctaagcaagaagcaagagagagatgatgctgagtgcaacgaggttgtatgtcgtgcatcaggaaggcaaatgccaagcggtgagtaaccggatggtatcgttggtgcatctacggcgacatatggtcttacagtctttcggtttctttgcctctttgcctctttgcctctttgtctctttgtgcattcatgtctttgtctgtgcacggtagagccttcaccacgtcgtccatcatgacccacagccagtcgcgccgatcagagagaacccaatcagagagtagagccaatcagcgagaaagccggtcgaagggcggtctcctgcagacaagcagacaagcagacaacgacctcgacctcgacctcgacctcgacaccacacgacacacagacacgtcgggcgggcgaggacgatggtgcgcactgagcactgatcggtggtgctggtgtctgcctctgctgcctccgctgctcctgctgcctctgctgctcttgccgccgaggctgaccctatcccatagcccatgaccgatggtattttgccggtctgtggtctgaagacaccccagtccaaaagggccatgtatcgaccaccatcggccgaggtaactctcaccatgctttttgcatactatgtattcatcatatttaatctctcattcgagcaggaacaaatctccttacaacaacctctttgatctgatattttgcccaatcatcagggtctcctccgcagaaccagccatctgtcgatccgttcaacgagcaaggcgggatggttacataaaccagaattaatgtctgtgtacggcaagatttgaaggccaatgatgagatatattagcattcaaaatttaactatatcaatgtacgcatgaatgagagcaccagggcacaccttcttgacctgagagtttactctattaagggtggaaagccaagcccaatctattgggtttgaattggtgagttggcccttatgaggtgaattgatttcatccttgggatcagcataaaccggaatggtgaccagcgcaaacctggaatacaagtaaacccaataggaatcgtccagatccggttgaaaataagtcaccagagaccgagacatactcatacgaacaagcaaagacttactctgcatggctgaacaccactccccgcttatacaacaaccagtccacacagaacttaactccgggtttcaccacccaacctagtgatcgatagtgatgataaaccgcgtacgagactaagaacggattgtcaggcctaggaggctcggctgtaagagaaggaattgaatgaagcgcggacagaaaaggtgtcgaagtcgagaccagtaattggaagacagtggagagaggataggagattttctataaggaagcgcatacaaccactcaggtctatcagattctttattctgagcatcacgggcggatgagaccaaaactaaaacagcagagaacgcaccgttatagggtctttcacaatcaaacaattcaagccccaggccaagtaccaaacctcctcaggcatcaactgcatatgctccagattttctacaacaacgttctctgctcgccttctctgctcttcttccgccttatcagcttcctctctggtcatccttgtgggcagcccagcattggaggccggacgcttgggacgttcgagctctcctgttgctgtgctatctgctggagaagcctctccggcaagaaacgcccgctcagctgcctcgacagtcaacacggcatgttttgctcgagcaattttgaagtctttacgttcttgacgtcgaagagcagtaacttcctctgccgaaagagctgtttggaaacaaattgagatcggaactcagccaatattgataagaatagatgaagtggggacacaatgttagcgagagtcacttactgtttcctgctccagtgatttcctttatctttcgtctatgccatgaaggctcacttctactcaggcttcctttcccaaagtttcccctctgccagaagatatcgatagagtcttggtcggtcacccagactgatcctgtcaacgggtcccaaacaccttcgcattttggattcagtattgagttgcttgtcgaggatgataccaataaggaccgtccgagtcgctgaagaattgacgttgttaaaggtgcagcagagggaccaaatacaagtggtaaggggaaccgatagacatgattattattcactctcgggttgaacgatcctttggatgtcatggcgagaaacgaggaattggtggttgctgagttgatgtcaatgagaaaatgaatttagagaatctttaactttcaactttctcaacttctctgattgttgtctctttcgatttccatctcagctggccgtcattcatcttttccctcttcttctacagcatgcaggtagaacagctctctctctcttctgacttggtgctcgtaactgactgactgactggccttatatacgtgaaatttgtatgttctcttggaattatctcaatgtccttgcccaccacaacactcaaagccagatagtcgacgagcagagattgaggccaagaaggcaaagcttctcgagctacgaagaatcagggaggaacggaggacggctttgataatagatcaacagcgaagtcaagctggcgaggtccgttctatatctgttcttctcttctcggtcataacatacaatgtctgacgtatcgatgcgatctcttggttttgtgcgaacacacgcgacttcgttctttttccttccttctgtctagcagcaatcgactgcagcatcagcatcaacgacatcttctcgacgagagattgattcccttgttgcctctcttctgggtccttcctcatccatcaactcaaacaatcaatcaccagctactgcatctgcgttcgatccttcatctccttcatcatcagcaggtccttcttcaccttcccgtcgacccttctcatccacaggtacctcagtagcgcccagtccagtaagaagaatcaactctgcgaccggtggagaccaattgagctcagtgatcagtgggagacctgggcttggcgaatctgacggacaggatatcccaaatcggttcgtatctctgctcaacgggttgagacaagcagtatatttatgcatatagctcatctgacagatatacttatatgcatctgaattcatcggtgttgaacgacagtggaagcttttctacgacaaaagatgcgcctagtcttgtggacgttcagaaggaactctacgaactaccttcaaaagcatgtctttctgattttctgtccttacttctacatggtctaactatcatcatcttctctgttttcagccgaaattgacatacacaaagtcagtccagacatcgtctttcgcaacttcaacatcagatgaagaaggctcctctgaagggatcatatcccaaggcgctagtgggagtggtcgggaaaccgcagaagagatgagaagtcgaatcatcaaggagcttgaggaagagaaaagaaagctcgaccaagaaattgcagaggagaaggcagaaatggctcgagtcgaagaacttgagcgcgtcagaggttagtatactcttgaaggtcatgattcgatacactactttcgctaaactcatgtttgctccatttatttgattggatgggtgtttttctcaatagatctgacggaggatcagcgaaaccagatctatctggcgcctgaatttctagaattcgtagagaatagctcaaaaatcgtccaacgagctttgagcgatggatatgactatatcaaagattataccagtggaggggcgggtgatatgtaagcctccaatgccatcaatacctcctttatcttctcatgatgaattcagaggttgtgaacaaaagctaacctgatcgcgtcttgtatgctaatggtagagatgacgaggaaggcaagaacataaaacttatctgcacgtttaccgatgatagatggaccaaaggacggtcggttacagacatagattggtcaccaaaggttcatcatgacattatcttcccatatgaacgcccacttactttcattttatatacccatgatatcttgaatggccgtttaacagttccccgagctcagtgtagcatcgtacaacaagagcgtatcacaagtgaacgatccggatgggttagtggccgtatggaatttacaccttctcgaccgaccagagtttgtgtttcactctcaggtaatctttttctgaatcagctgactgctaaatggtccaaggatcaattcaaaacgagaacgatacagtttctgatcccggtctatccttgaatgttttgacatgctactgtaaatttcagacggatgttctctccacactgttttccccttttcatgccaacttaatctttggaggaacctattctggtcagatccttctctgggatactcgggcaaaacatcttcctgtgctcaaaaccccgctctcagccgccggacatacatatccggtatacgatatgaaaatggttgggacgcagaacgcacacaacctcatcacaagtagtacggatggaatggtctgcagttggttggcggatatgctagcccagcctcatgtgagtgacctcaaaagttgcttcagtcgaatcttaaggagagatcaaagcttcatcgaatttgaacggaccttttcctgactattggaacgtgtgcgcttgtggtcgatcacatcttcaggaatctctcgaccttcgacattccgcgcacaaaaagacagatgaggtatccatcacctcccttgattttccgtcaaatgagactacaacattctgggtcggaaccgaagaagggaatgtgtaccaagcactgcgatacgatcgggctggtgccaaagctggtctgaagcagcaagatatataccgaggtcacgctggaccggtgacagggcttcacttccatcctttacatgggagtgttgactttggagatctctttttgacgagctcggtcgattggacagtgaaactttggaggacccgacaggatggaagaccaggaggttcaggtgctggagatggcaccagttcagcgaataggccgaattcatcaaaagatataactagcactggattaggcggtgttcaagcgacgaatatttcaccgattcattcgttcgaggagaatacagattatgtgtatgacgtacggtggcatccagttcatccttcggtttttggaacagtcgacggcactggccgattcgatctttgggatctcaatcgtgatatcgaagttcgttcctttctcttctaatgtattcttcttttggtttctgtccgaactaactcttcactcactctaaattctggacttcattgttcatacaaaactggatcttgttgtctacaactaggttccaacattgtctactcagaccccttcatctcgcgccctcaacaaggtcgcctgggacaaaaaggaaggtcgccgggtcgctctgggatcatcggatggatcagtctatgtctacgaagttggagaggcggccatgcccagtgaatcagagtgggcagacttccagaagacgttgaatgggatgagaacgggtggacaggatcgaggagaacctctgaatggaagatagaccttgttttacgcttatcaattgtaatttctattcaacttatcatggtttcctcgttttgctgctttccttctctcttgcattatcagtcccctatacttcatggttcctttttatatcgcgtgccttcgaagtttcaattccatcggaatattgtgatctctgttttctcagctggtgcacgccatgcagttctctcattctatatcagggtatccttcctctagttccacaatgtttgcttcattttcatctatgagatcttggatctccgctcgcttcgtcaagccatgatatgaatacgtccgttattcttcatatcttctgtcatctctggtacctctctgagaatttcacacataaattagctttcactttaggcgatcaaccagtcaatctccattctaatcttgtctctgcctcttccctcctctctcttcttctgaatgatctcccccaccactcatcccagctccattggcaccacccgctcctcccataggagccgtcgatcgacctccagaatacattccccggttcggcatattctggcctggtacgttcatcatgtgaggatggttgtgcatcatcggcggcatacctgtttcagttatttaacagggacataaccggtagaagaagaagaaaaagaagagagttaacaagtgataggaacaactaggatcaatctatgctatcatccctgagtgtggatcaggtcattggaagatggacagccttcggtacacccaaaatggaagacgcatccaactctctccttcttgttcctattccatagtcttctttgcgagaacccctcaactccatctgcatgctcttgacaatgcatcgtcctgctctcccgtcaaacttcttcagcgcgaaaaagtgaaccagcatcgtatgcctcataagcctaggcacaggcacagacttaaatgtatattaagatccaactacgttttgagcaacaacttctagagagagaggaatcggattatcatcgacaacgctcaccgtgaaggttcgctacaagatatgaggaatggatggtcgaaaaagggtatcccgagatacagcatataaggaggacacacgcgcgcgcgtacacttaaccgacacatagcgctacaagcgttatagcccaaggacgcaagataaacacaagagaaaagcagcagatgcgaggacaaatacatgactcttcaggcctcgggaatggttgtcttccctctcttcgaatatgaagaagcggaaggagaaagatgacaacaacagacataattacaaaaaaaaaaaaagaaaaa

SEQ ID NO: 582 - DNA, 16273 bp, Xanthophyllomyces dendrorhous
tacccatacccatcattccgcccatcccacccattcccatcatacctccctgctgaacctgccctaggttcatacccatgcccatgcccatgcccatacccattgcccctgctcccctacctcctagcatttgtccatacccacctctttgcatcccgcctctctgcatgcccccacctctgtttccgccccggaatgctcctccggctccaacaactccccctcctcgagcaaatccacctcgaccacctgcaattccgttagattgactaggtggatctttgggcagcgttctgaatggattgccttgtgaagttgaggcataagttgctgaagctcgtttggattgaaagtcactacaaacgagagacagtgtaaacgatttgacaggccaggacatatgattagcgaagcgcaagtgacagcaactcacttgttgtcaaagtaatacttcagcgcggtcgagttttccggagattgagtctcgataaaagcaatcctgaagaaacgaaagaaacgcgtaagttaacgagcgggataaatagatgatggaggaaatccgttagtacactgacccttttgatttcccgttcactttgtgttccgagaatgtgatatgtttaagttgaatatcttgaacaccggcatgtacgcatgctcgacggacgtcttcgtccgtagtccactagaataaagtatatcaattcgatgagtccggacgaaactgtcagtggaaggtttatgtaataaacggtctcctgtttttgaaaagattgcacatacccaactgagttcgcctagatagagagcatccatcccaggcccagcctgtccaccgccagctaccttggccattgaattatgaggaatgactggcccgggaattgttgatgtatatgtaccgattacggacccaggaggtggtacaacgccattatatgacctagcagatgacaaagagttgcttggcaatgacgttgaagatggactatggctagagttaggttgtgacgttgattgttgggacgggaaaggcagacttgaagcagttgcagctgagggattgacatatgattttggcgaaagagcatgtgcagtatttgtgtcaatcggaacggtagatgccggtggcggagtgagttctttgggcaaggtatcatagacggtctatgggacgaatgaagagagacagtggtaagccaggcacagacaagtatttactgatgtgcagcgacgaaagtcagggcgacgagggtgtgagaagaaaagcaaggacagcttacgttgtcaacgtcatagaggtcatctccgtagatatcaaactagacgggtcatcgtggtagtggacgagatgtagatgaaggtgaccatcagaccaaatacctgacaggttcgtttcaggaaccagaatcggtgacgggtacttacctcttcgtcggccattttggaaggagagaagcttggttgaatgagttgatacgacctgggaaagcaagtggattgtcttgaaagtagtcagaagagcttcaaaggatgctgaatcgagacaacttggtgtcgaacaagagatctcactgtcgctttccctcttgataatgatggtagactgacaagagttgagcgtacacgtcctagatggaattgaggtgagatcattagggatggctttacctaaggtattcagatattcaaatatattaccttaacagcctcccgcttactcgcccatctcgtctttctctccatctcagcctttatcacacacgccctgatctcgaaccccattccatcctatccctgactttcttcggccagctcatcacatacctagcgtgtagatatcacaatcaggatgagtcgtcttgctcctctcgttatcgataatggtacagttttttctcttctgtcctcgttcatttcttgagcctcgatcgaatcgaatgcagctcgtctgtatgattgatcggtatcaacttatatctcgacttctcgataacttactctccaattgcttctgtcttctatctgatgtaggaaccggttataccaagatggggtttgccggaaactctgagccttcctttacgttccctactatcatcgccactagagaaggaggaggatcgtccagcggtggttcgtcctcagttctcttttctggatacatcttgcaacaaggtccaggctgacggacgtcatttttttccctcttgatttggttgaacatggctgaaaccccgtccctacctctcgatattcgttcaaaccaatccaatgattattcacacgaaattattcctgctctgacagctcgaggacctcctgtggcttccaaaccatctcacttggcttcaaagcgaggaatcgaagatcttgacttctatatcggagacgaggccattgctaactcaaagtaagcttgtttgtttcgtgtatcgattctcttttttgatctattgttgggagtatctcaatgtctcttctttctttcctcttcttcgctttcctcggcttcgcctatttctaatgacgcgtcccttttcactgcagaacttactccttgcacaacccaatcaagcatggaatgatcgacaactgggatcacatggagcgtttttgggagcagagtatcttcaaatatctgagagctgaaccagaagatcatcatgttctacttgtcagtttatctcaccttatttcgaatctttcatcgttgtcatcggcgttaggaaggtgctgagagtatagctgacatttttgacctattatatcaacatttatgtctactgattgatcacactgcatccgcttcgactacgcgtgtaaactttacaaacagacggagcctcctctcaaccctcctgagaatcgagagaatactgccgagatcatgttcgaatcctttaatgttcaggtatgcgctccttctcccattgcaccgaatgattgtctgctcacgtgttactgtgtcttacccctccttctataaaatagggtctctacatcgctgttcaagcggtcttggccttagcagctagttggactcacagtaactctgagcgaactttgactggagttgttatcgattcgggagatggagtgactcgtatgtattcgtttttgctcctttcgaagcggtcaaaaactgatgaccttttgtttgacatacattcatctagataccatccctgttgcggagggatatgttatcggatcatcaatcaagcatgtgcctatcgccggaaaggacatcacatcgttcgtgcagcagctattgagggaccgaggggagaatgccaacatcccgcctgaggatcagatgagagtgtaagtgatttcggttctcgatattattccgtgtgcgagtttggtctatttggtgctaattatcatttgtgtttacacggttgggatcgtgttgaaataacagcgcgcagcgaatcaaggaggattactcgtatgtttgccaggacatggtcaaggagttcaagaagtatgatagcgatccgtacaaatggtttgcccgatatgagggcgaacacagtgtgactggtagggtatgtccttattcttttttcaacgagctgtcaccaaagcgttgggacccacgactaatcaaacatgttctatcctttcaaaattgattgttttcgaacgtgtggggtgtaatctagcaatatggggttgatgttggatgggaacgattccttgctccggaaattttcttcaacccagaaatcatgtcaagcgacttcttgacccccttaccagaggtggttgataatgttatccagacctcgccgatcgatgtgagaaggggtctctacaaggtgcgatttttcttcttatgaaaagatggttctttgggattctgtggtggttgtatcaagacgtgatgtcaactaacattctgcctccaatccgatcctgccggcatgatagaacattgtgctctccggaggatcgaccatgttcaagtacttttctcagagacttaggcaggatctgaaaaaattggtggacaaccgggtggcgagcagtgaattcgcagcgggagggtccatgagggtatgcttcaatctgttaacctcgattgcccactcttctgacgattgacgttgatgattacccctaaaatttctcgttgtgatatagtcatcgggagtagaggtcaacgtgatttcgcattcgaaacaacgttatgccgtctggtatggaggatccatgatggcctccttggtgagttctttcgccttgcaccccttaaaaacaacttgttctcaaaagtcgagtcatgctgatctggccgttttcttatcatctcctgccatccttttcagcccgagttttacacttattgccacaccaaagctgactacgaggagtacggaccgtctatcgtcagacgatacgctatctttggaagtgccgtctgagagaccatcaatcttgttgtttgacaatggacaaatcttccccttctttcttgatcttttcttctctgcctctttttttagtgtcccaacgttttcttgtttgatgattgatgatcccttcttcctatgccatatcagtcattagccggtcttgtagcaaactcatttgttttctatgcgcatatgcaatgttcgtttctgagaaaagtcatgatacatgatacgacgagagaaggtgaaaggcagagaagagtaggtagggttcagaaaaccattaagaggcaactggcgatgacgaactccatggatcctacccaaagggatattccttgtctagatgaatcagctccgttcgttcctgcgttagatccagagctcgaagctgagggagaggtagctcctgaggttttagaggcagagatggatgaggaggaggaagtggtagtagtagatgtggaactttggatgacgataggtggataaattgacggctgagtgattactatcctgtccatatctgtttatcaaggacagatatacagagatcaaataagaaacagagacaacaaggaacataagtctaacatcaacaaatcgactggccgaacggatcagaacagaaagagagggggaagaacgacggaccaaagtaagactgcctcgaaccaccgttgttgactaattttaaccgatgggtgccctgtcccaaatttcctttgaagtaagccaatgttcccaatttctcacacgttttggcaaaaccgccaccacagccggattcgttgttgagtgtctcggcggacgtttcgttgattgttacgctttttcaatcgtatttaatagacccgagaggagagggaaaagaaggatttagaaaagaaaacttgattatcaaaggaggaaacgcaggagatgggaacagacgtgaagaaaccatgatcgttgacttgatctccaaatatatagatcgccgttcctatgtggtagaatttccaatccgtcccgttctgtagtcagcgggatgtgttgcgtgttgtccatcttggaaagaagaagaagaagaagagttgtgtaccgaccttgaaagtcgatgttgaatgacgcgccgtcttgattagtgtaggtcgtagtgtttccccagaaatagggcccggtgttgctcccccaagtgccgttgaagacgatctgagaggatgtttcatccagggtgacattcgttgccgttccactatgagcacgatgggaaaccccgtgaagcagctcagtacatcaatcaatattcagtcgaggtagagatgaacagtaagaacttaccctgctcctgcaaaagcgactgctacttctaccagatctaacagaagctctcctccactttgcccatccaggtctcccaagttttggagagtcaattcgtgtgcgctgtatgatagattgctcgcgccgtatagcaagaaacgatcggtcccgttgacggtgttgtatgctgtgtgattggacacgttaccgtcgagagtgatctgataggaaccgcaggtcggtccagtcgctccccatacgtagagggatgagcctaagtaaaacatggcaaaggacacaagccaagaaagtaggcgaatggaaagatcgaagcatgagacgagcgagcaagcaagcaaacaaacatgttcatacatggtcagcgtgccaagactttattttctttctcctttcctcggtcaaaaagcatttggcgggagagatgaaacgaatggaccagatatttctctccaaacctaagagaacgttgtccactctggacccatccggatacgaaaacagaaagaaagagcgatggaaggcatggaggccgtcgagaaagaactgtgcagaccaacccgtaaagttgaaagcgacgctcgctcctgggacgtttgtcttgtgccaagtcgcctcgtgccaaaccgcgtcggcacctgcttgagaagtatcgttgaaccacccaggattgagttgtgggtttggagttgaccactgagtctgatctgcataactcagcagagaatcaaagtcatcgaccgtcaaatttcctacgagaagagccatgttgtttgatgtatcaaccggatggatgatcaagagataagaaatagaggttagattactcgctccgaatctttctttagggtggccttttggttacttgagctttgctcccagtggcctcggcagaggtgagctggctggatgaagggattcttaactgttcttctctcgagcgtggatgctggatttatggaagatgatgatgtatccaagagatcgacagacgatgagaaaccgaacggaaacagtccttgtaccacagagaacggccaacagagcagagtgtcacacaagaacatcccagagaacatcgcacagaggcaagactggatgatgacgaggctggaaaaggaaaaaaaaatgagaaatcagtaaaaaaaagtctcactcgcacacgagtgatcccgttctttcgttctcttcctctccatcatccatccagtgggaaagccctcgattcagctcttcagcatagagtgttcccttgtccgcccagtcgtctcatacagtatctcttgtcgttatgccgccaaagtcggctcagactccaaagaggaagtcctcttctaacaacgtagcaccaccacccgctactaacaaggctactcccgcttctacttcatcaaccgcaaacagtaaaggatcgcaagccaaatctcctactttctacgtgagtgtccggccttggtttagatggtttttttttggtagtctctgtctctctttctgtttgtgtgactaatatcggatcgtcggtcgttcttacttttcccttttcgtggctcttgaatcttctacgttctctgtttcgatgtgatgtcatcgatagaacggaccaacagaatctaccgcttccaaggcagcggcagccaaaggtgttgtcgtcgaccctaaaaaggctgaagagaaggtcaaggctcatgttaaggcactcaaggtcagtattttatctcaatagatcgtctgtcgctgctgtcctcggctgaggtccttctactcgcctcccgttccatctcttctcctctcgatcaccagggatccgcgcctagcagcttccttggtcgatggctctaccgatccgtcatctcctacactttgctcgccttgttcttctgtcctcccaacgtgtcttcatcaaactccgccatctgttcccccgccacaaagtaccactccatcgttcagccttacgtccaacctcatttggatcatgtccgatcctctgttatctccgccgctcagccttactacgcaccttattcgccctatgtacactctgttcaggccaccgtcgtgccctacgttcagaaggtcatcgacttggctactccccacgtggccgccggtcgaacgcttggcgtgaacaactacaagcgacaccttgcaccgagggttcactacgcccagctcagactttccaacgccatcaggccttacgttcacgagcttcagcttcgatggaagatcttgatccagccctacatcgatctcgctcaccgaaaaatcagcgcgacatacaatgcggtcgagcaggatccaagggtcaagttagtcagaaagcgaacgggagagttgatcgttagtggttgggaaaacggaaagccgttggctatccggggagcccaggctggaaaacaccattggtacaacaccatcattccggtttctcagaagagctttgatgctgggaagaagcatgggtatgcgggaggtgtcgcgtccgccaggtaagacctatctcttgacgcgtcaagctttcactccggccttgatgctaaccgcactcctcgctttcttctctctacctctctcttttcagattcgcctcttttgtcgagcgacatcacgttcgacctcaactcatcaagctcagcaacctctacctgactcgtgtctaccgaccttacctcgccgtttacctggatcctatcatcgacactttgactccctacgtgtccacctcgtacaacctgaccgccactactcttcaccgagctgccgtcgtcgttcagaagaacgttcttaaaactcctcctcctccaccggcgccaacgacgttgttcggaaagatcaaggaggcagttcacccggcccctgtggttgaagagcctgcttctttttttgagcaagcccgggataaggtagagagcgcgttcgagcgggtgtcggacggcgcggcttctatcctgggcgaacaaaccgaggaggtgagagaaagcgtgaacaagttgacgaagaaggagaacgaggaggtccagaagttgaagacgaatgatgaaggcaatgataaagttcaggagacagtcgtggtcgaggcagagaaaacaaaagaacaagagcagccggcggaaccgatcttttcgatcctgcccattgaggttccggagcagaacatagaagaggagttggcggccgttgagagggaagagtcgaccaacgaacaagccgaaacgcatgttgcgtcgaactttatggtatccgctacccacgtccctctttatacccctgaggaagaagccgacgaagaccttgctttcttagccgagttggaggcggccgaagatccatctaccgttattgtaccgacgatcgaggagccggagcttgtgcctttgccagatgagcaagagacggacgaccagagggttgaaagagaggccgagaagaagaaagcgatcaggctcgtcagagaagagatcgagagaaaacataaggattttgaagagaagatcaaaaaagttggagagtttgaggaagacaagttggtgaaaaccgtgagttataaattcaatcataccatcgtcttgacatcgacggctaaacaaaccctgtttatacattcatttcgaaccttacagctgtttgacgtccgatccagagctgtagccgcatttgggccgttgtctgaatcttggattgtcacactcgagaaatctgcttccaagctatccacgtcgttggaaaagtatctcgctcgacccaatctcaagcaagacgatatcaacaacgtatgtttgggcttaattctctcttctttcttctcgtttctgaatgacaatttcctgagcttacctggtcatcgtctatgtctcaaatacaccatcaggctttggagaaggctaaggaacgacttaacgccaaggttgataccgtcggcgagaatgtagtgcagtggttagcagaggtcgaaggaaaggaaaccgaggcggccgatgctgcaggagagaaagttgatgctgtagcttccgaggcggcttctgccttggggatcatctatgcctggctggaggatgtgactcgacacgattggacgcgatatcacaatttgaccagaacggctgaactctggaacgagctgttcgtacaacatgcaacccaggatggtacccacccacttctctcttcttcaaactcgagcatggcctctgtagttcagacgttccgagaatctcttgaggacgtccaaggtggattttccgcccgagttgggatcatcaagacgaatgctatgcttcgcgccgatgcggccgaaaggaaagccaaagggttgaccgaggctgatgagccaacgttctcgggattacccatctgggatatcatcagtggcggaggtgaagcgataggaggagcggcagaggcggtcgcaagctcgggaatcattggaaagagcaaggagcagattgttgaggctctcagagccgctggctcagttctacccgcgggcagttctcaaacagaaacggtcgaggaagaaggcgaaatcgtgaaagaatcagcgggacgtttagcgggtgcgttggggactgttggcgagaccttgtccggtctagcgagcggggtggcgtcaaaagaggccgacaagaaggatgagctgtagaaacgaacaagatgcattgtttctgcgagttgttcttctacaaaacagttgttcttctatataacagtttttatctttccatgtttttttcttttttttcttctccactttgctcacagtgcattcgattattatacatgatgttgcgctcttcgtgtgtgtttgctctcgttcgtcatactatttcagaatcattccagatacaagttggcaatctacgactctttgcttccccgcggctaatttgagatgagcctagtcatatcattcatcatctttaatatcccttgagtcttcctcaccctcttctcttcaacatcacctatcatctgcttttcccgacaatgattcctctcagatccgtcttgctcggcagatcttccttgttgagttcacagagagcttactctgctgcttctcccacggctgcgcttgacaaatcccgatttgtccttgcctacgacgctggttcgttccccaaaggttatctttgctcctccgttcacacagggatcaaaaagaaccctcaagccctcgacctcggtctgttcgtgtccaagtctgcatcccctacctcggcagccgcttgtttcacccgaaatgtgttcaaggcagctcctgtcaatgtcagcagagatgtcctgctcgaccagggaggaagggcaagagctctgatcgtaaactctggttgtgcgaacgctgtgacgggcaaacagggaactgaggatgcgctcgccatggttcgatctgttgatagtctcatcagctcggatgcggagaacgcggtccgagggactttggtggtctctactggtgtgatcggtcaaaatcttccaatgacaaaaatcctgccggccatcccatctcttcatgatagcttatcttcaaaccctgaagcttggatgtctcttgcgaaagcattcatgacgacagatacattccccaagcttcgtactcggactttccagctaggaggtcaagaagttcggctagccggtgtagacaaaggcgcagggatgatccacccctctatgggccctcctcagcccgctaagcctctacacgggacgcttcttgggatgatcgcgaccgatgcggctatctcgcctgccgctcttcagtccgctttgacgttcgcagtagaacgaagtttcaactcgatcactgtcgacggagacatgtcaacgaacgatacggtcgttgctttcgccaacggagcttctggaatgacatctgagattgacgaaagtcaccctgaatacaaagtgttcagagatgaactcactagctttgcggaagaacttgctaaattggtcgtcagagatggagagggtgctactaagtttgttaccatcaccgtcaaggtatgttgttcgtcttcgctctgcgaccctttcgggccaagctgctctattctgacgtccaacttcgacccaaaccaactcgaatagggcgcaccatcgtacgagcaagcgaagacggttgcatcgaccatcgcgacctcttctcttgtcaagacggctttgtacggccaagatgctaactggggtcgaattctctgcgccatgtttgtcctatttctctataaggatctcatttgtgcctctatcttccattcgctgatcattcctcttgtttgatcttcatttgactcatagtggatatgcccctctgggaagcccaaaccccatagaacctacgaagacccgagtatcgttccttccaaccgatggttcttcagaactcgtcctactcgataaaggggaacctgtagagtttagtgaagatagagctagtgagattctgaaggcagaggatctcgaggttgtcgttgaccttggaggagatgcaggatcagcggaggcgaagtactggacttgtgatttcagtcatgtatgtgtttcccttgctcgtttttgtcttctcgtcatgatgattattcaccttcttgcaatttgatcaccggtaaaacacaaacaggaatacgtgaccatcaacggatcggtgagtttgaacaggattcaataaccttttgtccatcttcaaagttaaacccgtgactggcactttgcttactgtcttgttttgttcttggatgatctagtaccgttcatgagctgggccatgattcataaacctcacacgaggttcacgacactcttcgtttttctctattctttctctttgggcttcaactcttctacaaaaccaaagtttgatgttttccttaaatcaacctcgagattgtcatggattattcccaactgtttgtgtcactcctcgccgccttttcgttagaacgcatcgtctgttcaggatgaacctatctgattcatattcgctgttggagaaaaccacaccaagacgtggtttgagagttcggcaccatttgattcatatcatcgataaaagaagactccttcctccccataacccctcttcccgtttcaatccttttcattcgtgtgaatgaaggaaccccaaaagagagtaacacacatgatttgctcctttgtgtcggctcgtgctcccttctttcacatgggaggatgtttatgcctcaaggccagacgacgattaatatttgactctaagcccagctcatcttcccatccggacccacagaggccgtcattccgtttccgactttccctcccttcttgtaaagctccgcgatccgggctctacagtcagatgagttcagaagagaccatcagtctcagactccatatcctcagtcggttttcaaagtgagcacgcttacttttccagggtcttcctgtgggcagccaaagtctttagccgttcctcctcagcagcttgcttgagttctttctgggccgcagccctgttcgcgttctgtctggccttcttctcagcagacgcagagggcgacgaaagcgcggcgaatgatgatttgtgggcgatagagataggagagttgaaggaggccgcttgaggctctacacgtatacgtccatatcggatgagaagattagatccaaagttagcatccagttcgtctcctcatctttgatgcgcacgagttcaaacaagacatacttcgctttgacttgatcgggatcttctcccacttctcctcctccacggctggctcatcctcccagacatttgtagacttgtaagactcttgttccggctgcttcgtctgctcggatgactctttttcttgcgcctcctcggagtcctccgactcggattcagactcatacgttggctccgcaggcttgggggcgatcttcatcacccgggcaggcttctgcagaggaggaagcatgctgattgaattcaaatcaatcaagatgagttgaataaaggcaaacagatgttgagaattgtcagatacgcgctcgtttcttgtgatcaaaacgtatgagtcggaagagagatggatcaggaaaagacgtactcttccaccccggtgacggccgtctttgcgtttcttcgatcttccaactgttgcgcaagatggtcacccgacccaggagaaggaaccttctttcctgccttcttgttcttcttttttccggaagaaggatcggcgatatccgcgaacgagggagttgacgagctagaggcgtcgattggaggaggagataccgaggagttcgtagaggagatggcggctttagcttctgtctcgtttgaagaaccggcctgactggatttggccgatgcttttttgttcttctttcttgacttttgctttgtactcgccgacgaagaaagcgatgcagaagaagaagcagaagaggcatcggttttgttgggtttggtgctggtgtcgtttgagacgggcgaggtgaccttccagagcagataccctgctggcaacatacacaaaaacatgagaagcgacgacatatccggcatcacagacgacatgtttctccaacaaagactgagcagagaagatggcccagagaaagagatccaaagagaacggagagatgatggtttgctgttgatgggaaagagagaaacagagagatcggccgtatggcgctcgctggtgattacgtaatgttgtcaactggttacaagacgtggttacagttatacttacgtaagctctctcctcaatcgtcatctctttctctccgccttgctctttccatcaactacagcgacctcgacaaccacgatgatgagtgcttcagactcggaagatgataacccaccgtgactacagtcttgcgtttggtctgctgtctgtgactattcttgatgctgacgttttgagatttcgcttgtttaaacagagttctcgtaggatccaaagttccgttgacgttgcttaccggatacctcggagctggtaagagcaccctgatccagtatgtcgtttcgtttactcgtctgctccgtcgtggatctttgctgaacgttactcggcatacacctcttgacatcatcttctagacacattctctccgccgatcatgggcttcgtatagccgtaatcatgaacgagttctcggacactgccgacatcgaatctcgttcaatttccattcagtctgccacaggcgcgaccagctctcctttgctcactttaccgaacggctgcctttgttgtgccgctagagacgacggatttgcagccattcaagagatggttgcccaaagaggaagctttgattatattctgctggagaccactggacttgctgatccgggaccaattgctgaaagtttttggagaaacgaggaatgggatgcagacgtcaggctggacggggtcgtttgcgtggtggacgctatgtggggactcaaggtaagacaacacgtcagattcaattcaaaattcaggattgtgtccaattggcttaccagtcttccgcgttgttagcaacaacttgagaagccagaggtcgagggcgaagccaccgaatgggagaagtatggccttgtgttacatctcgattcgagcttccggataaagttttgctcgaacatgtacttatcattgtctttcatcaaaacgtattcttagacagatcgcatgcgccgatgttatcttgctcaacaaagtggctgatgtacctttgtctcaagtggaagaagtcgaggaagcaatcaggtatcactgggtttttttttatctctttacttataattcatccaacatacgtcccgaaacttgagctcacactgttttctattctcggtctcgttcgttttgccaacaaaggcgtattaatttaacagctcagatccacagaacgacccgctcgattctcccactttctaacattctcgatctcaaagcctactctcctaaccccaacgaacaacccgtcgttccctccttcctctcgtcccgctcggaccccacatcggagtctcgtgcccatgctcatcctcatccttcagcgcatactcattcgtctcagattgcctcgacggtgatccctcttccggccctgtcaatcgaacagatagattcggtgaaacgatggattcaatccttactctgggacccagaatcacttcagcaatcggaatcatctccaccggaggttcttcgtttgaagggtatcttctggacggacgcggagagagagccgcaggggtgggtgcttcaaggtgtcagaggagtgtatgagttggaggaaattacgacaggtgaaagagggaaaggagaaggaaagatcgttgtcatcggaagatacgttgatctgttaggtgacagcttgaaggaagtcctttggaaggaagactcctgaaattagatgaaacgctgtgtactaccaagaagtaaaaaagctgtaaacgatcgagtagcatattaaaatcaagttatctaatagtcttatcaggtggttctcttgaaagagacaagctagatcaatat

SEQ ID NO: 583 - DNA, 33130 bp, Xanthophyllomyces dendrorhous
tctccaccccaaccagccaccagcccaacccccaccggccacccatcctcgcccctctgtcttgctggaacactcattgccgggaacccagtaagcgaagctggaacagtcaacacatcctgtgcatacccagatgatgacgaagtgtttagaccgccgggagaaaggacaggagcggtcgagatcgaggaagtttggaggatgaggtcaatgcctgagggattggacgaatcagcatgaaaggcggatggggttcggaacagtgataggtaagtctgtgtgagacgcgcccgaagctggagcgacggaaggtagaacgaattgtatgctctgatcgggagtcaagaagaaatgtcatcgggttgtttcagtcaaacagtcacaaagtagacaaaaggcgagggatatagagagacctactcggcagaaagtgaatacgccccgacgataatcctcttcttgacttccggtcctaatagtgctcgcgctttctccaaaccttcctgatagctctcgtcggcgttcggatcatcaaaacggtcttctcctctcgcaccgtatctcaaaccatcgaatcgagcgagattactccccgcttcggcagtggcgatggtgtagtacgctgagagcgcgtaaggagcgagaggtgtagaaaccgagtgtacagtggcacccagagatctgagcgctcggatcgtctctcggaaaggagccagagtatcttgtgaaagctcagtgggaaaagcctcctgagatgtccggcaggatcggtgtgtcgaaaaagaaaagagagtgggtgcagaaagagatacagaaaaaaactcagcttccgtgtttttcagtgtgtgtgtgccagctagcaaaaaaaactcaacgaacgataggtatcccaatacgaagaccagccaattcaccattcctcagaccagggatgcggcatattgactcttctgaaatctccatcattcgagaacgaaccgactcagaaacacacgtcgagtctttcgagtctggctgagagatgacgtctaaagttgttttcacgagataggaaggagaagagatgacgaatttaagtttagtattgaatagtaaccaggagaacaagaagcaaagaagatcagagtcaatgaattcaggtcgatacgacatgattatctgaggatcaaattgggtagacacataccaaacactctctgggccgaagtcacatcgtttgctaaaacgcctacggtatctaatgtgtcagcatacgagatcaagccccatcttgattaagcaagtatgatccgcatagatgagtggtagaagtggtttttgacatgaacacgatcaggaaaaagccttggaaataggtttatgacagtcttgaaagtgagaatggactaaccggctaacgagtccgtacgaaggttttaaaccaacaatcccacaatatgaggcaggcagcctgatcgagccccccgtgtccgttcccaatgctctatattccgtttatcccaacacaatccaatgttcgtcagcatactattctagaagctcaagcagagcgaaaagatcttctcacgcccaagccaaaccaccactaacggccgctgcgctccctcctgaacttcctccacatgatctcttctctctccttctccacttatccgatccaatctcatccgttccttcgacagtgaacggattgatgggtatattcccgatggagctatgaagattggtattgaacgatcccatgccaaattcatcctgagacgccttccccatcaaaacggcaccagcttgagaaagaagggttgtcgcggtggatgaataaggcgaagagaatcctagagagcgtcggtgtgtcgttaatcatccgaagaagcaacagagcaaacacatccttgtcaatagagagaagaagaagagcaccgctgagagaggacgacaagaaagagagttttaagttgtattcaccttgaagtactcttgaacatgccgctgatggcatacccttgatgcagaatgcatctttgatagctattggtagaccttctagtggaaggtctttcttcgaggaatcacctttcgatgtcgagcttgtcggatcgtccgctacaatatgtacagaacgaagcaagatcaaatcgcaatttattaatatgtttgatcttttcggtccttcaaggatgcaaaaccattgatttaacgtggaaatacaggtaaagactctctgacgtttgaagaacaagattatatacgtttcaaagtcgaaggcaaaaaagaaaaagaaaagatgaagagtcgattgaaagaaggcgtgaacgaacatgttggtggtactaaatgaacatatgcatgtatcccgccttctccagaatccctctcaagaatatacttgtaagcctcttgagcagtgctcggtacggtcacaagagttctcacagacggacgagacaagttgagacaacgggatggtcttgacttgagcatagtgtgttggtcgtcaagatgatcaacaaattcatttgtgggctgagcaacaagttttgtgtgaagcggccatctccggcgcatcattgaaatgccactcagcatctatctgggaaacgcgaaccgtttgagagcaagctattgagatacatgcataagattctattcatgatcatcgagaagcaagaaaagaaagagatacatgacgagaaagaagacagcacagctgatcttcaaacttatgagaacaacaggcaaagtggaagagatttatgatagagacgatgtatatcaagaactcgcccacgagcctgaaatctatctatttcgagaacgcaaacggagcatgtgttgacgacgagagaaaaggtgggtatcgcaagacaagacaaggaagattgaaacataggaagaaaaaagaattcactcgagaccgggagtgattcttcaggtagctaacaaatgtgatgagagcataaacagatcccctcaaaagagaaaagtgaagaagaaaaatggaaaagagagaggagcggcatgaaagagaaagcacctgctcattgacaaactagcagacagccaagttctgaatcgagcccatgctgtaaccattctttccctggaggaatccgttggtgaagctgtatagatagtcaaggttgttctggcatcggcagcacgaagaccatcgagcagcagtggcgctagaataggtcaacccgctgtaccatccgttgtaggtaccgatagcgagcaagacgttcccaccgtttccgttgagcgtgctggcaaagtagctgacactggtatgaatgttgtaccaaggatcctggcagtttccgccgggtgcgttggcgcacttgtctttggagatttgcatcaagccctgctctccgccctgtccaaccactccgggctgacaagtagactcctgcatagcaaaggctgcaatcatgatgggaggaatattgaattcctcaccaacgctgtacatgatgtccacgtaaggagcacagggagcaaagacagaaccagattgaccaatggctgtcttgaggtcgacagtcttgagctctccgacagcgacgactgtttgagatcattcacaagggatacttagcttctgaaccatgcactcaaaacggtctcaacaaaccatgtgacttacaaggaggggtccatccagctccgttaacaccacaattgagccattcctagtttgtcaaggcagacatccgagcaagatcagaacatgatatctcgttagttggtcgtcattcgagacttgaactctcgaatcggtggctcacctgggatccattggggctatcttcggtagcacccgaccagccgcacgtcaagtcattgatgttcaagatgttcccggacccgccgatagaaacagaaacagagacttgagctggggcttgccaggctgaggtagtggtggcagcgctgcgcacatgatgtttacataacaaaacaaaagtcaatcgagacgaaaacgacaggtgaaagggaggccggaaggattgatcggtgagatacttacgccctccaagctccggacgaagttgaaggctgctcttgccagacggaagtcgtcgaagcctcctgccaagcggaggaagtggtggtggcagaagcctcttgccagacagaagaggtggccgtgggcttagcgatagcgttcacggcagggatcgaggtttgcgcctgggcctgggtttgggtggaggacggggtttcactatatgagaaaacagtgaagccattgatgatgtgaccatcatacgaggatcaatgggtttcccgaggatacgcaaagaacaagtccaaacaacatcagtgactgatcgtgtgaacaacaaacttgtttaaaacacaggggtgtacccgaaaacacaggcaccagcccgccacgccaagccgagacgaccaacactcttcctctcacttcacaccaaaccggaactagcatatctagatagattcgagaaggaataccaaagaaactcacacaaaggcactgctgctgctgctgctgttatcgttgctgttactgctaatcttggtcttgcatctgccgccgtctcgctttcggatagacttgggggtagcgaggttttcctccaagattctagcttgatgagcctcaaagccggccttccgggcgacgttcgccaacaccttgttatgattcagatggatagaagatccgtggctgccagcagccgacacaagcgaggtggtagagagagaaagagcgagagcaaaaaggacggtagaagggtaaaccatgatggatggatgcgtgagggaaataaggtcttttgccttcctatttcttgcttttctatgaggaactgaaacgagcgagcgcggctgccgagcggtgggaggaaaggggaacgacaaggggatatgcaaggaacagggaaggggatgatgggagagggcaggaagaccaagggcaagaggagaaaaagaaaacaacaacgactcggaagagatgagagtgaactgaaagctggaaggagaagaaaatgggaaatgttgtccccgccaagaaattaagccttggcatggtgagagtaaccctaaccgatgatggttgaaacatggcctttctggactgggatattctcagaccacagacttccaacactcattgggttgggtctgcgttcgtcgatggagcagtatcagcttcagtgtcagcagtcagagcagcagaagcggtagtcatatcagacgcactcatgggtttcttcgctctcccctttctatcacacaggaggatggcgcgtgttctttcacagtgttctcatactactgcgttcttctctataggaaacaacttgcctttttcttttctttcttcctttccccccctctttcgatcattccctttgatgtcgtagaagagcaaactcatcagatcgtcgtgtcataatcaaccccttctcttcctttacttctcaaccagcctctgtgtttcttgtgatatctccgactttcttctctcggtcgcatctcttaaccaatcaactccttcttctgctttatttcctagaactctcagttttcccttaagcgtatcctcagtcgattgccaatgatcactctttgttttcgtcatgagagaacgcgcgcgtacaagcgaatcttctggctgttgagaagtcgaagtcgtattcgagcccgtacttgatatcgaatgcaggcttgctagcgtcgatgatcgcctaagtggaggaggtggaagaacccttgaggtagtttctggagattctgggcgagcggctttaagtgtgggtgatattgatctgagtggcttgattccatacggggcagatgagccgctgaccttggacgttcgcccactgtttttaggtcccgaggtcgctatggctgacgacgatgtagacgacgacgatgacgacatttgggaaggcgcaggtggaggcggaggtttcatcaacgcctggaatgacgagatcgaagaccgaggcagatgcttcgaatgataatggtgataatgatgaccacctttcgagctggattctctgttcaacccggtatgcgcgcttactgtagcccatttgcttcctccctcactctctctctgcccgagccctgcggtcatgccatctctagatctcgaccggtgaatttctccacgagacatgctcgacgacccgataacttctaccctacgctctcgctcggccttcgtctgctccttcttacgtgcatcctcggctgcgagaaggctttgctgaatgagtgtagtcgtgtggaacccagtagagctactaatcaagctcgatggccgagtctgcagtttggacggtttcgctgggacctttggcccacttgaccttgtctctctcggaatcgagaccttctgaccggtcggagacaggagaggctctgattcaatagccgatcgagcgacaagcggtgatgaggaccaaggaggtaacaatgactctcgcggggggagaggcggggccgagtggggtttattgacaaggccgggacgaggaggaagcggaggagacacgatggagagtatcggccggtcggacaagctctgggacctcaccgaaaactcaggtggcggaagcatagaagctgaatgaagccttgctcgaaaaggattcgatgaagacaccgtaggcataccggtcacatttgaaacagaggtatcatctatcagcacaagacttgaattcggtgaagccacttgtggagggtccagatcgttgagcaacagctcgacttttgcctgtccgtcatcctcagtaaaactttctgcagacgatccgtcgtcgctcatcggggttttgtatcgcatacgatcaaatccagaccgacggccttcatcagagtcttcagatgatgacgacgaggatctggaagaagcgattaacggaggggacaacggagaagcagatgacagatgtatcaattgctcggttgtcttacgaacagtctccaagctggaattttcagaaacaaccctagagggtctctgcggcggtggtagtggtggaggcggaggtgggaggaaaactgaagcagtcggaagatccgagacagaagatgaggtagaccttcttctgacgaatagactaggcttggcataaatcgaaggaaacgccatgggagaggtagctttaccctcggtagtcgacggtagcgttcgagtagatactgaagtttttcgagcttggtgttgaggaggtggaggaagtttcgaaagattgttgatagagaaacgagagcttgagatggacgatggagacgagaccaacgagcctacagaagactgagaaggcaccgagggaggggtggctggggtttgattcaagatatgaaagcaagatgtactttcaacgtctggaaaactagagaagacttgactgcgaacagtatgaggaactgaccctgcctgaaaatcaagctttgaccctctgaaccaaggtgcttcccacctaaagcgtgccaagccaaccggaggaccacaaacacctcttcgctacttaacgggctgagcgatctcagatgactttgagaaatagaatgtctgggctgtagagaccgatgagctggatgaaagatggccaggatctagaaccaaggaaaaaaaaagataaaaggcacagatgatgagatctccacagccccaagcatcatcaacagcagatcaacagaaggaatggaaacagaagaacatgcttgcctcctcccaatgagactcttgtagcgagatagattccaacaagaatcttcctacatcgtccactctgatatcacgacaggcgaggtcatctttgtatccttcattttggtcggtggccttagaaattcctgcagggagacgaagatcatgaacccatgacaaaaaggttggatactcctctggcgagagctatcagaatgagaagatgttaaggcctgttcaacgagacagtttagagagaagacacatgatgatacactcacagctgaggaatgtagaaacactggacgattcggatacatcgatatgctacgattctactgctttaagcatggtgagagtaatctcaaccgatggcagtcgatacatggtccttttggacttgggtgccctgagaccacaaaccacctagatccccatgggttatgggctacgggtctaatctgccctgacgacgagcagtgtcagtctcggtgtcagcctcagtgtcaacttcagcctcagcagccagcgcagtagtggcagtgtcaaacaccagcatcctcgctccctctttcttatctaatcaagaattacccctgtcgatccgtcgtagcgctggctggtcgctcactcactcgctcaacgtcttgtttgaacgaggtggcaaatctgtctggagaacatcacacatacatatatagtcacatatatatatgcatactgggtttggtgttgacatccacgatccacaccctcgctcaagtcaccatcatgccagtgaccccattcgcttcttcggtatcgacccctcgatctgccatttcaaaagctagtgtcgatcgcgatacacatccgtcctctgatcgtttgacggctgattctcgcctacgtcgtccgtttcagaccaagacaaacatcccaagctccggagcagctcctcggctttctactgtttctatcaaatcggtcagacgcgaacgtcggccgagagcctcatcagtcgtcaggaacggtgtcttggcaaccgagatgctgcaaatcgcccgagccaatgttcagtccagccagacgagaagatcgagtgagaggagtgagacgctaaagtccatgtcagtaaatggagagagaaacgctaacttggccagatggacgagaagtgttgagccagagatgaatgggacggatgcgatcaggagacagcagtcatctagcttgctactgtctagcccgatagaacgaaagatcgcgaaaccagttttgcacctagatgggttcgctgaagagttcgagaacgatcagttcggatttgggcaagtgcattaatttcttctctcccttctttgtgtgcgatgtattgcttacggcagaaagaatcttcttgggctgacgatcgataggttggcagaacatttgttcaagtgtaagtgtatcttcctgtcattagttgccccgagggatatatgcactcaacaatagactctcatctttgtccgtattctctcaaagcacaacctgccaataaacccatacgctcgtccggctcgaacccaagcgttatagacgatcaggccttaatccttgatcttccttctacaccgtccagtcaggcgagtccgccggaagacccgctttccgatccagaagttatccaaaagattgcggagagcagtcggaagcgaagaccgtcctctgggagggtcaagactccgatttcaaaacgagtcagacgaggtggggaaagtacggtagctagtaaagaggtcgaggctgtctcaaacgatcatttacagaaggaggctagtgaagagccgtcaagtttcaagacggacgatactaggcttttgaaagttcaaggcccagataatgggtcagaagaaggagacatcatcattataccgagacgcagaccaaagcctcggacagttccaactagggcttcagctcgcctggcgtcaggccatcaggtgatcgtaggggagacagagattgtggaagattccgatcggacacccacacgaccgaagcatcgtgctcgagtgaaggctaccaatcaggcgccctcgtcgcggcttctgtccagatcaagtctggatccggaagcccgtactacgggtgaaaaagctcagagtgttcagagcttagattctgatgatctgtatagttaatagtatggtgagcatcgtccagtcatcatgactgccgggtcctcgaatgaaatatggataaccctaacgtcggtgatatccgcttggatgaacggacggcgttgtaagcctagcatacactgtcgtcatttgtggctagtatcagatgcacgatatcaccatcttctcgttcgagaacctaccgggtggttcttctgaccgtgcctaccgggcgggttctctttatcctttcttgatcctgtcgtttaatgttatccttgggtgttgagatcagggtcttccttatcttctttccttttttaccttctctttgtcgtttcgacaaacatcccttcttcggaacactcttgccattgccagttgcctcactccgcgctatatctgcacattatatttcatacatacacattataactgctgacaagctatcatggactaccctctatcaatcaacgaggtcaatgctgtcacgacatcctcgacgatgacactggaccagcttcctttcgtcgtaagctttcatttccgggatagagttgatatcgaagctgtcgttggcaaggacacgttctaacctagtatctcggtttgatgtctgggttgataaaatgtataggtcctggaccgtttgatcagcgtgattgatctctcatcccaggcctcgggttcaagttcaagttcagaccctaacggcaagaaccgggagagtttgtcatatcggcgaccgagaaaggtgtcgaagagcatttctgaactagccatgacgtcccggacattcgcttctcttacttcgttcgttgtccatcttttctctttgttcctgtcgggatcgaatgaacagaccagttgaggtgctgaaggctcctttctcttgttcggatcgtttggttcagtcgactaagattccggtcgatctcgttgtgctcatgtccacacggaaagaagttttggacctggctgatggatcatcaggaggtatggggtatgatccaagagatcaccgtgacagctggctgtgatgttcgtcttgctttcctacgaagtgatcttgtaccgaggaccgcaaatctaacatgaatcttgtggtttactttcctttgtggaatactctcattttataggtcaccagccttgttggtcctcaggtagaaatgttctttggagcattaccttcgctcgaactggtttactacgagccattcgaacgtctgtctgactggctggctgggatgatctcccagctaccatccttacagagcgttgtgctcattaacagcggcatcacttccagtcctcagctagggctgtttcaaggtctcgagcagctcactatctatcccgggtttgtctcaccttggtccgagacgacgtaccggatcgaacagagtcagccggccgttgtacttgcctctgccggtagacgggaagaagaagagtcggtagagaccgaagagactactgggggtacactcgtgaagaggaccccagaaagaaggactctggactctgatgcgatcaaccgagctttggccaagagcgcgcgcactctgaagctgcttcatctgatctgtccgagggacgcacctaggttgacagctgagacgatatttacggatccttctctgcctacaaaaacggcactgaagcttccaatgttagaaaggttatttatccgtccggctgatctatcgaccgatctatttccggatcttctactaggttgtcctcgattaagactgttatcgatcacgcacatgccaatgggtccgaaatcgacgttgtgtatcccagaaaacagtctgccgaagctcgaggtgctgaacttgatcgtcccagaggattcatatacagattcacctggtttgtacgcctcagccgtcaatttgatcaagggaaagacccagctctggaagctcgaattggatgtgccgtttggtctgatggaacgattgttccagcggctggaagtgccgaacggagtgaaggaactgacaatcgggcagtgggtggatcaaaagttattgggtctgattgatgagaagtttccaggattggaacgattgacgtttgagagtggacgttggggtctggacatggaggatagtgtgagtgattcttttttgactcttgaccgagctgtgccctgcgcgcatttgtgtatgtatgttggtgtctgtgaaatttgttctgtgagcgttgacgtgttggtgttcttgatatcatctagatccacctacctttataccttgcccacctacgctcgctccgatcacttcacctggactttccgctctctccgaccgtacttcctctggcaaccatcaactttttcgacgaggccgcaccattcttccacatcttaccgttgatcaagtcgacgtccgaagagatccaaaaacagattctcccgaggatggttccggttgtgcttggtctgtttgagaactcggctgagctagaagagatcgtgtggtcgttcggaaacacggactggttctggcgtatgggaacgtatgatcagttggagatggacttggggttctgtctgggtagaggcaggagggtgatgggaggttcggccatcaagacaaaaaccgaatgggcagatggtatacgtcattaattgaacgctgtttgtataagcttgctctgatggccgtatgaacgattgtatatatgtgctctctgtctgaggtcgagcggaccgaatcgatcgtcatcatgaaacacgatctgcaagtgcaaaattaagggcgaaggaacagaatcgacagggcagatagaattttggagggaacgataatcaaatactcggataaactcgatcgaccgtgttctccgagacagatccctgatcgtccctcgctttcacaatctcgcgctgggcttctcctgtccactctctcctcgcagacctcacatgttccgggtacctactattcggaacttttctgccgacgatgcctgttcccggtgcctgaacgctgcttctcgagtgctgccggccaacaaattcacgctcttcttcggcgttcgcctgcctgtcccgatccgaccataagaacatgtgtccgcgatcgcgaaggcaccccggatcatccattcatttccgctcggagaggctggtattccaatgtgtaaaatgttctgtagtttccatttgtagtgagcatcgtccaaattcctgatctcaacactgagagtttgtttatctggttctcctgttgtctttttctctgtcttcttccctatttattccttttatctgtgtgtgggtgggtgtgtctctctctctcgcgccctcctatctacttctctctctgtgtatcttttccgttctgactctgcactgacctggggattcaatgctttgtgtgcttcgctctattttgtgcacgcgcttgcactctctttctctgccttcctcaccgtcccttcctcaaccttgtttgtggtctagagctcttcttttttatctgccttctccaactttcttctggttcctggcctcaagtcaatcatccctttgacccgagatgccctctataaaccaagagttttttttttggttcatcacctttctttcctcttcttttgtcacccacttttcgatttggaactacggacttgggcaaccttccgttttggtgctctcactctcactttccgtcttcagcatatcggaaaatcctgatgcgctcgtcttcgactatgtcgatcctcatcgtcacttccgtctgcttattcttcatcgtctggggttcgttctttcagcgacagagttcaccacaggcggctacgttcagagatgaactcgttcagaacatgaacgaacgcggactcggttcaacctggagtagtatctatgtgatcaacatggcctctcgtacaggtgagctctcatcttacctcgtttgatagtccttccgctctcatacagatcgtttgcgatatacagatcgtagggagcacatggaacttgttgcgcaagccctacaactcaactttacctacgtcgaggccgtcctaaaagattcacccgcggtcgacttcataatggaacgactctgggaagagtccgtcctgcaagatcgaatcaggaacggcgaaacatcagcaatcagggaaagtgagcacccgaaattgtacggggagcagacttggtgaggtttttttgtccaaagaaaaaaagttacctttcttttcatctgaaacgtcctctacgtgaatgtgcgcatttttcctttcttgcgctccgcgaacatcaccacaggagagaacatgttctttcatcgtttgacaagcccaacaccgtattccctctgaacggtacatacgaaaacatatacttcgactttcccgcctggccaccccgtgagttggtctctctccctctctttttcgtcatcgtttccagacaatttcataattgaatggggttggaatctttctcctgtttctggaccacagaagcaccgctcgcttgctatctctcacatctgaagacttggaacctcgccctccaaaacgatgacgacagtgtcctcatcctcgtaagtgaccatgcctcgttgcgcttatttctttgatgtcttcatcgacgctcacccgaacgatcacctgataaacccacaggaggatgacattgatgccgaattttcattggtcaatcgatggcaggaaatgacccgctcactagccgatacggaggacggttgggatatcgtgtaagtctttcaaacaaagtcaaccccgtaaagagccgtgcatctcactacctgatgatcgctttcttcttgcttgccttgcagctacctcggctggattcttggagaagaaagagttcacaaacccacttttcaccctggtcttcgcaagtccaaccgaccgatgggcacccatgcgtactctctcagcagaaaaggtctccgccgattgaatggccatgtccacaacttgcctgacctgttcaccagcccgatcgaccatgatctccccacaaagtacatcagaataaacgatagtatgggcgcactacagagttattcggctactccgccaattatcattccttttgtcgctctaggatcggatattggaggagatgcttccgaaagatggggaggaatgtcagtacttgcctatatagtctcttccagatagcctgatgtcttattctgcctctttctctgttcttctcctttttccttcattcttcagtctggccgactcgacagtcgaaaggatacgagcattccaaggtcacccggttcctaagaaggatccaaagctcatttgggaaatgtggagtacggaagatatgtgatctgaattccgttcttatagactcatctttccccttcttccagcttttctttcctcttcgatcaaatagatttctccttcatttagtatcaattcttccatcttcttctgtagagctcctctcccagtcatacacactgtagagatagcatagctcaatcttgatctcgattaacagactgtttgtatctatgtcttgttgatgaacccaatttctctctctttctgttcttattgacttggtcacatgatatgatgcggtgatcttcaatgaaagaacaataaatcatctcaaccgcgcataaagggatgagttgtaagatcgttgtgaagcgttgagttccagttcgcacttcgtactcttagggccgaacggatttcggtctgacacgcgtcgacggtagtaatgaaggtaatgatttcgggtgtgaccgaccggaaagacgcgtcgtaaacttggtcgtttacttcttctctctctccttcatccacttgttcagtcacttactggctcacgcacgccctcaagcacccacccagcagctcatcaggagcacaaaggaccgatatggaattcttcaagacgacgaccaccgtgaccgatgacccgacagaattccgtcaaaccgaaattcaagtcctagacggtcagtttccaactcgtacctcgtcctctcacatgtctctgtcgatgtctgttctatccctctcttttccagatccaattctgacgcgtcatttatcttgcttctttggggatcagcatcgccttagcctgtcttcgttgtccgatatgtcgagaattttatgtcaatccggtgatcactacttgtttccattcgttctgtagtcgggttcgtatttatccgttcattcaatctaattgatcgggatgatagagaacagtctttgacacaagggtctatcaacttacatctgggttggaaaacttctgtattcctactctttctttcttttcaaaaaacgattaaaaaaactatactcaaaaacgatcatcgagttccgatagtgtatcagagaagcgatcgatactgatgtaagagatcgtcgttcatgtcccatatgtggagagaaaatctcgagcgaggggaatcttcggatgaataccgccttggaggttagtgtggacgcttataagaatgctcggtaagtcagatctatcgtcccttctttgtcttctctcctttttagggggttttcttgtactggctgttgactaaaagcacacgcgcacgcgcaacggctacctggattggttcggtttcatgaatacagtcccttgattctatcgttatcgaaacgtccggaacgtacggcatcttcaaataatagctcagaccctgactcgcgctcgacaaaacggaaacgaaacatagaagttatcgacctgtctgacgatgaagtcgaggaaaagggagattctggagttgccaaatcagagctaagcctcggaaagcagggctctattgggggaacagaaggatcaagtgtccctctggtttcatgcccaatctgtcaaaaagatatcccagagctcacaagtcagtccactgccgatctctcgtctctttcttctctgaatgtgtatggccctttactcaagtgattgtttccttgtcttattcttatatttgcacttgaagtcaacgaacacatcgactctctctgcaaaaacttcttggagccgatgacatcctccagaaatctaacggttccgtctgcgaacaacaacaacaacaacaacaacaacaacaataacaataataataaaatatcaggttcaagatcagaagatcgaccaagcggatctctcaatctgggatctaggtcccgaaggtacgtttcgttcgaatgttcatatctgattgagatgaagtgaaccgtatcggcggcctctgtttctgttggctgtgaacgctaaacggagtgtctctcattctgatcagtccaactggaagttcgagtgcacctcctgcaaagaggctggcaaagctgaattatcatacgatgactgagaaacaattacgtacgctcctggcggtaagtccttgttcgctcttttgtctcaatagaccaaaaccgtctcatgatctttacctttctgccttccttttattgtttcctttaaaggaacactcactcccaacggtcggaacgaaaccagtgatcactgccagacatcaacgttgggtccttcttttcaacgccaatctagatggcgctcatccccggaagacttctgtgcgcaaaattcttgtttactcgacttcttcagcacgatgcccgtctttgccgaacctttcgttctcacagtcttgcccttctttttctcctttttactcttctttctttgtttctttgtttctttccctctcataggatctcaggactgatttgaggaaatgggaagaagcaagagaacgagaatccaaagctaaagaaagaaaagagaaagcaggacctgttgatgatgatgcctatcaggttcgtcaacatatctcttcttcgctcttcgttctcttccctaatctcttttattgaattgaccttctgttttaatattttcttgaaaaaaaaatgacgcttggcctgtgcgacaggaacttcacaagtcggatttcaaagctttggaagaagaaatacgggtgagaatgaaggcggcaaaagagagaagagagaaggagaacgcggatactatctcagaatgaatatgtgtcttttcaagagtgacccacgcaatgccactggacatgacgcgtttgtgaagactttcatcttactgtgtcttgttatgtattgttgataaattatatatcgatcaagaatcattcagaatcaagcagcagtagtcgtaccctctgcaccttctcgcactgcctgaagagacctcttgagcgactctcgaagcttcgtcaccatggcctgttcgtccttgtcaggtgcaggctgaaggaagatagacccatcgattagttcattcatcacaaaccccagcgttgcacgaacaatggtcaaaagccacattccggggcattcaaggtatcgaacgtgagaaagaaagagagagcatacaatttgatcaagtaagtactcaatctcatcaatcgtcaatacgataggtgttctatatattccaagataatatccaaaagtttcagtcggcagagaggtacgaactaggtcagatgatcaggtgatggacaaccaacgatgaaggcgatgatgatgatgatgatagtgtttgatacaagatcgaacgaccaaaagagccttctcctcaaggagagagaccagtcaccgccaaatgagacgtgttaatggcttagaataaaggacataccggttcatgttttggcttggaaagatgtaaactcgtgagagaggcaagctcgacgtgaaaagggaaggagatgcggaagattcgggagttgcagaccaaatgtcttctttggaataagcaaatgacgttcgcacaggagccaacccttatcatcctacaatgcaagaggagaccacaagatcaagacaaagacgacgtggcattatatctggaatgtagcccgagggtatagtgtaccgtcatgatgatgatggtggtaatgataaagaggttgaaaaaagagaacgtatagagtggagactgcatcacattaacgaggggaagaaacatgtactataactaacggtcctcacagatgggcagagagggtaaatcggaacattgctcaacaaggagagtaagcgcagaagctagagatagaaatctatgctgctttcactggccaaaggtgtgaactgatttggaatgtcgaagcataggagccttgaaagaaaccgcactgggtgctcttctcagatccgttgcctgcctgtccctcaaagatctaggagcgtcatcactcagatctgtctgagacgtctctgttcggtgtaatcctggtcgaccttggagaaatgaggggaactcctcctgaggagaaggggtcgagctccgggtcgctgtggtagcagcccgtcggagggccggactggcaggcgtggtcagctctctgagcgcagagttcctagtttccagctgacgaatcttgttttgcacagaaggtgaagacgcttgcttgtgaagtgtcttcgatcgagaaggcagcgcgtcaaggtcgacaggaatgaatagatgatcgtccattgaaggaacaggtgggatttcgatcggtcgttcaactgacttatctatcgagaacgtctgggacaaatgcttcgccgtccacgcaagcttgacaggcgcggacggatgaagaatggcgatgtcttcgtttgtcatccggtcttgagaaaccagcggaggcgtggtttcagaaacagagcccgaatcggaggaagagcttgccaaaccaggcaggtcattcatcaagtcaccaccggcgttctggacggggaacgcagactggcttctcctagaagcaacggcaggactcaatttgtaagatctactgctcggaacgaaacccgtccgagcttcagggtccttttcaactcgagacgaactaggagccaaggtagctgcggtagaaagcagagttgccgttggggttcgaaccttgataggagaatgccgactcttcagatctgatagcgaagcagaaggccggattcgagcggtagtcgctggttttatcgtagagttgaccttgatccgaacgggcgcggccggactggcaaacgtgaacgaagccttcttggatactgatttgatcggggaagacggtcgagccgaagaagatgtagcagaagagaacgactttgctggcgacactgaacgatcagagggcggtcctgccaacagtgacgatcgaggtctggtctccctcgatatgatattcagtggctcggtcggaacagacaaggctgatcgaagtcgatctgatcgggaggtggtaggtgttgttggtgctgacccaggagcatgcagggccttaggggtagttgactctcgccgagaatgcatcgcttgcctaacctcctcatacgaaggagaatatgatgacatgggtctcgctggcggtctcgttgggactaaaggagaactggccgccgttatcaccgagggagacgatatatgagagctccttggtggggaactaccataggttcgatcgctttcttctccgctgttcagaagtcgggtagccgacgagattcggttttggacgacttgatggggagaagaagggccgatcggatatcgaggtgttattctcaacacctcgtcatcatcatcactatcatcctcagtcttgctgacatggttaattttgtctgcatcttggtccaaacctagcccggggctttcaaaatcagaatcatcagactgatccaacataatgttctgcatggcgagaccaatatctgaggacgtgatcatctcgctcattgggacggcctcgaattcatcgtcgattggatcacgaatttcgtcgtatccaaagggttccatcaaggacgagtcctcttttccttctggcacaagatccgatacttctggaccgggagaattgtaggcggaggttgagaaatcgaaataaccgtcatcgtattcgtcgccgtctccatcaacctcttctgtctcatcttcgttgcttgtctcgttctgatcagcggcggcggcggcttcaactcgtccttgaatgaaagctatgcttgccctgtgtgacagcacaggcggagcaggataaggctgagcgccacggagagtggaggcttcagaaggcgcggaagggttaacaacccgaagtggtcgccctatcggctgaatagattgaagagacccgatggattttgccttgtttgggatcatagcttcagcgggagcgagttgagcgtgaatctcaggccgaacaacaggctgggcggaaagaacaggaggcggttgattctcggcggtcgggatcgcgtttgacggctgcgaaccgatagatgacatagttcgcgttgaaaccggtcgttgattgagagggggaggtggatcgatcgacaaaaagttgataatcttgattgggagctcgataacatgattgttattgatagtgattcggacgacgtaggagacttcaatcagacgcgcccgaggaatggagagcgcatcaggctagacgggtgagggaacaacgttgaggataaatcaatacacctctcacagaggagtgcgtacacctgacaataagaaagccgagatagaagaacgtactggtaattgaacagagcagccccaagagcctgattggccaggctcgcaccctttccaccaacctttgccagtgatcagtcccctaccaccactttgaccaacctcgagaacagactcgctgacaatcttcctgcgagaagccgtctgaacggcgtcttggtctgcagtggcagagatagcgagattaggagctgggtgaaaaaacgtgacaatctggagaacactcaaggtgaggttttttatctacagaacgtgccgtacaaacggaacggaaaaaagatggagaagagatggagacgcataagcactgatatcgttgagtagcatgaagccagttcaagaacaaacgaacctttttggaagattcatttctgatgcctacatccagccaacactgttggccagccacccatgttgtcctagccgctttgaccgagagtctgacagccttgccggaccccgcctggaagtcctttctagcctcgattggaggttgaaaattcctcaggacaatccccatatccaagaacgggtacacggtgagctgtctgtagaagtgagcgattgatttcttgccagtagccggaaagaaaagcttgacagaagcgatgagaatgtatttgatgaaaccgtgggatgttcggaacggaccccgaggaaagtttgttatcggtaagggaaggacgaaggaaatgtcatgcgaaccggcgagggcctgcctatagccttcgtctggagtgactacgggagagtcgagcgcaggcgctgtattgtcaaataaggtggttatttgactcgagcccggagtgaaaatgggtagtgtgtgggaatgatgaaagaagatatgtcgagagctgtgtgaaggaatatctgagggaagagcgaaggatagccatccgtcagctatatgtcgacaaatcaattgcaaaggggaaaggccactagctcaccttcaaacccaacgactcttactttgccaccgccaacataactttaggcgaaaggagagaagcacagaattgagacctgaaatgcaaacatatcagacgcgcgacaacgagaacttacacatctccttccttcttattccagtctccaaccttgacttccattctgccctggacatcactgccctcgacgatgatatctctctcaagcagcacactgccggaagaactatattcagcatgccgtctattctctgctttgctacaatatcgtttcttgagacagaaaacttactcgatctggactctggcttttcgttttcctgcttccagccggacgtctacatctccaccttttcctttcgcaccaccgacaacttttctgccagagtctccctttcccaagattctggaaagctcgtgagtgtttctgactgggccgacaccatgactcaacaacgtgcccgctcgttccagtccacctgtactaagagacctggggcgtgcggctgaaccactgagtgaagacctgctcaatctagattcttcaactgttttaggcggtgggagagacgattctctcatccttccaagaacagggccggcaggtgtgaaaggtgtgcttggaaaatggccaatgggactaccattgacaatgtggttgccggaaggagtgaaagctaaatgatgagacccagattcctgaagtcgaagcattggatttgacggaataagagagctaggatgatgcatctggactagcgatcgagatcgcggtggaggacccgggtgagaaaatacaggttgagagaacgagccactcgagtcggacgaccggaaattgggtccttgaggagggacgacgggctgagggttgtaagcatcctgatgcgcagacagcggcctggacctcgggccgggtgctgtcgaggctagcggttgatgattagaactagggacatcattcggacgagactggtgagagctggctagtggttgatgagacagatgaggatgatgagctatcttctcgtcatccgaccgctcaaaatcgacgtcgtagtcgtagttgtctgggtcggcaacatgctcgaacgactcggccatgctgtgtctcctagggagaagttccttgcgaggagagtgcatgtctgattgtctaggacggctgaatatgatgcctaggccgtgatgaagatgagggagagggataggatgttgtgagaaagacgaagctgaatctggttggcattcgttgaagtcagtcttgttaaagactttgccggagattgtcggtagattcatcttccaacaaagctaacgcgtcatcaaccagacgcgtctcaagaaagataaatggaaaggagaagaatgaaaagactgatgcctatccctctttatacattctgtttcactagtcatgacaagggaaaacttccttatacgcttacacatgtgcgcttcccatgtatgtcattctgatcaacgaggttccttgtgtacataggaacagatggacagccagggggaagctaagaagttaggcgaacgcgtgtgttgttcgtcgaacgcgtcgcgtcgtctgctctcatttacgacgcgtcatttataatatgctcctccttctggtggctcatcttgactgtttgctccgttcatcttcatccattctgttgcctactctttgtgtgtgcgcgcgctctctctctctctctccctctcgttcacattcttagactctccgagccttgatggactttacagacgtctatccgtcgtcatccattccggtgttctcgccaggttaattgtttcgtgatattcatgcttccctcgttcgcgtatccctggagctagatccacttacacttgtatctttctctcaatcaggctcaaacttcatagccaatgcagtctcatccagaatcatcatccgaacgtcccatactcttcaaatcgtcaagacgttccttattcctgtgattcctccgtcaattccctcgtcttcttcctcgtcgcccacgtcatcactcgtatccaaaaactctcaattgtcacgtagaccaggaattggatggtcctcttcctcttcatcctcccccgcacttagctctccccgaccgaaagggcctccagaggtcacgcatctatcattctctcccttcggtgacaaaatacttgccttttgcgcccgaccgggcgtcgcctttgtttttgatctgaaggatccggggatgagcgaagaagacggtgtggaagccatgttggaaggtggagtcgagaaactgactagggtcgagtggataaaaagcggaaacggcaagggactccttgcttggtccgattttggggtgagtttgtctgctgagtttcgaatttgaagaagctttcgagattaggagggcttacatgttgtcaactggaccaagcttcgactcacaatctggaatttggatgacccagaaagtcgatcattcattcagaatttccagtttatagctcaaggttagctcagtctccttcttcctttttaagtgtctttctcacgtcattgactctccttcatttacaccctatgctcttcatggtgacaaataggacatgcctggtcggctgataatcgtctgttctatctggctgaaagatacaactctagagactctgtgggagtctatgacacgctcaacgattggaaacttgtctttgtaagtctatttcattgtcttgactggcgatatgtggggtttgcgtgagattgtctcacgctgtgttatccatcaacgtttcgtagcgtgtacctacacaaacagcttcccttcagggcatctcaatcgcaccccgaggtggttacatagccgtttgggatcatgctcttcaagtttgtttcatcctccttctgttctcgtctcatttggcctcatgaactcatcgttcttgctaattcctcgataccatgccactctctcaaagtataaacttcaactgtttcttccgcctctcaagacagcccttcaaacgcttcctcctccgcctcttccagcccaggtagagaacattggactcaactatcagccttcttggccagatttagggatgggtgtgcgctgtgtcgcatggagaccaggaggtgaatggctcgctgtgggtggatgggacggtcgaataaggatcttgcagaagagcgattggggcgttatttgggttggtcctcctgtgagaatagctccagctggctcggttcgtcctataaattctcgttttactctattcagaagatggcgcaacggctgaacatcttagcacattacaattatcttttgcgtatacggtgatacaggttgtttggcatgaaccgatagattggtataaccagacgggtggtcgagggattgttcaatgtacgactgttttgtattttcttcttctctttttgatcggtgaaaccagtttatactgaatcaaggccgaatgtcctactatcattctttcctttgcgcgtagatcatctgatgaatacgccggcgacaatctcgttcataaagccggacccgaagcagcatccgccaaaaatgggtgtatcccaactagagtggaatcaggacggcagtcttttaatgagtcgcctaggttcgtcctcttgaatatcctaatcacttcccaagaatctgtgctaatttatatatcttcggcgcatatatcatcttgcatgggattcttagaaaactctccggactgtctgatactctatcccttcccaacagctgatccagacttcgatccatcctcgctcgagtcctcttccgacctcccgttttctgttctcctccagacccggccaatattacatgcgacattccatcctacagattcgaaaaagcttgcgctttgcaccggttcaaacgggatttatatttggaacggggactggatcaccgacggagctgagggcgagggtgtagcggagtgcataggaatcccttccagtacgtgtcgtcggcctcgtttggccacttctacttgaacttaacatcgtgtgagtctttgttgtttgtgtgtcgtgtctgaacaggtccattttcggctacgtctctcaaatgggcaccagacggtgagacgttaattgtgatggataactcccgcggatcgcaaggggaattcactttggtgttcgaagctaaggaggatgccggaggcatgggtcaagacaatgtcgaaaacagcccagtggaggaaatgagtctaatcacggaggaggaggaggggaacgaagccatctcggaggtcagcttgaagatgcatgacctgttgtaatcttaattcaaaagagaacttgatgttttatcaaaagaaccttagggagattcaacatctttcagcggcggagtccgagattttttcgctagtcgacataagagatgatttcaatagtaaactcagccgggtgatgttacataaagtaatatgtgaatatatacgaaacccttcgatgataacacaaatgacaaaacggatacaaatacagggagccagggtaaccagagcttgatcttatgcaaccagtgagaagagaaacgctgaagacaaacaacaaccaagaagaaatgaagtcaaatgcatcaaagtcgagcacctttgggaatttttttctgggcttgacggacaccgagatcaccgagcacatcctctgctcctccacttcagaaagtcgcgcgcaaacagttaatcaacaatgtctcctattagaatcatatacagtttcagagaaaaagagatgaaaaggaaggacatacagaattgcatcaaacttctgtgtgcgggaagccatttcgatgaatttacccattccggtctttgtcaatgatcgaccaccaaagatttggacggcgtcgtccataatctcatttgcaacacctatcggattcggagtaaacgttgacagatcagtctgatgatgagcagagatgggcgcataacatgacacaacaattgagagccgtacgagttgagtacatcttcaactgatgttggaaaacggccagtgatgattggtaagttttcatatctcacattcttgatctctcgagtaggctcttgggcaaggaaatggcgacttacgaaagcgatttgaccagccaagtggttgctttgctccttgtagctcattttggtcatctgatacgttacattctgccggaaagcagaaaacaagcaaaacgtgttcagcatggaaatcctcttattaaatagacaacgtggagaagatatcactaacttcaagccaggattgtacagcttctaccttagcaatcatcgatgcaagcttgtatcgaatgacaggttgggcgatcaatggttttccaaagacctagatccacaagaccctcatcttagttgggtgtgtccaacctgttaaaaaaagtgtatgaagctcacgaacctttcgttggttggcccagacaagacactattagcaaaacaaatcagttgatcgtcagcgacaatccaaatatttatagcctttgcaaatgtacgcccgtacttcttcaacgactgctctggaacttctagcagatgaacagcacatcacccaacctaaaaacagggcgaagccattgatgcatgttttctttaatatgtgctttggtcaagacaggaagcaagtagagatggaacagacgcacgctcatggttgaaattcgaaagcaccacataaatccctgcgtcctcgcctccaagtcggtactcatctgaaacagtgacattgtcaaacgtcacataggctgtgccggcagcagaagagtatctggtcttgattggcttcgtttccacacctggtcctcgaggaaccagtaggacggtcagtccaccagatgtctatagatgtaattacgagacaaacagggcgtcaaagttagcatgtacttggatttaggaggtcaacacaactttgtcagacctacccgacaggcaaccgtgaagtaatcggcaaaaacacctcctgtgatccacttcttcgtgccgttgattacccaggacttgccgtcttccgacttgacggccgaacaccgaagcccggttacatcactaccagcgaacgcctccgatacggccaaacagatgaactatgtgcatatgcgcgatcaaaaggtgccttgtcagtgtgcttgtgtgggacgtcttgagtatgtttacatccaatagaccatcaaagcaagattcagagtatccaccttttcccctttgaggatttcaggcacaacctgttcttaaacattatgatcagcgatatcttcttgaaattacgtgccggatcgcgaaagccatgcaatgtaccttttctttcaaagcctatatagtcagtagtagaaagaagtatgtatcagctctcacatccctaggtatctgaatacatatcgactcgaagtctaccttagatccaaaattgatgactggcggcagaccaattacatttcctccaccgagaccatctccgtagcctcgagcgccgcacattacaatttcttgagtgattacgagctcatggaagtctgttgacgaccacctagtaagattatgattcaatgtaatttttgaaggcgtcaaccaagcgcttacaatcaaagttcttgggctcaacaattcctcccatgagctcaagcccatggagatgcttgccaggctaccaagatcaagtggggaaaggacaagcgtgttgagctgactagccaaattgtttccgaaagaagaatgtgccactgtgacgtaccccgaaacgcatcgcatgaacattcttgtctgccatgattttgataacctctttactaggatgttttccgttatcctcacatgcttgtgcatcggctaggtgataaatttggaatatattaaggtcagttggaaagatctgaagtgcatgtgtccgacatacacacttacggtagatgtgttcgtcctatcaatacagcaggtcaaatagggatcgggttaagcctcctcattatttcgatgcagctgaacaaggataaactatacatacgaccatctttcgcatttctgctcgtaagatcaacgcaaaaaaagaggttcagctacaagtgagtggaatcaatgtagagaaaaacatacctttctgtaacgcccgatgagtatcattgtagtaaggggtatgatacgccttgctgagccatgtctaagttcccaatcgaaattcaatcgatttttatcagctatgtttaagtaggcatgtccagctcagctgccacgagtagtgacgtgcatgcataccggttcggcgtatgggacttctctcagtcctccaacttctctagggtgaatcttcttcttctgcccctgaatctttccaatttgaagtctttgataggcaggtttgagaagaacctcatgtcgatgaagtgaaaagaatgcctcggtggcatcttgtccggctatagatcggcaagcagcaagtaccacaaatcagttgatcagcgatgaagaaaatcttatcggagcttggtcctcaaacagcgagttgacggacctatctcctcatcaaacagaactgatttccctcctgggtgaaacttggaaaaaacagacagattgtatactatagaatcgctggattcccacaaagaacaaggcaacaggatgagtttcggttggtaggatttcctatcataatcatcgtaatgctcacaccactacccaaagatccccctccttgttatgttttgcaacttcctcaaaggtgtactcctgaagctctgcttgggatttagacattgtgataatgttccttgtgtatgattatgtgtacgtgatcgagcgaatatcaggaaggatgagatctggtttgaaagagaatgatgttgattcgttgagccttctaagtgtattctctggtcgactcgaacaactcggctatttatgtttgccgaacccgaccgcgtctcgaggtcactccattcacgcgaccagatctttctcatgctcttgtatctgttcggctttgtacaacgtatctcttggagaaaccagcatattatcatatctcaagttacctttgtataaccggtcctgtacatagacatactcttctacgtcaacacagccaaaccgtcgttactctggaatggtaaggatgatctatgatggattaaggcatccatgcatatatgaaagaggcatagagttatcagtgaagcgaagaagaatctaacaaagatgtacgagatgtggttgactaaatgagaacgtacctttccaatgttctggttggcatccaacatctcatgagcctcaatgactttgctccaatccaactctttgttgacgatcgattgaagttcgccatcaggcacgaaatgggacatacaatccttgttgaatcgggcaacaaggttcgattgataggacggatctcgagatcgcagcgctgttgatgaagtgaacagtctgatcagcatgagatataccatgttgttagagaccaataagaaggaggtactcgatccctggatccggaggcgcttgtagataatctttccgatagagacgttggcctcggcgctgcaggatcaaacacagtagttagtcaaacgattccaaaagtagtaaagaaagggctgtatggacttgcccactcatggcacctaggcagatcattcgaccatccttggccagcgagttgatgtttttctccaaataatcctacaaagttcactcttggtcaagtcaagacacatgttagacggagataaattagattgggatggcctaccttcccgatgaaatcgatgatctaacattttgttcaaaccataatcctcagtcagcactccctcgaggctggagatgagagatggaaacacacaccaagtttacaccctgattattcgtctccttcaacacgatctcctcaaagttctccgtcttgtaattgattcctctcgtaggaggacttttgagatgcagtaaagcatctaacttctcctgagacccagcagtagtaaacaccttagtggctcctaagataggtgccagctggtttgcagcgatgcccactgaactagcaccggcgtgaattagaacagattcctctggctttagctcaccaaggacttcgagcgcttggtatgcttgaagcatcaatgtcaatgagatagaacagttaggctcatcgttccaaactatggcgtggtgtgagatcaagaaagaagatggctggatagttcgtcgtaccggtaagaaagacctctaaaatacctgccgcctgagaatgtgacaagtactcaggcttctgaaggaccatatctcccgatatcgcgatgaactccgcataggctccctatgtcgttgatggaccaacttcgagggtgaatacttgcgatacggacaagatctggctataaataagctgagaaagacaatcaaacgtacgccgtatgccagaccgaaaacctcctggccctttgtccatttgtcactcttagattgttctacatgaccagagaactcgactcccaggatcggtccagcttgaggaggaagcgggtactgtaaaattcagacgaacaatagatcacctcggttaaagcaactatttccaaggctccgaaccggatacacaaaccgactcactttgcccattcgttgcagactgtccattcggttcaccccaatcgctctgatctgcaagtcatacatcgttcattgaccgagaagagtatagaccaggtgagatttcacagcatgtatcgtctatcaaacacgagcaagtgcctacataccttaaccaatatctggccttctttgggtgatggtttctcatactctccaatgtataacgccgagggcggtccggcctcgcccttgattcgaacggctcgcatagtctctgaggaggcagacatagatttcttataactgtttggactgaagatgagaggagcagtagctgaacaaagtgcaggcaagataatcaaaagatccaaatgatgaatcatgtttttcatgttaaatacgaatgccagatttggctgcgtcatcaatcataaatcccggaataatcgatagccgatgacaaattcaaatttagcactgtcgcttttaataccctactactcgcttatagatgttggtttggtacttttcacacagagagagacataacatggctggctacactattacacgagagcgtactgatgagcaacctgacagaagatatagaggtaagaactggaaggaagggatgaaaggagatgttaaccgagaaacggcgttccagtattcaagacatttaatacccctgtccaccgtagggctgttgctgctgcggctgaccgtctggatgagaagagaacagaaaatggtgtcagaaaatgctccttatatggaaagaaaaaggttggaggtatgattacactcacatcctccctgcccaccgtacccggtctgaccatatccctggtcaccataacctgttcgatggaattgagaataagaattttggtatgcagaggaaggatttagacgacagatacaaaggaagatcacttacctccagcctgctgaccaaactgctgctgaccgaactgtggctggccgtatccgccctgtcctccgtatccaccctgtcctccgtaccctcctccaccatatccgccaccaccatatcctcctcctcctcctccgtatcctccccctcctcctc

SEQ ID NO: 584 - DNA, 35310 bp, Xanthophyllomyces dendrorhous
agtcaagaccatgaatagcactagcgatcgatggtagatactactcacctccaggcttagagttggccaagttcacctattaagttaaaaatagatatcttttaggataactctgcgatgaatatgataattcagggactaacccgaatacgtcgtccgtcaagatcctggtcattcaagccgttgatagcagcttgagcttcaccatcagtttggtaagtctaaattcattcccatcgggcacacacacgaggttagccaagaaaggtaacatcgctatgcacccaaagagtgtacgttcagacgcgacgaaagaaaactcacaacaaacccgaatcctcgggacttgcccgtctctcgatccttcatgacaatgcactttaagttttgtgaacgtgaggaccagaattgtaattgaaggcagcacaatggccaaacggatgaaccacaacagtaacacagaacatgccatgtagatgcgaacgagccatacaaagtatgagacggagagcatgtacggccgagtcaaacggaagatatgtcataggacacaagtaaatcgcaaaagaagaaatcagacgatgaatcagacggagaacgaaacacttttcagagagactatgcgaacatcgatgactgttccaaagttggagaaggcctgtagatacaaccagagggaaacgaccatagaaaaaatggggagcacgcaagcgagatcagtaccaaagcctacttaaatagggaaggattccgcgagatcatgagactggtgatactgacctggctcagaatatcctccgaggtgttccagcttaggtttcctatgagtgtcaaaggacaatgcgcaaatcgacaaaaacgtcagcgtttgtattccactaccatcgatctaatcggatacatcaacagtcccatctcagctccatccgccctcaagcatcttcatcctggtatccatgttagcggccgtatttgaatatattaatgaagacgcgatcgagagagtaaatgaaggtggctagatgtcgttcttcgtcaataagctgactaccgccatctcttcattcatcaccgtgggtcacttcatctaagccaaaaagagcgaaagcaaagaagagaagaaagaaaaggacgtatatggtatctatattcgcctgtagataatagagaactgaccgacgtagattttgctcatgttgttatggatatcaagatacaaaagtgaggaatggggtgattgtgaagaggaagaggggagaggagaagagaaaaagagatggcactcgatctcttggggccaaaatgcgcagcaggcggttttgtttcttctgtagcctttctctcttccatttccatcttttgacgacagacgacaccatcagcatacaagacttctcgtgaatatgttcaatacttatcaactagctcatctggcctatctcaagattgttcttcatgcagcaaaggtgaggtcgctcctttgattctcatgaaatcagatctaatcgaatcaatccttctttcacgtcagtatccgtcatctctcgtcaacggtgttctcttaggttctgcatctggatcagaagtcaacatcacggatagtgtgcctctacttcaccattggacctctctcagtccctcgatggaggttggattagaaatggtttgctggttcatccatatgtatctatctttgttggccgtgttgacctaccttgttaccggaacgattgatattgtgggcgtgttaaacgttttaggcagagtaccatgcttcatcaaagggactccgtattgtcggattttatcagggtaacgagcgtctccaagatggagagctctcgacagtaggagttaaagtagccaattcaatcaaatcgcggtttccgcaagcggtcgttttgatggtcagtctggccctgtcttcattcggcacgcagacatatgctcaggatctattccatggttatggtttataaatttcaaaaattcagattgacaacgaaaagttgaatggatctgaaaataccctcaaggtgcggcgctctcctctttaccgttcattccataaagaaacaaactgatagtgttctgtacgtttaaaaccgcacgccgtgcttaacgctctaaatggatcgatacaggccttggtctccgcatcaaactctacatggtcggtgacagggtcaccagaaattctaatcctccaacgtccaacaagcccttcggacgcaaagaaagctgttcaagagggagcgttcaaaacattcggtgactttgacgcacatctagaagacgtgtatgtccattcatcaaatccttctcccaagcggatgctttctgatcaaattgagcggcatgttgacttatggaatatgattcaccttaatatctgttggctcgctcataatcgtagcactgttgactggctcacaaactcgaaagccatcacaggctgggcatgatcaatgatgcttcgttgtataaattattatgatgtattgaataaaaatacacagtatagtcttccgcacatcatcgaagacgtaaggcgagttatcggagaacccgggtgagacgacttgagtggactatttagtcgaacaagcaagttagggttatctcagactgacgtcagactgacttcggctgacatcagcaaacccctatctttgcgactacgccaacgcacaatcgccagattgaaccgccgttttcgcttggtttggtgccacatcctacgtcgtccgtcgactcattcgtccacccagccagcattaacacatcttcttttccaaagagctcatctacaaccggtcctgagcaccatttaaattcaaaaagaccagtttttgtcatcggattcacataatatattctcttcgccatgtcggatcaatcacctccagatcctcctagtcctacaattccttcaccttcgattgattctccacaggcttcggcctcgtcgcttgctgccggagaacaggaacgtcctcgcgtaccggcatcaactgagtcctctaatgttcgtaatatgatgatgtctcaggatgatataagtgagggtcgagctcgatttatgcaggccctgcttcaaatgggtctcgcacccccaacgggcgccccatcgacatcacctctgcagctacccgagttcaacaccaaccaacctaggcggccaggagatcccgaaatccctcaaaacggaaatcagcaatcctctgagttcacattcgagttcattttcgagagtggcccggaggaggacatggctgttgacgatgaaggagcacctggaagcgaggcagatatgatgcgcatggcaaatatgatgtttgtaagttatcttcgtcgatgcatcattgagttttgactcatctgtccggttcaggacttgatcaagtattgacatcctgaaatcctctgaacagggttcctgggagaactcatcgccacaagctactcctggttcgaccgctccatcaaccgagcctgcactgagcgcaaacccgtccaacccaccttccggctcttctttggcttcaacacaaccagccgcgaatgtcgaccctccctctcattctggtcctacttctactccagctccaggctctcgtccccaaccatctcgtttgccgagttttggaggaatgctctcgtttctgcctcccagtttctttgccaatcagccgacaggtagggagctggaacgggcaccttcaaacagcccttctaatggatatgaacgaccagctaaccccccagttagtcgtttcttcattctttcgcttttcccctcttgaatccgtgattcgtttgcttacggcgatcactttgactgacaggaagacgcactggcgcctccatcatccattaatatgcttccacccatattcctcggaggtttcaatggctctgcggttcctcgaccctttacttctgaaacagatagttcaaattccgtaagagttcttctcaattatgaatgaacagtcatatctgtttcggcttgctcatctctttgcttcatcatctgtctgggaacagatcccggccgcagcacctggagcaaatccggatcaacaaccgatagtacctacactacaagacgacgtgatgcgggccacatctcagatgttcggcgggctaaatccacctgtgattccaccgtctacatctgctcctaatacgtcacgaaattctaatgctggttccaaccctgtcggagagaacgcaaccccatcagtacaccctatgcctttcttaacacaaccccttctatcatcgatattccaatcgatagggtcttccggatcacctcagcccaccgcggatgagtcaaccgccaatccgaacgccgaaggtccaacggtaaactccgctcctgacgatcctacccaaccatctcttcaaggtcgaccacctatgccgccaaacctgaatcttttcctcagtcgattattctctcggcttccctttccttcctcgccagggtccgttgaacgatcagacccgatagatccatctcaacctaacagaggtcaacctagtttcatcatcgccgtttcctttggcggcccgccgccgatggaagacaaggctcctgatccggttcgagcggccgagttggtaaatgcgttggacaaaccctcgaaggcgttgctcaagaggctagatagggtgcacaggctagatgagggaaccgatggtgtcgctgaagtggacaggcagggagcaagatgcgcggtctgcatggaaagcttgttagacgacgaggaaggagatgtcagatctctggtgagtctttgttttcgtcttcaaatacataaaaataaaactgtttatccatgaaacctgatcaccacgctcttccctcttttggatttcttacagccttgctctcatgcgtatcacgaaaattgtcttttaccatggttatcaacacatacaaattgtccatcatgccggtaagtgtcggagttttgcgcctcctttccaataagctcctattattcagcttgtgacctcaaactgtcctgtccctcctgtgtagattcgacctcgatcctctttctaccactttgaacaccagtcgaatcaatcatcggaaccccttccttcgtagaggagcattcggcactcggacacctactacctctactgcacagattccttctgctgggtctttggtcaggcctcatccgtattctcgaaattctacaccaagttcttcaagaccaggcacaccgtctgagtcaaatcctagcacgaccatcaccgcatccactcctgatacatctacacatccatctcctcgttctcttctaagtattgccaacccgtttgcgttgtctgccgaatcagaaactccaaccccaacaaatccttcttcagagttgacatatgtcccacctccggctcggttgactctgcttgagcacttgctgtctctggagagacgccatcacctccgctgttccatgccttcttgtatctttggacccagtgaagaggatccaacacccgatccgagactgatgttttctctgtctaaaccgggggatagagatgctattcttaaaacgtgcgagcacgagtttcatgaagaatgcttccgaccccaagttgagactgtaggcgatcggcttcaagtaaatgaagaggaaggtagagttgacatttcctgtctgatcacgggctgtaaagcgctcggatccatcgataagaagatttggaagtctagtatcaatgaggcaggaccaatgacggtggaccaaaattctcctaagcattgttgatgatattccggtacgttctcattgtacaaggctctcagccaaagagcggatattgcaccctgcttatttctctgatggccttcctctccttttgtgaatgtttagtttttggctaggtttgagatgtcttcaatcagtctttcccacagagcgccatgtttgaatcacttgatccttctaattcattcttatggtgttcattgcacacgtttggggaatgctttctctttcttatatgcctctttctcgttcctcattttttgtttccttatcttgttcttctgatcatccatcatactctcttactcttgcggtctacttttttatggcctttgcattcgttttgctataacatgtatcaatttttgttctctattatctggttgttgtctttctgtcgtcatctgatgactggccgggtcaactattcctctcacaagcgcagtcgagtccgtcacaagggcggcgataatacatccgatcagacgcttgctcccgaacctagacaaaaattattgttctgatttgtttccatttggctcgcctgtctttcttttcttttcccttcccttttccaccacccacctcctttctcttctactttcccttccggtccccttcccttctctttttttcagatctctttcaagatggccgccaagctttacgtcggtgagtgttttcttgttcactggtttctggatatgtgatgtgtatatgtgtggctttttctctatcaaagaagaaaagagatggctcttgtggaacgaggatcgagaagaaaaaactttcgattcaagaacaaaagctctcagattccatgtgactagatcattactaattcgttcctattgttcttttctttcttttctaggaaaccttgtatgcattccttttacaaagctgttacaaactatttgacatccttgatctttgaaaatcctaatgaatgacttgtttgaaccgaatcttggtatattcgatttttcttagtcctggtctttcactgatgactcccttgctcagactttccagccctacggaagcatccaggacgtgggttcttgtctctgcttgtcttttctctctcattgtcatcacgtgcctcgacctgtcgttgcttggtcatggtcgacgctgttttgcttgtgcatgcttcgctggcggctttctgatacacgctctctttgttaccttttaccttgctttccatcttcccctactactcgttacgctcatggctgtcatcgacctgctcgcttcgtctttggctatcaaatgctgctcaattttcaacttggatcacttggtttgctctctcgaacgtttttgatcttgcgtccttggaaacaattcactgtcatcttggcttgcatataaccatcgtgttgaaaaaaattcttcaatcttcttggccgtcatgtcgactcgaaatctaaaacgactcatcatatctcatcaatatgggttcatgcaaaactttgttacttcttcacgttgtacacatgctgtctcaatagtgcattgtcatgaaggatcgagagaccggtcgatcccgaggtttcggtttcgttgtaagtcgtcacacctggaggcaatcgcccttctccgggcttctgttttttcctcatctctaaggtttcatacatattttctttcccatcagaccttctcccaggagagcgaggcccaggctgccattcaggctcttaacgagcaggagatcgagggccgacagctccgagtacgtcacagtattcccctgaggcgttacagtgcatacacccatgttaaacattcttgcccttgcccttaattaattttcagatcaacctcgccaacggtgaccgaaacggaggtggttagtagtttctgctcaaagctggcttaattctgatgctcttccatgttaacatgatgatttctattcagccggcggtttcggaggtgcttcccagggataccagcagcagcagtctggtggttaccagagtggttacaactccgccccccgaggtggatacaacgccggtggtgacgccggcaccaagctttacgtcggaaacctctcgtggtcttccgatgagcagtccctctcccagaccttctctcagttcggacaggttacctctgtctctgttgccaaggaccgagagactggtcgatcccgaggattcgctttcatcaccttctcttcccagcaggaggctgacgccgccatcaacggcctcaacgaccaggaggttgagggacgacgactccgagtgagtaagaatgatcgttcttgacaactggtgtagatcactgacctgagatgttttggtttccaaggtcaacatgtccaaccctccccagtcttcctacggaggaggaggaggaggaggatacggaggacagcagtcctacggtcagcagcagtcttacggacagcagcagtcctacggtggacagtactaagcgctgtctgctttttcccgcttctgtttcctcgagtttttttcccgctgtgtttctttttcccttccctagcttgttgaattgattgtttcctatgtgactctcccttaatcatgtctttggaaagaaatgttctccttaaaaaaaaactgttatactatactgcggtgtttgtcaatctgcctgtgtgtctgtgtgtttgttcccgtatgtgtgtcaaatgtgaaagcaagaatacatggagagtgaggggcaagcgatggacgtggaacgacgacaagtaggcgcagcaggtccccacaatccgctcgaaattagagtgtgaactcaaggagacagatgtaataacaggtcatatatgacggatagagatgccttctttcgtgtatccgtgcatgtgtgtgcatctccctgtctctctagctttcatttttctccatctcactgagacggagtggcggaatggatcctatgtaaaaccttgatgtaattttgatgtaatcacttgtttaggtcggtcggatgtggagcttactaggtgaatagtgacagaacaggggacagaagaaacagagatcaacgaatgaaggaggctaaacgacgatcgtcacacagcatccgggtagccccgcggaataatctgatattttaacggggctaccagctgacgatcctccaagccatttaatcttttttccgtttctccgatccctctttgccctttgctctttgctctttgctctttgcttcttttttctctctctcacttgtgtatctatttatttgccaaatcaagccggaagaccaaccacttaacgaggaagaaaagagaagagaaaaagagtaaagaaaaaagcgaagagacgaacaaaatcgaaaagagaattgaacagaaaacgacacgcttgaaaatcacaacaggcaagaaacacgaaaaacagttagcaagccgggacgaatcttcagttcattcaactcgctcacccgttggtctgttgacacctaccgcaagggatccattcagccatccactcatatcgctccttactccattgtctagttggaacgccaggacctttcagttcttgagcaagtaaacgctttggaaaactctcttctcaaccggacctgacgttgttcaatcgtctcataacacacactcacacacatacccggtctaccgatctttcgcttataggtaatatctcagatcctgtcatcacccaagactcgagatccctttgattcttaatcttttccacgaatcttctcgactctagctcgacgaattctccaattccgtcgtcttgcatacacacccacgcacatacacatacacatacacacaccacacccgactcgttcaaatacttgtctctcttcgcctcaagaacaaccatttgacggaccttccttatctatcttccatccccggatgccgttcaagtttcctagctcattccatgcacgttcaccttcgggctcgtccccatcgacgttgatctgtcagagtccattcagattcacttcgtctccaccaaacgagactctttcttcaagtccacagtcccagccttcctcgacggcagcgagcagcaattggcagaaacaaccatttgcgctctccgccaccaccaccaacaacaacagggagactacctcaacttcccctccttcatcccagattcagtcagactccgtcacttcatccgcttcttcatcctatgcatctctgccttcgtttacgtcttctgtagatacaggaacggattcttcgagtctgcatacagccgattgggaacatgaccggaagctttctctcggttggccagagtacaaaggatccgatcttgggccgagagaggagaaaacaccaaagaatgaacatcctccatcgatgacccaggggaccaataagggatatgcaaaccatccttttgttatctcaccagaagtagagaatacaatccctctagggtgagtcttgtcctttctagcagtaccctgtttaatttgcttcttatatttgtcgtcatcatcatgactgattatatggaattttttgtctttccttttgctaggtcatctctgtcctcttcctactttccttcatcagcagtattgcccataccctcaaacgtctgcccaccatcaggctcgatcaatagtaatcttgtctcgaccaacctagccgataatgtgtccagcccatctttgtctcagcttcactcacctacctgtgcggcctctacggtttcctctaatggttcccctgatctttcgtcgtctcttggttggcgttcgtccgtttactcggatgtttcctcggcatcatcgacccactcggctagctcaagttgctcgatctcaatgccagtagtaccgagaccgtatttgttaggagcggatgggaaaggcgaggacgagctggatctgatgtcggatccgggaaacatcgtgatcgaaacgacggatgacgcttatgtggttgtggcctgccttccaggattctcgtaagatttccttactttcttttctatctctatttcaaggtatgtgtgttggctcgttgcctaattcaagtcgatatttttgcgaatctcagcttggactgtatcacattgacgagcaagtccagacgaacgcttcatattcttgccgatcgatggggcgaaggcagtggtatgttctcttctcatgaattgcccatcctcttgcttaccattcgttgacaataatacttatccttctattcttctttcctcctggacagctcactttgagcgcaaggtctcatttggcccagacgtcagtatgtctgggatccgtgcccagttagttcactcctttcgtggtagaagtgcagcatgtgcacacggtatctgacagatttgatctcactttgctacatcttgacaggtttgatggatcataccttcgagtgaccgttcaacgaagaaggcacgtctcttccggatcacttcacgagcgatcgttcacttcgctcttcaatcgagccagctcgcccaccttcgaggatgaccgacagattcctcctgccggattctatcggtctgccgctccggacttgactctcaataagaatgcggccgccggctcgtccctgagctcaggcttgttccagccgaccggccgatctgcgtctagtccaccggggcatttccagtaccctgttcgggcgcctctgcaatcacttcgattagatgaaggattggaggtcgaacctaccgatgtcggcggcttccttcgagcgaacgataaagggggtacgctgtctgaatcaaagatggaacaagaactgaaggagaaggatcgtttgattgagaacgaagtcagccggttgacattcgctggattctgcccggatttggtcgaccagatcaagcgagcgagggacagggcagaccgattccagttctgagcgattacacctggtgcaggtgtttctctgattctctcttgtcgtctcttttttccctttagctctctctctcttgtcctgcccctttacttcttctgttcaacccttctgtctttcaattcgctacttggctagatatgggtaaagttcactcctttacttgcctgcatacactgctatactgggtggaacacacagatgaacgacaatctgtacatccccttctttcctctgcttcgtctcttgtctgctttgttggatcaccttaaccttttccgttcatatctatatacattcttggataccaactaaagtttttttttttccgctttgctaactcaattgccttacaatcatcttcaaccttctgcatactgttctagtcgttccatctttcttgattcatctaagctcgtcgctctcttcattcgtcttgctcttatcccctacctctctctcgttctttatccctccgggtttctactgtatcaattctttccatcatacagtttcgacctagtcctccaggcacactctgtcgtccgtttacatttcctctatgcgctgtacaactctttacagttcttgctttcatactgcttttcgtatcctgccaactcttccccttgtgatttctttgctggatcatcttttcatcttcttctcgggtgtctgtgtgtgataaaccaccttggtggactaaacatacaagggcctcctccatatgcatttaacttgacaacgtcgccacaaaacaaagaagaagaaaccggttagagtgggttcatcaaaagacagtttgttctttgtgtcggcttggaaagatgtagctgatggtaagattagaaagcaaaaaacgagaatagtctctatcgagctaagaaataaccgatggtttctgttcctgtcgctctcatcccaatgacactacctcgattattacccaactgttcaatcttggcctgttctcatatatcgatgcgtattattaacagatggacgacgaaaagacaaaagacagagagtgatgatcaggaataaagagaaggacatcggccagattcaagtcaggtggttggctagccgcctcttgaggattatatgcctttttggttcctttcgttctctcctccctccttttctcaccttctccatctcttccagtcgattctctggtgtccttttctttttctcctctttcttgatcagattagaaacagcaaggaggataccctctgtgagattctctctcggccatactgtgtttcattacgcttctgtcctgcctcccgtgctttccttccctccacgtaggtaatcaagccagccacccttctcattcactcattcgctcgcttgagttgaaggaaagggaaaagctatggatccgtttggttcctaccttgcccacccgactaggccagacgaggacgatgctcgtagagcatcttctccgtcttcgtcttcgttccgttcgtgttctccaaatagtcagcaaccgtattatcttcatcaacaacaacaacgacgacaacaacagcagcagcagcagcagttacaccagatgcatctgcagcaacactcggaaggtcatcgccaacgatcttcactctccgtccaatcatctctaccctcaccttcagctccgttatcgccctcaacattgacatcaacatcgaccgcccgaccttcgttcagctcgactcgttcggctgaggaatacaatcccccttctccctcgtcctcacaataccacacacaccctgattatcatcctcaaaaccatgctcctcagtcgaaccatcaccaacaacagcaacagcatacagactatgcatccaacctcaagacgggcaggcaatcaccctcgaacgtgccgctagctaaaagtcagagatacgatcattcaccgtctgggagaccttcgccctcgccttcgccttcgttgacctcctatcgacttgagcagcaacaacaacagcagagccaccagcaaaaccaccagcagcaacaacaacaacaacagttcatgtatcattatcatcatcagcagcaacctgtgttcaatattcagacctcttcgcctcctccacctctaccatcgaccggcggttctgcatcgttctttgatagctccctttctgcccctcgttctctaatgactgttcaaactcggtcatcaaccagtccgactccaggctcacactctaggatctcatcggcagatgttctacctatccgagcgagcacaagtaacgttccttcccggcatcagccaactttttcttcccgagacccctactttgatcacttcagtggtggcggtgatggaggtagaactggtagggacggccatagaaacaagcacagagacgacaatgatgatgaagagggaaacgaaagtgacgatggattagcttatttgggttcaggttcgagaaaggtggagtcggtcgaagagatgagcacaaacggcagtagtctcctctcgtcctcgtatcctggtcaaacattcattgggcttgatgaagattatgatcgtgacgagcatggcgtcaagaagaatgggcgaccagcgggacaaccgtccatgtaccaccaacgatcgagctcccatcaggtctattcacagaattcaaatgagggatcgaagcctcctcgtcgtgtcggcgcaggagcaggagggccaccaggggaatcgatgtcttcctcgtcatcttccaatctgtctcaactgcctccactcttctcgaattccatctctcggtcagacactccgctctccaatccgtccgatatacccagtggccctcaacctgcccagtcaccctctgcgaccccttgttctccccccagctttcacagatcgatctctcagcagtctcgaacgacaatatctcattctcacggcggaggtggagcacaaagctcaaactcccagtggaccagttacaagctcgggccggttgattcgtcatccgccttgtcatacacgagcagcgggaatacccactcgggctcgaccgttcctatcaaagaaagtagatcaggccagaataccccaggggcccagccgacaccttgtggaaattgtggacaatctgtcactggtccatttgtcagagcattgaacatggtctatcacttggattgcttcagatgccaggtgagtcttggagcttgaacatctcgtcctttcgctctatattttatcatacctaactatctctgctttttcttatctccttttacgtctctcttcggtcggttttctatctcgcaggattgcaaagtcgttgtggctgccaagttctttccagtggaggccaaagacggaaagcagtacccgttatgcgaaacagactatttccgacggctcgatctgatttgcaacacgtgtgggacggcacttagaggaagctatatcactgcttgtcgtaagtttcaaagcaacataatctgacagactggtttcgcgtccgtgtatctgaaccgaaccaacctcattttggtgtatttgcgcgtgctcctgcgttgtcatgtattgttgacttctgggacacgtatatagagaaaaagtttcatgtcgaacactttacctgttcggtttgcccaaccgtgtttggatctcaagactcatattatgagtacgatggaaacgtctgtgagtccttttcacttgctctagtttattcggtcaaaatttcgaggcgcgagccgattcgttccgtcgaatctgataccgcgtctttcctttcaatttcgaacatgccgttctatagactgccatttccactacagcacgcggtttgctacgaaatgtgttggttgcggagtggcaatcttgaagcaatttgtggaagtcaacaggaatcaaaaggacgagtgctggcaccctgagtgttatatgatccaaaaagtaagtagttgtgtatatcagatagtgagaagttgatatgtaaagaaatccacactttgtcaaactcaacattccatcttgaatctttgtatttgtctagttttggaacgtcaaacttcagtcccgctttgccgatacaccctcaagtttctcatcgtctgatcgagacgaaagtgagacggccgagtcactcaaggtgaagcaacaagagatggaacatcaggtcaatcgagtctggaccgtgctttccgcctttgaagaaagctcagctgcgtgcatctctgagatgcttaccagggtcagcaactgtctatacatggaggccgtggcgatggcggagatgttcattttccatgtcgaggttctcttcgcgagtatcgacgagctcgagagacattttctgacagctgatgcgaagggtacgtggcttgatatattcatctgtctatcattctcttcacatctctcgcctgaggagaaagtcaatctgaccctaggtcggtccaaaattcgattgaaacaaacacaggtatgtctcatgtcagggaagcgaaacttctttgtcggacgaccgtgaatttcttttcgcttcttgctcatacccatgagactgagagctggagagcgactggaattacagacgacctgttggcgttagtgactcggctggcgcactacttgaagattctcatccggatagctctcactggagcactgaaactcgaacgagaatacgccaaccgagcggcgctcgttgggttcctcgatcgactggcgcgactcgctcatgatgggggagatcctgctgctagacgtcgacggctgctcaaacgccggaactctgaaaagaaaccgaccgcccaagacgcgggtacgaccaacgaccagactggtacatattctgtttcaaccgaccctcctggaccagctcagatcgacaagtacaattatgggtacagcagtctgttcgtatttgacggcggagagtccctcattagggcagatccaggagtaggagatgtcccactagatctctgcgtgatgtgcaggaagccggtcgaggaggattgtgttcggctagggattttcccccattggcacggatcatgtataaagtgttcgacctgtggcaaagtagccgctctcccacccgtcaaagaaagcaaagtcgacaaagacggcaacacgtcttcatctgtggtcaaaagctccagtagcgtgtatagaccaccacccgatctttcggccttcgtgttctcgtcgacgaaaccgctggcgaagtcctcgcctctgttcttgccggacaagattttttgcgtcgatcatggcgatcaaagttgcttgagaggatttgaggcagtcaccaggttggagcaatttgctttccttctgaacgcggcgttgagaaggctgttcttgtatctcagatcaaaaggagttgccccgctttcaccatgtacgtaattccttattcgcaccttagtttgcactttatttctttgaacgttatcctttgttctgatgtgttgatcctctttgcttgtttttatttgatcgatagctgctatcaaattctcgacttctcaaggtccgcgtcgaacatctttgggtacaactgaggctcacctggactcggatgtcaaattggtcaagtcgggtagcttggaccgaaaaatctcttctacagcagctatggtacctaaacgatcgaaagtggtcgaaagtcctgcgggcaaggtggcaaaatcgaatgttcccatacctccgatctcgacaacctcttctaaggcctcaaacaacaatagtctgattgaaggtctgcctgcgccgagcacaccatactccccgtcggttgatgtccaagcccctcgtccaactcgttcacagatctcgactgcacatttagattctcagcctacatctcgttcttcctcacgcccgttgaaccaacaaagggacctatctcctggtttctccaactcgagagaaggatctcgagcgtcctcttcgctttctgtcatcagaccttcgttcgcgaggaacaacacctcagttcgaatcatcaatgagccatccccggaccttgggcaggcaacgtatccttacccttcggctgtagaagagacgctacagaagttcgacgaccacctgacgttaggagatgtctcccagctggttgaagcagaacatgcgagagtcgaacaacgaccagtctatcagagtgaccagaaacttgttgcagaattgtctcctgtcaaggcgctcatcatcaagtacttcgcgctactgcaaattcaaaaatctgcgctaaacgaggtgctggtactagatgacgtactcgaactgatgtcaaagaagaacaccttttggaacaagctgtttaaaggtgggaagaagaaagaagaggtcaaaaagactggtaagcgattctatgttccatcaaaatacgagttgagctttctttcctgttaagatttatcaaacatgtcttacaattcttgtcgttctctcgatattggtccaggtgtctttggtgtacctctcgaccaactcgccgaacgtgtcggttccgattctgtattgggtgccacgtcggctcacctaaaagtgcctagtatagtagaagataccatcgcagctatgaaacaaatgggtacgttgttcttgtcaggttgagtttgctacctctaaacgctcacatctattcatcttatcatcatcatccgatctccttgtcaacacagatatgtcggtggagggtattttccgaaagaatggaaatatcagacgtctgaatgagattaccgaagctctcgaccgagacccaactagcgtaaactttgcggatgagaacccggttcagctagcggcactcttgaagaagttcctccgtcaactcccggaacctctgctcacatatcgacttcagcgtttgttctgtcaatctcaatgttcgtatttctcacaatcatatatgtcagaaccagatacgttttgtttgtttactttttcgaccttctttccaactttttctcagctctttctaccgacgctgaacgcaagcgctacttgcatcttatcgtatgcctcctcccgcggtacaatcgagacactatggagatcttgtttgtctttctcaaatgggtcgcttccttctctcacgtggatgaagagacgggtagcaagatggatcttcacaatctggccaccgttatcacgcctagtattctttactcgaagggcggaaaccctctgaaggatgaaagcttcgtcgccatccgagctgtgacaacactgctgcagatgcaagacgaattctacaccgtaccagacgagttggatcggtatctggatgataacctggtagacttcttcgagaaaaatctggaattaccacctaaagagatgctgaagatatgctcgaaagtacgtttgggtctctattgtggtcttggtttgatggtgtgcgtgcctaatattctgttttcatcttgcctgtcacctcgtcagatacatgttcagatccaagagcatcgtagacaggcaagtcgtccaccgccacttcctccaaaaacagaatccacgcttccaggaactcggttggcttcctaccaatcggatactaacctgtccgagatggcgaacaccctatcgagtcaaccagttccctcagtgttcactggagttgaaggccgccaatctcctgctgaaagcattcaacctcggccaactagttgggcttccccgggtcaagaccatgcttccctcctgcgtctgggttcaaatcatcagtcgggttctcaacaatcttacgcctctcaacatactcaatcgatcgatcctccgccttcgcctcgtcgagcgacgggaaacgcgtcgccaatgtcatcgtctgcttctggcgacgacggccgaagggcgtacctacctccttcttctcttacgccttccaacaccggtcatggacgatcttctacaagtcgatcataattccgtgatatcttcctccccctcgcttcctctttatacgccttggtatcttccccttttttttcctccttctttctcttcctttcatgtacgctcctcgttgcccatgtacatgccgcgtccggatatcatctgcgctccaatcatctatccttcttttctcttccttctatcatatctatttcaacctttcaacgatcggtcagaccgatatgcacatcttcgtaactacctcactctttgaaaatccacacatcaaacttatacccctcctttctagcctattttcgagcttcttcgaggcttttgtcttttcgtcttccttcgattgccatatctcatttaaagttctttcaatgtgcttttgactgaagaatcactgatatcaaaagaaaaacggttccaagaagaaaagagaaacagggactacgattgagatcatatcacacattacattgcggaatctagctctctctgaatcaagcgttggaaagaattatcttcaaaggtccaaccccattcagaggtgacgcaaacaagcaaagccgagcatgagatacgttttcaaccgagctgatcgaatttgattcgaaggaaagaagagaagacaagggcaagagcttacctttccaatcagcttcaccttcaagcaacatcccgaataacctatcttcctcgatcccatacttcttcccacctccggtgatcagactatcgagacggttcacctgaattgccactttcccacgtccgcttccatccgtttttgaagtctgaccagggttggaggctataggaagccgtaagatatttctggtcccagaggggtgcacaggaagggtgggaggtgggagaacgacggattggccggacagaaccgctcgaagttcgcttggatctgggtcatacaatctgtgttcgagcgtgcggatgatagcgatgcctatgatacaaagaagtaaaacgacgacagacaaagatcagggttggtatgacatgaggtgcagggtagatggaatggctggggtgattcgaaatgcgaccgacatgttttgaacaagaaactgtccccttcgaggactacacggaagaacttggaaagtaagtaacccattcataaacaaccttagaaaacaggcattagaaacaggaacacgaaccaaattggtcccaaactctacaaaccacatcgaagcttagctgctcaacaaacaacgtttggaacccttgtccccaaacgggcaaagacaatccagatttacttcagctttttattctttttcaaagggaaaagcttgatagttgaaggaagaggaagaggagggagaaggcctacaggtgctaggtatcttgatttcattcgacattagattataataaactgttgcataaagaagaaaccggccattacgtgagaaagataggttccataccgatataaaagatcatctgtagatatggttgttaggtcatacttcttggtaatgcgtcggcatctacgaccgcaccaaaccagacgatcgatcagtcaaaacttttccagaaggccaggtgacaaagggagacaattaacttactaagtgtgttcagtaccctgtagtaagcctccttctcgtcagccctgcctggatctagtaaagcccttaaacaactcgagcttgccaacaagttgagtaacgacttccaagctatatcgattgaacaagaagacaacatgataccacagttatgagcttgatgataaatccccaacaaacaggtgaagggaggaaacacggaccgatctcgggtgtcatcactaataaaaacgtagcagctatcagatggacaccggacacatatggaagaccttcatccgatcgagccttcgtatcaccaaaagatgcgcgcgcgccaattaggtatgatttacttgtcttcaggagggcgaacctaaccaaaatagaactaaccacgacccaagcgcccaggaattctcgtagtttaggatacattgtcccctcgttcggtttgaagactgttaatccagggtaagcttctgatgcgtcttgttcgagttgttgaagaatccgtgttggaaaagcttgtttttccatcgagataataaatcgttggacatgggtggtataagaagctataattgcgtttcaatacccaacatgatcagtcaagggtccttactttggtcaggcttggtcgtgattggaatgtgagggttatgtgcgcgcttacaggcagagattcccaatccatttcctatacatttctcccagacttgctctctgaaactagctggcacaccctcccaccagactgctcttaatttcggatccttcatcgttgcttgttgaggggaaggaagaatgttggtttcccatatcgggataagggaagccgcgtgttgagcgtggagttcttgttgatgaagaagcgcttgttgtttttgtttctctagatataccgcaggatgtacgcgtagcgaaaggtggttcagctttctgttcctcacagagattcagaaatggagacgaaatagatagtttacctgcgagcagactctccttcatcattttttcccagtctcgcgagtgcttctgatcctcctctttgttttttggaggaagatgccttggtctagttttgctcatcactttgtccaacattgatagtttcttgtttgctgctcctgatcctgatgaaggcgcgtgaaatccgttggatgtcaacgttgccgtcggtttcgagttggttgctgatgatgtcgtaggattatcttgaccgtcgataggggcggaagtagaagctgtcgtctttgtggattcatatccgttgtcatgttgttcggttgaaacatctttcgtcgcataggttgatgagctttgtctcccaccaaacgatgcggccgttaacgaagaactcgaccccgtctttctatgcgtcttggccgttgcttgaagaaaccctgcgggactcaacgatcttgttctgtcatgaccaccaccgtcaccaacgccgataccaaaacctccgtcacccaatttgggtgatttcaaactagagccccaagacattctgttcttcttcttgttcaagttgatcgttccgtcgtccgagccaccatgtgttttgtcaacatgccatgttgggatctgatcttcgttggattcaatgttgacattctcgaacgctgcttctagatctctatcttgatcgctgtcggtgaggacggtcgccgggatatcggagagggactgagagattactgatgaagaatgagagccagagtaagacggaatccgaacaggggaggatgaagtcgattctagataatccccacgaggatcgcctgctctttcatcggatggaccggatgaccaggaaggaagaggcggtggtgtgaccgcgaactccggactaaccatcccggtctggatccgggttgacgttggtgtggatggcgaggacatatccaagctgggagacctggaacaacgagttgaagagacaaagagcttggaaagacgaagaatggttgatagatcgtatgaaaagagaaaataaacaaaatcgacccgaaccggaccgaaagaagattaatgtttcattgtcgatgctgcaccttgttgactatcaagcacgaccgagatcttatcttttctcttccagtttccatgtcgatctcatgatgtgtttgagagaatcttttgtagacaaggcgatgcagaatgccagcttgcaagaaccattcgatatcgtgtttctttcatcgctgctgctggctggctggcaatcatatcagagcatgtgttctgaaccaactcctagatctgtccctctcactatgtcggaggagaagcagaaagagtcaagtatagagaaacgtatcatgaatcttcggttaacgattcctcattaacctccaagaagtggtaccctacgatgagaaccatcattgctgagcccagcgtgttctattttcacccatattccgttccccagtcgaatacgtggttccgaaccaaatcaaccaaacgaaagaacacagaaacgatgaggccaagatgagacaagaaaatgtcagaaaaatgcctatgctggtcgaaccctgtacccaaaggaacagagatggaagtatggaagataacgaacggcgattgtagtaagcgtgtcgtcagaaatcattgtgccgtctctttgccttctttttcttctgctgctgcttgataatcaggggtgttggcgttcttccttcggcttctgtgtatgctctgagagatccgtccggcgaatgatgacgatgatggtgatggtgatgatgttggggatgaagactagatcagcttggaggagagattacaagctgcgagagacgcgatgtcacgtgaccttctctcatcgcctttctttagcccagactcgcttctctgaccgaacgacatgatctgatacaacaacatacggacacaatgatgagaagagcagaacaaggcgatgcaaagaaatgtggttgtgattatagcgtagcggtttcagaaactggaattatagttatataatctataaagacgaggctatgatcgaaataaggtgaaagaaccctgagggatttctatgcaacgatacaccaggatatctggattcatccggtcaatcggtcggatggacattattgatggggcgattcaatcggagatggcaagagatccctatttttcgccgaacgggcgcgcattttgttggtcactataactcagacactttgatacatacccacggtggacttgaaaagaggagggcaaaagaagactcactcaacctcggcgacgcctaactcgaccaaccgagcctctcctagagtctcccagtcggtttccattaattttctcaccctttggtccatctggtaagacttcatctcctcgggaacgaatgacccgatcgggttctcttttgctgctagcagagctcgttcgagcgcgaccgtgtcgtcgtatggtacattgtacacatatctaatagtacattcaaaagccccgagtgatcaagttagactctgatcaaacaaagaaaaagaagagaaaaacagcaggataaatgagaaacgaacggagctgagtatgcggcgagaggaccgtgctggtaggattgccatctaaagatactgtttgtcttgtgccattccgactggggtggggcatctacttgatgagggttgataaaagggactcctttacacagggctgaacggaaggaagtaagcgcagaactgtcactatcagagttcgatttcaaagggagttataaaggaaaaagaagaaacgtgaagacagaccataatatggagagggtgagcatctaaggatgtcacatcaagaacacctttcggatcagtctactggataaagatcgaaaagagagaaacagaagataaaacaaacccagggaagccaaggccgaccatgactgtactcttagccaccaagctttcgtaggcctttctctccaaagtctcccgtcccttttcaagtggatacaataccacaccctctggaactggatgctgatctccaattcctgcgctcgtgtcaggcgcgactaatgtgaaatccaaaccagtcttctgggagagatcagtgtaatgatctctaggataagcggattctccagctagattgggatcatacgatgatatcgaattcaggcaattgaaggcaatatggatgaaaaagggcaaagaaagtgaaagacaacgaacgagagcccactccaccgtaaaaataagatgcttgcttggcaaggaataatgctcgggggtctctctcctctggtggcacaacctctccatcacactgttctcaatccagattatgcgaacatgtcgacctagtcagacttgcgcgcgagttgattcacaggcaagacagacgatacgtactgtgactgtgtaacccaagtaaaaatgatcgccaaactcgtaaggtgtcatgatccattttccacctagcggatggacgttgcttgtgagggaagccaacgtcggtggataatcgggtacactcgggtcaggcgtggtctcccaccaattctgaacgagaacctttccaagaggaatcccttttggaaaggtaggtcggcgaatacactcgttcgaaagaagacaatgatagaatccttttgtaccggtattcgggatggtttccacaactgcgttcgaacgaagcgcgcggaggatggatgaaggtggttagcccgaggtcatctgtcttgatgcgaaagcaaagacacatactgtacacagcgacataatcttcaaacactctatgccagttcatcaaatcagttgcgtattcgttcaccatgatggatgtatagccgagcctgtccaacgaatctaagaccgagatcgcccacagatcctctcctctagtgctcgagccatcagcgaacttgtctggagaaattcagaaggacagggaagttggagcaaggcatgatagtcagcaagactccaacacggaacattcagaagcagagaaggacgaacagtatgaatattgaagcaagacaatccttgtggtttcgtgtgggcaggttgcgttgcgcaaacaggcctctagatgagtgatcgccaaacgattatggtcatacatgaacggtcttagagagaagcggaaagaggtgtcaaagaagaagagaggaagttaaaatcagtttactcaccgattggtatgtgtatcaagtagaagaaagaatgagagaaacctacgtgaatcgataatcgttctccagagtcgtccaagcgtctggtaggcgatctactagtttagattgaacccgaggaggatcgggaggaaatactgggagatgagcagtcgcaggaaccgtagtcgaaggatctactagtatcaaaccctgagatagtgtggacaggtggctattggcaatgagaaagaagaagagaagagagagcgagagggcgggaaagatgaagcgcgtcttttgcctggacatcagtaggggtttgtggtacttcatcgtacgttagcagaggcgagtgaaagtcaatcagtgccgatatacagggagtgttataccataaaatagatcgagagaaaccaaatcccaagatgtttgtcattaaagaggaatacacaaccagctcatagagaaggaagaatgatcagtcgagcaaggatgcacgatctgtatgatgatgtatggatgtgtcactcttgcatctgcatgcattcttccaattttatcttccatccttcttcttccatccttgtcttcgccggagtctcgactatatcatccgagccgcagagaagagagatggcaagagtaagtgcgtgtcaggatgagaccatgggtattttagttgatgaatattcatgtgtgggtgtatgtaccgctcgctcgtgccaagtagcatgctttatgatcttcatacccgattcacttaccctctgcactcgatttcctctgcccttttgattctcccaaccaggatcatacatatgatagataatagtagcaacaatggattcacacgctcatcagcctaccagcctccgttcgtcgtcaaatctaaaaactaaacccgccgccgagcgagttcttcgtcgtcgtcgtcgtccaggaaatcatcacccacagaacgccttattgacctaggcttctcttccgatctcctcaaagcggtcaacggaagatgctcctcatcatccccaccatgtagagacgtcgaggatgggtacctgccgataccatttgcgctagacagctcagagtgatcgccgtgttcgcttggctcgtgtatcgacttttgatatttgtggtgcgtaaacaccgcgattcctattttttgcacagccaacagagttcagatgagggagatacgccactctttgcgatggagacgacgctcggcaaacgaggaaaaaaaggaatacgaaccggtcacagtgacaaacaaaccggccaagttgataggcgtgagctcgtcaccaaacgcccaggaagctatactgattgtggtaacttctttgaagacccctgccacgctcaatggaacaacacctgctctttgaatgatgctgttggtatcatattcgatgtagtcaggaacaaaggaacaactgctcaggagcgagggcggaagagtgatctcactagtattcgcttgccaccatggcaaacgccaagaaaccagggaagatgatgaccaagattgtgaagagcactctgcccggttcaaagaactcgctaccaaacacttcgccccagccgtcttggatgagactgacgaaacccagggcgatagccatgacgggtgaaatccaaaagatagttgcaaatgggttggacattccaagttctttcttgatcatcaatgtgtgcgtcaatgcccatcgaagacctcccagaactgaagcggtcagcaccatcaagatacctggtagggagacagcggtagtattgaaagccattaggataactccggtggtgatcaacgtgatgaccaagatgagcttccaggagaatcgctcgagatggaagaggaacgcaaagaagaggacaaagatcaagctctagggaagattgttaagaggggaacacagaccgtcgcgcgttagatcgaaacaatgcgctaaaatctgaacagacatattcagaacgatcctatgcgtaccgaggatttgcacatggctagatggattgaaaagaatacacctcagaacgtgtataatgaagatgcacaacactgatgaaaagcctcctaggcttactatatagtgagagagagattgtcttgagactgagatttgaaagtccaatgtcaccagccgtactgattcccgtgggaaccaaccgataccttgtatagatagatgttgtgaattgtttccgaaagcccgaccgatcagtacgaacgcacaagtgttttgatatgagagacacgaagcagaggagaccgactcacccgtaatcccggacggacggattatagggaggtttaaatttttgaggcatcgtgaacctcacgattgatgctaacacaaactggacgatcctaagaagtaaggaacggacgtaaaaagtcggtcaattctggcgcgaagacatacccgaacactctcctacgaacgaagcgagaaaaggaaattgggaagctttcttacatctgacagaacgtcatgaacatcgggaagggaaacgcaaagtatttgacgccaaacacccatttgttgtaaagctttggtggaaagaatcaaaatcagtttatgatgatttctttcctacgaagaggtgacttggcacgtaccgacaacagagtcgagaacccatacctatcaaaattcatcatacgattgacatcagcttcagtccatcgttgggtatcaaaacttgagggcaacctgatcaatgctcaccatagcaagacaaagaatgcggtaatcgcggtttccctccagtacatcttctttctcctctcgatctctagattatctccgagcccgtctttctcgagctgctcatcgaacgcctttagttctctctccaaatgcaaatcaccttcctcggcatcttcactgtagcgtctggttgatattccgttgggttgactggactctgcttttgtgctcgaacgagcgtccgtgccatccccccaatcatcccacgcgtcctcgtcctcgtcatcatcatcattattgccaggactcttcctaccgtccagactgtcatcatatggtatacgtgacgacgaggctgcacccgaaccagatgctgaggctgaggggtaaggaggcagagagcctatagagtttcttggcgagcctaaggggccattcaagtctgcgggatcataagacgagagagaacgaacaggaccgatatgatgggatggtaattgttccttcgggacgcctgcggtcgtgttggttgatcttggcgattgctggcgtgcggaagaagacggatcttctagagctaccagaggagagtaagacgatgaagcctgctccatcctgagcgggcgtgggtgtaggtgcagagctgtgggaggagtatgctgagaacgatgtctgatggataggatggtcgatgtttggtctgatatctcccaagggaatttaaaataacgaaaataattcccgagataaatctaatcggtcacgattttcgacgaccctcagttcaccttctaccgacacaccttcttgccactctttatctacaaatatacacacaatgactaccagggcctctgaagcaaagaacatttggatcgcagccggtgacggtgatctcgaacgagtcaaggtgcgtctttatctttcgatgagaaagccaaggcaagaggcttgataccaacgttgcttccctcatttattcttctttaggatttaatcgagaatcagagtatgtctgagccttttgacgagttcttcttctcttctacccaagaacgactggctagcttactgaccaacctcgtccatacgcttacatcaacagatctctcaccgaatgtccctgacgagaacacatacaccccactccacgcagccgcgtcatactctcaactcgatgtgcttacctacctgctttcaaaaggaggaaacatcaacttgacggatgaagatggggaaactccgctgttcacggtggaaagcgtggacaccgctaggttcttgattgagaatggagctgatgtcgcatggaagaataaggagggtctgaacgtttgtcctactcgcttttcttcccttttttcttcctcttcttttggtctttgtttcatgaagtttccctctatcttacttttcaatcttctattttcattcccataacaatctatcactcaactgattgtgattccgtcctttcgccgtcgaacgccgtatataaggccgcggagaacttggaagaagaattcccagaagtctcgacgtacctccgaacactactcctactaacgatcccttctaccgccgtccctcgttcaaacccaccgaccgacgcgtcttctcctctgaactcatctcaggcacctcatgatgaagatgaggacgaagaggacgaagatggggatgtgtcgaaccagttgacgtccgctcatttgtctcaactcatggctgatcgactgacggacgaacaaacgacggatatgatgagacggttcgaggaagtcatgaagaagaccgaagaggatggagtcaacagggatgaagaacttgccgaaggtttgttcccctcgttcttcttcttctccttttctctctttctcttctcttactgaatacgtctgttttcttttgatccgatcctctcatctcatctttcgtttttccggatccactcaacaccttgacttgccgaaatgatgttggaacgcaatcataaagtcgtccagtcggtcctgttcaacacgatgaacgcaggtcgaaacatggccaccgggaccggttctggttcgaccacaaccatgacgataccagaggagagcgaggagcaggagcaggaggagaatgtaaagaggacgaggacggagcctgaacctgagcgataagaaatgaataaaatccgagtaaactacataaagagacagagaaagaggagaacaacggaactggcaccaaaggagtctgtctgtgcatttggcgatcatcttggatgctgggtttgaccttgaatttacacataagccctaggaaggagatttgagcgaaagaccatccgacatgcttgaaagtgacagaaaccatgaaaatcatcccacggaattagatgacttataatcggacccatagatcgcgatcgacagactcgccagtatggaagaagagacatctgggaaagagcgaatagagggcccaaggcgccaagaagaagaggactggtcttcagagaaagaaaatctatttgttcattcattctggtttttttttggcaagtaatgagatcaagatcgaagagatggtcaaggatccgcttctattaggcttcggaatctctacaccacatgactttctccaacaatggggagaagaataatgggagtccaaggatgagaaccgttacggaaagagaaggagggtgaagaaagagacaaaacttgtttgtcgagagaatgagaaagcgacatgaaagaaagcgccgaaaacgaagaagtagaaaaggcacttgagacaacactttggacttgaaacatttagttaaacttaggattcaaaatagagaaacaaaagagaaagtcaattcgaggatcagatataatgtttatttaaaggatggagggagtacccggaatagggagaggaggaaaagaaacagccccaagataggtagggctagacgtgaagaatcaaaggaagatcacaaagaaaacaaatatagaagtataacaagcgattttttcgccaaggaggaagaaagagagaagaacaaatatttggaaagatagagaacaaagaacaacagaacatctttaattttatttcgttcctatgaacaatgaacaaagggggagaaaagaagaaaaacatcaagtcgacaagccgttcatccgtcctacccaggatgcgccggagcctccgaacggagaagcaggggacgagcccgcgcctggcccgcctacaccgcccgcagacatttgagccggtgcagatattgacgagttagaagcagaggcggaaacgggtgtgaacgattcggaagcaggggtaaggacgacggcgccaaccgaggtgatcgatcctttgtagtgtccgtgattggaattaatagatcgtctgaacaagtaagaaaagtagtatttatcagtatgttgacttggaagtggtgatcccaagaaagagagagaaaagaaggaagaagacatactgaagatggtctaaagagagtggaaccgaaaagagtcaaaagattcattgcatccatcagtcaatcaaagggttcttgacacattgagatgtctgaaggggaagacctacatttcagtccgttctgttgcttgtaaacctttccgcagccctctaccggacatctgaacctcttttcgccaccaccagcagccgcactgagatccatgacaaccgaggtctccgagatgaccggggtcgaccttccggagcctgttaagccgagtccgagagattctcctggagtgtttgggctgttgaaattgttgctattgctgttgacgttattactgttgaaccctccaagatgaacatttgtgctctctgtctcgtctgatcgatctttaacggctgacgtgctcgccgtccgtctcttttccgttcggttaacgccgccgccggtattgttaccaccaccaactaatagacctgaggacgacaaggatcctgggagggagccgagagaaccgagggacgaagcgggcgaggtgacggctgaggtagccggagtactgttactcctggatggcaatgcgtacgtcaacaatgagggaggtacacattgaggcacaggcgttgccggatgggaagaaagagccgaagctgaggaccaaggagaagggaaggatgagatcccggtgggaatattaacagtcgctgatctaggaggacgagagaacggggagggcagggtgatggtatcttccatctcgaggtccattaggccgggcgtgtggggtgaatccgaatcggtcgtgggcgacggggtggtcggatgaccaggagcagagaacgattgcatcaaaggaggggtcgaggaagacaagtgggagatcacgttggcacccgacccagagctcgtcctagagatcatcgacggcttctggaaaggaagcagaccggccggcgtagagtttccgccgttgatattaccgtttccgatgagaacgtgagattcctcgtaactgacgaagcagaacgagagcacccaagggcaaccaggggagaaagcaagataaagagaagaaaagagaaacgtaatcaacaagtgctttcttgtgttgctcttgcttcatcttacggccagagaacttccttccctgggtacaaacacaacggatatggtgcaagaaggaggaacgaaagaaagaagaaagctcactgctcgagtaaatcgtgaaggcctttgagttgtaaaccacaacacgtaaagttgctagtgaagttttgctcaagcttgcttaatcgttccacgcttgatggtccagcgaactggccagaaccatagccagatccgaacggaccaccggttgagctagcttgatgtgaaccggagttaccgtagtaagcatttccaccagaaccggaaccggcgcccatcagtctgtttccacccaacgaacttgtgacataggcttcgtgaccggcggtcgagaaggaacatctgtgagcggcgagggagcctacgtccgactgggatcggtgaggaagggacgactgggtcgaatcgaccgacatcgatagatcacccatcctggacaacgccggggacgacggtaggtatgacccagactggagcggagacagaaaggtgagtgacgacgagaggggaatgtttggggacgagggcggtacagtaaggctgaggggaatcggaaagatatgagcacatgcaggagaaggagcgaggtggagataaaacagggcagaagaaacccaggcagacacgaggcagtgttaatcggttgttgaacccagaaagaggaacacgacagagagaaagagagagagagtagagaactcaccctcgccagccttcacctcgccaacttccgctaggcgcccagagacctgtgccttctgttgtatgcccagacgaatacaacccatccagttcgtccggtgagccgatgccgataccaccacttgcgacttgcctgtttggcgttatatcgagtgggatccctaaaccggacccaccatccgatggactggaacccatgcccatgcccatgccgatacaacccatgcccatcgagccggaccaaccggccgagggctgctgctgttgactcccaccggacaactctttcgaccaggactgttgtctaggaaatgaattgatggcttcgacgtggtgataatctgttcggttgatggccgaatggtaggacgatgcgataggcaccggcgtcgggatcggctgcatagcgcgtagcgagagtgaaaggtagagagtctagacgaaagagagcggatctaacgatgaacgatagaacacgacactcggtccgggagatttttgaagaagatagaatcaaccgactggaaaaggttgtcggtagataggaagaatcgaatgcccagacgagagagagtatgtatggatgtgtttgatatgggatgtggctgtatgctaggtatgtgtctggctgtatgactgttgaacacgagtgataccgaacgaggatatgaacgctgaggcgtcggacgtgaccttcgacgaaaggggaaggagttcagcgatcaaacatggatcttgttcggagagaagagaacatgaacgggtccatacctgtatcggtttgctatctacgtcagatcgagatcaatgtatgaatcccaagaacagacgagtgactgaacgaaggagacttggtctttggtagggagggacgacttctcgaacgcacaccacacaaacacaaccgaccgcataacggcgcacggaagatttgctagggcgggggactgtaaccctgaggcgtaacc

SEQ ID NO: 585 - DNA, 9339 bp, Xanthophyllomyces dendrorhous
aaaaaaaaaaaaaaaaaggtaaatcagggggcaagtcctcgggcttgtgagctgtgtgagccgacgcgatcggttgtgttttcatcctgccaagcctctctttcgcgctgattgttctctttcttagtgatctctgtgtctgttggtacatctgaagttcatacatcgttgtcagagtagggaaagagtgaaggcagagacagaggtacaaatagacaagtcgaaaggagacaaattaagcaagaatcctgtgagggggggacgtaaggaaagagtgtatcgtcatcgagtagccggtcaatttatcgggtgatgttttaatcaactattcaaatttaatcaactatttaatcaaatattcgtccacagcaatcaacatcctcgtaaccaccgcacaataaactctgcgtacatcggggaaagatcctggagagatcagggaccggagcgaaaatttgatacggcagggttcggtcgagggcaaccgtatgtggcgggggggctgtgctggcgtcatcatcatgaccaaggccatgatccatgtccaacttgagggcttagctgcgacaaagctccgggctgcgcataatacatgaatcccttatctctcattcattccgaattaagccgggcgctctgttgttatcaatttaccttggggttgaattgggtatcaaatgaagcatgaagtatgaagtgattgatattaagattgaatgcatagagcaaccgttccatctcctgttcaacgctgcttgccttattcggtagatcttggtctttcaagccgttatactcttggggcaccagcgtatattaaagaatctcagtaaaaggtttggttgctcttaacgatgattttttccattcgcaatggcatatagatcaacaaaacaaggagcgatagtgatcgagattaaagaaagagaatagtatagagaaagccaaagaaagatggattgaagaaatccaaacaaaaaacccaagacatgcctgcgcacacgtagaccgaaacaactgcatactctaatcctcccttttctcgggaatacggagctctttgagcaactctgagagctgctggtccgggtcgagcttggagaatgaggtctgtcgcttgacggacgccctggttggatcgaccgcgcctatctctgccacctcctcctccgtcggtgtgcccgcaggcgaaggtggcagtcttgagacgtgcaagttgtgcaaccgaccggtttccaaatggtagattagcccatggacctgaactccctcccctgtaccgtcggacttggcccaattattctgcacggtctctgtcatggagatctttcggacagcctccgacacgttctcctcgaccaatgtctggaatgtcggactcggttttctatccgtaagttcgtgtctaagcttaatcaacggagagataaaccgggagagcgccgtcgacttgttatctgcgtcttccttggcagagttccaggccgctttgcatcctccacagatggtgtgtcccacgaccagaactagacagaccagaccaaatgataagccgatgaatctccagatgagtcatttgacagtcgaaagaagaagtgttattcactcactgtgttggacgccggcttcctcaacagcaaagcagagagccgcgtttgcagaatcatcatctagatgaaactggttagcgatatttctctgtcgagccgcgaaacagaagaaagagccgtgtcagtcatggctgccatattttgttgttcattacagatcgaacagggtatagcatggtttttttttttttttttaagtaagaaactaatgacgaacgtgcacaaagatatctccaggtcgggcagcgaccaaggtcgtctcaggcacactgtgttgacaaccgaatgggaactagataagctatttcctaacctcatcatttcttctccttcttcttcctcgtcctcctttttttcactccatagaaaagcacagactcaagaagaaaaagacaaaccgactgtcagagcatccgatccagagcacttttggtcgttggcccaaggcggaagtggggaagaactcaggatcgactgagtagatgtcttgacttggttgtttcaagtttcagacgttttcgcaagaacaatacacaagaaaagaagagaggacaaccccaatgaaaatacgttggttagcgagacccgaaaagatggacaacccggaacaaaccacacaatcaaacgtacctccattgctcgtttcgctggagtagagattccaaaagcggccgagagtacttggtcggagtcaatggttcctgaagatgagagttgggcatcttgataagaattctatatgtatgcagaaaggaaaggaaaggaaagaaaagggctaggagagatgttgttggagaggtaagaataaaatgcaattgaaaaactctctgtttgagaaggatgagcaattgatcaatctcgttggggcacgacagaatgacaacttgattgggacggctttgtaaacgccgaagtcttccgtcgtgacagcacagcacagcttttgcacattttcagtttgctcttgcttttggtcagtcggtcagaacctcttcattttaacggcaaggaaaggaggaaaagaaacagagagacagagaggtttgatcggtcaagcaacacgaaggagggcaaagaaagaagaaggttcggtcagactcttggtttatatatgtttttttcttcctctttcctgagtcccgggtcgcttataggctaggttagaagtatttgtagtgagcatatcggcgcgatcggatccactacaaataattatttgtagtgatactgtctgatctaatccgagcttccagttgtgccttcctcatagtctctcttgcccaaagttaagcgtccttgatctcacaaagacacacacacacactctctctatctatctatatatatacacaaaatacatggatctgtatctcaaaatacaactagatgaacgcctatcgactcagtgcaaccgaccgaatccttccaagatcccacagacctcggaatacggaacgtcaatcttctcatactgatttcggccatctagaatccgtctgatcaagtcttgatctttgatctgaaggaacgactggacatagtctccgtcgattacaccaacacttggcgaagtcgcgttgtcaagttggacctgacgatagctactcgcgtgttttattatcgatattaccatatccgtcagatgaatgtggatcttggtagaaattagtcccaaggcagacaggacttactctgacagagagacatttccgaaccccttcaacacaacagtcatatttcgctgaaggtcaaacaggaacctggaagactccacgtttagatcaagcacagcagagattcgaccagatgatgtgccaaaaaccaagttgggtgtcgctcccatatctgcaggttcgtttggaagaagcgcgcctatcaaacaatcgtcaaaaatataaacatgcgcgtcgttccgtcccgtatagtcatatatgaagccggagacgacgagagctcgtacccttagcaaatttgttaatgagctcgccgacatgatagcctgctttagagaccagtgtgtgatcctcaggttgcattgtcaagatattgcagttactctgaggatagttgtagttcacagatcaataaaagaattccggtcagttttctctcgagatttttctggtgatcaaaacctctttgggagactaacatccgcggcgatcagcgtgtcatcggttccttggccgagacgttcggctgtcgtgagccacaatggtttgagatccttcataaaggaaaaagattcaggagagaaagccatgagttataatctataccaaacgctctttcagacagccccagatacttgagactattcaccttgatcacagtcctaaactgacgagaggactgatcgatctcaaccacagatagagaactcatcgcgtccccaatcgccaaccttgacttaccatccacactagacagattgatcaaggtcgagggtagataggatgattcccaggacgaaacctttttgaaactgtacatcgttcctgtgtccccgttaagatctctcccaaacagcagtacctacagaacgcgatcgttcaaaggaggaaaaacacgtcagtttcatactcttgtcaaacatcacgagtctgaaagagtgaaaggatacatgacccacccttgaattgacactagcgacaaaacccagttcgcccacaccttcaatcgcatagaccgcccctgccaccgtggtctccatcaacttgctcacaggcctcccattcctatcctggccaaatacgatgactcgtcctttgtgaacctcagatagagtttcgtctagataacccgtgccgaggacgaacacccatcgggtttctgatccagaggtaaaacagatggctctgagcgcggtggctcgctcagatgggtcgagatcaaacacaaatatggctatcgaaatacattttaaatcgactctgtcgtgtctcctcaaagaagcagaaaacgaggcaactcacgttcaaacgtgtctttatcaagtactttgaagcttgagctcatggtctcctgacccttcgttctgtccaacaccgttttgatgaatgccacaccgtacgctcgaatattggggtgatacacgatcctataaggattatcagtcccaaaaggaatctagtttgacatcaaacaaagtcccgattgtaagtttcaggtcaagaacccagtactatggtttgagaaggaaaaaagctctgaaacaaaacaaaaaaatccgaaccgtctgaagattttgccgttttgtcccatcgatctttccgaaaagcacgccggttggtgtcgccaagagcatggaattcgttccagagaacgtgccgatgaaggttgaagcgctcacgtcctgttttaacagggggaaacatcatgccaggcaacaagactagggtttcagcactgagctgtaaacaaattgtgttcgaagagtaagaaaggcgagagcgtataccttgatgctgatcatgtcccaactaagtcttcctgtgtcttcccatcgaataatcgcgctcctctccccgaacgcgaatatttcttctccacctccttcttcctccgaggcgatttgtcgggtcaacccaacctccacttgaccgagcttgatcgtctttacgtccaccttttctccgttcgaagtcggtaaattatggccagtacctcttgtgagcagctcgactgaatgcacgacgagctctccatcggccagaccggcgagcagcgagggcggggttcttggagaagacgtgaagagaagagagcgaacgagagagggtgtgaatgcgaatgcatcaggtacagtcgataagtgaaggcttaggtcccagagggcgacggcatatgaaggaggagacgtcgtaaacctcgaggtaatcgcaacagaagagatctcggaagaaaagggtgtttctctaatgtatattcccaggagattatagtcgatagtcgatcagtctaagtttttcacgagatctatctccagagcatatcaagttaacttacatccgtacacagaactgggtgggttcgacctgaagcatgaccaaaaggccccctctgagagcgatcacaacccactcaggagtctcgccatcggtcacagcaccagctacaatctctgcttgatcaactgatctccaactggccttcaaagttccgtctttggcgccgaccagaaggacttctcgatctgtgatctggatcatgcaatcagagagagcgggccccgaagccagggtggttgaagtccggcaaagaccgggaaggaaagtggagggaagaacgcttggagcctcctgagctgaagacggcaactgtaaaacaactgttgattgaggaagagcaagaaggaatagatcgtctctttcgctagaacgatcgaacacgaaaccgagttcaacgatatgatcgagatactaaagttgaattcgagtacatgattaagtctcaagcaaggggaatctgactcacattggcgcgagatcccaaattccggaaaccccttcgagtccctttatctctagatctgattggaatcctgcacctttctgaacgacgcttaacgcacccttgttcatcccacctgcacagactacgatcttgccctcttcatcctcttcctttccacagagatgaaaatctagagcaggagccaaattaggccagtcgcttagaggacggctgaggtagctttgtttattcgatgatggatcaggagtagattgtatattcagaatttgcgaggatgagaagtgagagccaatgaagacataagaagaaggaagactggtcacgctcgtcggaggcgaagacttccgaggcagagatcgacgtctaaaggtcagtttaaactcaaacatcgagagcagcctgctgaagagactcacctctcccaagatcaaggtttcgatatcgttgtatgtccctgtagaaaggcttttcttaacgtggaccaatgtcaattgtccataagagtctcctagaagaattcttgtacccgtttctttggaatcaataatgtcccaactgcatgcgaccccatcgatgaaagatttatcagtgagatgaatataaaaaactttgatatctgtggatatgatttctgaacctgtatctgtatcggaaggaaaactcacgcaacggtaacggagaacggtagtgtcttggtcaagcccttcgtcgtcttttggtcactctcgagtccactctctcttttcttcggtccaggaaggatgcttgtgttctgagaagtgccagaagagctggctcttcttcgtttcccttttcctttggcttcagtctctcttagctcagcggactgttcgttcgatttccttttagaactctcaacggacggagttggaatatcaaatacggccagttcggtctcgcctacgataaggatgcctcctggtagagctattagatgggacgaggacaggtcggaaggtctgcaagtgaatagctcttcgccattggatagagaagataagtccttgtttaggaacgaaacggtgtgtgagacaacagagatctctcggtgaggagtcaggtagagaaagagtagagtaggtggaatagattggtctatatcattgaggaatgagagtgatagaaggttgtactccttgattctggttgacgtaaagctagagttagctcaatcggaaagcacgagtatgtacggaaacatacgaactggacatcgaacttgagctggacaagtccatttgcttttttctcgtcttcggctgcgaactttctcctggcacctcctgtgggcattcctcctgtgggcgtacctctggacggacctgacttggctgccacatctttcaactgaataattgtgatcatgcccgtccagagccctacagccagacaacctctctcctgatcgacgatgataccctgccaaaactcggcttctctgatgcccaccggctgagtcatctcgatccgatcggttacatccaacgttttggtctccgagttccaaattgagacaatcaacagacattttggatggacgtcaagcaagagaacgaacaacgtcggaccgggctgccgagccagatcggaggagggttggatgatggtggccgcaccaagaggctttccccaaagaggcacatcgtatactttcgacgggccggaaggaaggagctcgtgtacctccaatgaggctgatcgaacgattgtcaacgatgtatgatcgggcgatgtcaaattcgagtgaacggaatgcgtcacagaggccggacgatgggcctatggatacgagtgcaattgcatacgtggagagaaggaaagactatcagtcaacaggaaagcgaaactgagcgggcacttgattttgtctacctaccgttgcaatgtattccatcgcgtgtgagatggttcgtctatggatatggtcgatgctttctggccatccagatcttaatttggctcggctctgatcgataagatggagatggagagtggaggtggagggtgtcttacgtaattacctgcagtaaccctaaccctaactctacttgaactgctacctttgtagcctatccttattggtacaccttgtttaactgttaaacccatcacctcgtttatttgtgggtggaggttgcttgcttcacagacgtttctctgtattggaattagacactgacctgtgtctgtctgtggttacgagatattgatcataggaagagaaaggaaaaatgtgtatgcctgttacctgttcatcctgttcactcaccacctggaaaggatgtggttcgttcttgtttcctatcttctgtcctaatgaagcctggattgtagctttcggttgactggtaattgaaatccatgttttgtgatctgaacaaaactcaatcaggccgacatatcgatagtgcgctccaaggagttcccgaggaagagcgatgctctggatggagagaagggaaatgcctgggaccaaggaaggatgaactgtagcaaaagagttgtagagatgaccatgaacccgttgatccactgatgcgtctatctattcgaccatgctctctgtatctatctccatctttatccttgcctctgcctctgcctctgcctctgcaactctcatctcccctctctcatcatcttcagctctatcgtgctctctgtatgaatccatagccaagcgtggtggttacggtgtgtaacgtcgtcacacaaaagctgtaaggctcggtgtttgagttagtaacccagtggttacccttggttcacgtagtgtcacttaggctcatactgagacagaccagactatccgcacgataattgagataagaggtttctgcaagaatctcagcttgaagaaaactcttatccaagaaggcgcgagagcgtccccgttttatatcaggacccctcgcgcatttggtctgccactaaagatatacatatgacgagcctagagaggctcgagatcacgagaactaaaaagatgaagcatgaaccatgcaaactagagcatgatggaaaatggacgaagaggcataggggcttgagggaaggaacagcctgtaggggtaacccacgaatcagatcacgtgacacgaaacctttacccctgacaaaagctgtacttgtcagggtccgggttcagagggtaacggggaggttacaagaatgtaaccaggcagggaatagggctggcaagaaggaagttcaggctctctagcttggtgac

SEQ ID NO: 586 - DNA, 24983 bp, Xanthophyllomyces dendrorhous
caggtcacatccctgacagtacttcttacattaaaatcacgtgacacaccccgccagcctcttgtctccctagttcctcttgtccccttttccttgccctccactctctctccatcatcatcctatcagcctctgtaggatagcaaccatgtcgtccaacttgatccttcagcagctcatacatcatgtggacgcctcgcctagccaggatactcttcaggtgatcttcaactggtcagctgcgaagcttcaggaacaggtcggtccaatctccatctcgaagtttatcttgtcgttttttcttcctctatcttttttcttgttctatattctctctcgtcttcactggggcttctttttatgctgccttgcgtagatacctttccaacacaacgccttcgggctcaggaacagagatctatactgtcgatatctgatgcataatcctggctgaaacccaagagatgggaaggagatggactgaattttcagtctcaagcgcatgtttgatgatgatctctgaatgtttatcaaacctctccgtcaaccctctcctccggatatcattcaattttatatagacctcggatgagatggttcgatatactatagttcaaacgcttgaccgttttctcaagcaatggtagtttctgatcaatctgttttaccgcgttgaaattctatccgcattcttagcgagcgtctacctttgctccttcttcctctatcgtccgaggccctcctatcggattcacctacaaccaaccaccgacgaacttacagcctgtccagtctcagcaagcaaccaactccttctcttccgctccggcccctgcgcatccttcgtctccctcctcgactctggcctcccaaggtccttcctatacccaagcacccccccctagaagaggctcggccgccaacacagcagccgccaattctctcttccagaatggaccgtttggggttgattcgacccctctgtcgtccgtctctgaaaacgagatctcgggggagacctcaccatcttcaaagtccgctcagcttttcccgcctccatcgttccctcccgggttctctgccggacgacgaacgtctgtttcggcagagtctctgatgccttcctcatccaagtcggccaagaactcgtttggggcgtccccgagtggatcccacgaggcatcggagaaactgccagtgtacccgaagggtgcccagcagatcgctcgaatcagactctcgatctccaataactttttgtttagaaacttggatgacgagcaggagcgagacgttctgaacgctatgcgagaaatcaagattcccaagggagagaagattatcaagcaaggcgatgtgggagattacttctatgttgtggaagaaggctcattggatgtgttcaaaaagaccggagatttcgatggagatgatttgggaaacaaggtgttcaccagcattcctggaactagtttcggagaacttgcattgatgtacaagtaagtgtttcctgatgatcatctcccaagcgacaagacactagatgctcatctcgtttcccttctcctgctccttctttgcatgtgatgtgtcgcgtctcaagtgctcctcgagcagcatccattgtggctaccacaccgtgcactctctgggctctagaccgagtgacctttcgaacgatccttctcgatcacacgtcctccaagagaaagatgtacgagtctttccttggctcaatccccatcttgactggccttgagccatacgagcgagccaaaatcgccgatgcgctcgagacaaagacttacgacgacggacaggacgtcatccgggaaggagaggttggagaggaattcttcatcatcgagagtggtcgagccaagttcacaaagttagttgatgggaaagaggtcacactagccgagtacggcaaaggagattacttcggaggtccgttatctctatcgtctcctccctcttatatgtgtctacacgaaaggaaaaaaagggaacaaatatatatttttacaggataactgatctcatcacacatttgtgtatctgcatcacagagctggctctgatcaaccgagctcccagagcggcaaccgtccgagctgtgggcggtaagcttaagcttgccgcgctaggcgaaaaggcattcacccgattgctcggaccaacgaaggacatcatggctcgaaaggccggagaacgatacggtttcaagtaattcatctggaacggacactgccagtctcacgtcctctttaattgcttcttcgttgttgcttccaccccttactttatttcgttttccaatgtcctcaacgtctgaactttacttctcttacatcactttggctgccgcgtttgtctatccttcctcgacgaacgtcatcacccttcttcatatgcctcctatcttctttaatttttagtaacttgtagttttcttcttccttttctcctattcttctctttaatcgctcttcttttccttcccaactcacctgtcatatgatgcgtatgcttgcttcctttggtttgattgcttcttcttgctcggctcgattgagagtcgaaacaacttgcatgccgttcgtgctgcgcgtacatggctcttatcccaagaccgaactgtgaaaaaggcccgcaaaagatgagaagaagaagaggaagaagaagaagcagcagcaacagacacctccctctacccggatagatgactcttttccgcctggcagaactcgcactttcaccctttaggtctgcagatctcgatgatactttgaaggagaccataagatctcaggacaagagtcgatattataaaagaaagatcgatatcaatactctgagatgagcgaatgtaccagaaagaccaaaaagaagaaagaaggaaaaaagaagagaaaggaaagaaaaaggatgaaacaaagcgaaaccgaaaataagtgctagagagaatgatcgaggtcgaaagagcaaatacgcaaaagaaagcacaccggtcaaatcaaagcattccctcaagggaccgaaagtaagagagatagtaagaaagggattatagccgagcgagatgaagcagtcggaaagaaaggaagaccaaatgggaaaagaggaagagggtcgattacaacttaattgaagctagctcagaactgggtaatggtgattagtagcggagggatgatatggcatgaatgaacactcaaactgcaaggatataaggagtaagaaggaggagagaagaagagagagagatgaagagggtattatggaaagatctgaagagacgtatcattcgaactaagatatcaattgtgtattcatatgagtcagtgattaagatggatgctggaaactgggcgtggttgactctatcagtcagcatatctgtcgataacaacataacgtaattaatcaggtcagtctattcgcaaagcaaaacagaatggttaccgtgcgagaaagatagaaatacatacaacataagcttgtctgtcctatccaaccaagctctgagctcttgatcgttattcaatctctttgttgccactgttcccggcccagatcctctcgatccagggaccaagcccatactatctctataactcaacatcctcgtccctccgcccaacctgtctgccactttctcgaccaactgatcgaacgtgacggatgatggcactctgatagcgatcacatcatccgatgcccggtcaaacactttgatctttttgtaagccgcagttgcctgtgccgcacccggccccatttgggctgatacggaaggggctgccatgggagcagggtcggagggcgttaatgtgcttaagctggacagtgtcgttgggttcggaccagacccccaagaggatgaagtaggaagaccgtagtatcctgctgaatgctctgccgattctggtcgactggccgtttgagaggtgttgataggtggtgggatagtagaaggtgttgaaccaccgtaagaaggatcggatgaggaagaactgtcggtattcaacccagatgactgttgggcggatagataactttgtcggtggctcgttggtcggtaactactcctttgggcctgactcggcgtccttctgtgacctccatttctgctttcatcatcatttcccctctcgttcctgccaaccagtcccattccacccaatccttcatccaacaaaggcggcagatttctctcaacttgaagttccatctctgcagcgctcctctgcaacccggtctgatgatcgcctacaccgggactaaggaatgtcctgacaagcgcgtccgaaaggacgtatcctgctccgatcctgtgaagggcgatgagcttttttacatagtcatcaagatcttctcttcgagtattggtgattgcatcgtccacgtgctccaatggtccaggcatcaacggtaagattcgagtcgattgttcaggcgggtgaggcgttccatctggagctcgacctgcttcagcaaggaaagtgttgagaagagaaatttggaaatgatagaaatcattgtagagcctgaagacgatgagttgggtagctcgttctgatggatcttcaggaaggaacacagcatgaattcggaagagatagtgttcgtcttctttatggaacgaaacaacactggcagaagtaaacgtgccgggaggtaagattggtatatcttcatctgtcaggacggattctgagaccgaaggatgaggtcgatgtttgatatgagaggcttgaccagccgccggttgagaccggatgtcgaccgagccgagccgagtgtgagaagcagacgaggctgcagaaggttgtcgatggtgttggtactggcgctgttgctgctgttgattctgattcacccctcctccttgagcccaagcttcctgcccgttccctctatggatggtgtgatcagtctgaagtgtcccagttgactgctggttcgtaaaatcaaaccgcccaagcggaatggatgaggctttgtactcgtccgcctttgctttccattcatccactctaggaatcgcgccggttcggatgatttcttcaatgttatctataatccgacctgaagccggatctcgaatctcgacaaacgtgactggaatcaaacccggtccacctaaacggcctatcggcttagctataaacctgaacgggttgagaaagtgcaaaaaatggtcgaaaagcgcgtcgagtgatttcagaaagaataagccaagtttcgaggaaagaaaagaaggaagaacgaaccactcgtggttgaagtgagcgataacaatgattggttctcccgcctttgcttccagctcatcaggtcgttcagctacaaaatcatattgtacaaccgcgtacaatctacaatggaaacaagagaaagaagacacatcgtgatcaaccagtgatgttcaatcagattggtaatcaatatcaaacccagtcgttcggaggaagaggagaagaacgacacgacatatacgtactgggtcaatccttttcctggtggttttgatgaagcaggcagtgattgactgaggagcctcgagtgttagtcctcaaagactaagcggcaatcggagaagggcgaggtaagaggaagataactcacgtgcttctagccggttcacgagcaacagcagcagcagcagcagaagagcctgaagaaggcattgctcctcctcttccaaactcttcgaattttgatttgagaacaagaccgcctacagaatggtcggatgattgaatcatccatcaattcgagaggaataagcaacaagaagaggaagagaaaacaaggaaagaggagtaagtagaaagacgaaggaaaatgagatagattagaacaaggcagagtgacgcgtccaacgaagacgaggcttgatctacaaagaggcacgtacgagcattcgagattgtatctgctccagatccatccatcaccatcgcaagagtaggagcataaactcgatcagaaaaactcatgtctcatctctggacgaacagaacacatgaaagagatagaacaacaagagaaagaaacaggagaggaggaagattaggaaggaaaaaaagacatactgagcgcctcatagaatcctggaccacccctcggatcatccttctcaccaacgacataaaagaaatcgccctttacgaacggtaattcagatggagagctggaggaatggttgtcgatcgctctgatgaccttcttcggtggttggattgaagccgatggttttgataacgatggtacaaacccggctgccgtcgaaccagaagaaccaccactgccagaaagcgcaccgacggccgaagaagaagaggatggtgaggccgactggtctttcgtcttgtcacctagagatctacgaagggacttcatcgttaggaagcgagagcaaacgaagactgagaacgagaacgatgaatggggaggcgagccagaagtataggtagagtgaaggttggtcgaacgacgatccaaactgaacggttgtctatttggtgagcttatgtaagcgttccttttctgacctctttgcccccaaattacaccccttgctcacaagattgatacacagttacaaatgacgaagttgaacgaggattcataacgtcaactagcatagaattaccatatcaagcaagagattaacagaaatcgagttgaggataagagacgatatcaacgaagaaattagattgactgagagaagaaaaatcgaaacaggaaagagacggccatgatcacacagagacagagctcacaactcgaattcaagcgttacacaaatacagaagaggaagcaagagaagagaagagaaggaattgaagaccgaggacagacaaagacgtaacaagacaagattacttagacctctcgaacccagctgccatcgagtccctcaacactactcgcctccccttcctcgtccgcactcccttcgtttccacttccacttccgcttgcggatccggtcgatcgtgctcgtgattttacttcggttccccctacttcaggccccttcgatttgactcgctcagattcagccacatcaggggatgatcgcttgagcgcagcttcgcctgctttccgcgcggcggccgattgctcggtaggaggtcttgagagtggatgcgtcaggtggtgaggcgacgtagacaagtgagagagcgataaaagtgactggagaagtctagtgggcagaaccaaaggaagcaaggtgtatgtataggctgagaaaggtcgtgttaagaattcaggtttgtcagagtaatcctaatcaatactgtcgttcacgaaccaagaaaggaaacaaaacgacttacaaccagctccaaccctccaaactcttggcccctgtttgacccaccaagccctgtccttgcccaaaataaccttgccgaccgcgttctccaacacctcaaatccgctctccctccgtcctccccaaacccagctgacaacccagtccccgaaccgagcggcgacgagccgaacgttcgccaactcgtaccaacgtccctcagacctcaaagtagagatcggagagatcagtccagtctgcaggatatgcaccgagacggttgcagaagacgacccagcattcgctcgatcaggcaaagaactggccatactctcaagcgcctgtttcagaggcaaattgtttcctctgatatctccactaggggtatgcccgatctcacccatagcaggaagcaaggcgatgatctttttctccaacaagtcctgaaggaaccgctctttctcggccaccttcgaggcctcccgtagcgagttgggcaccaccgaaattggcaacggagcgagcaaggtcgggagaagtgcattgatgatggccatcggagtattcaacgtcgcctggttgtaggctggagagttcagatgagactgatgaggaagcggaagtgagaggagagatatgatcgtggtcaacaaaggaagctggttggggttggatgggtacgggtcgcctgaaacgtagacagcggatattaatgcatagtcaatgtcagcgttctgatcagatcccatttccaacaaacaatactaaccagcgatgttgatagggaaacgcatggagagcacacccttcaaacaggcaaggaattggccagctgaatcaggctatacatccagggcagagtagaatgcaaagactcagcaaaagttacagagaggcatggaacccagggaaagagacaaaggccgaaaaacctcaagaggaaactagaaaactcacgtcctcaggcttcaaaaacagtgctcgaatgtaaccgtgtcccagattttccaaggcgacacaggcttcctttgatgagaccgaagccacgacgatgaatcctttcgattccctgttcgttcaaatcggtcgaacatgaagaggaagagaaagaagcaatataagcatcgctgcagacacgagcctatcatcattcagatgagatgaagaaagcagactgaatgaaagactaacaagtacgtcgctaagggataaccgagctcggtcgaatctgccccaaggagcaggacgacctcccttctatcgcccttcttgaccagcggtctctcactagcctctctaatctccttgacgtccgtccacactttaccagctccgttccaaccatccatcacttggtcccatactgctcgtcggcgacgtggtcccaaaccgacatatgttgccgacagagctgtgaccgtcagggccgttccggttagtagatatctgtttcgatggatgagagagcttgaatgggtctgaagggatccgagaatcgtaggcggtggtggtggaggaggagcgagaggagcggccgagccaacggtatttagtgtgggaagatagaaggataagagttcctctggagaagatatccggtcaacccgcaaccacccgatgacacaagacccagaagttcaaaagggaaaaaaaattaaaattaaagagaggcaaagataaacgtaagaaacaggtttgtcgaaaggtgggttttctcaatagagcatggccgagagtaccgatctgacaaagagtgtataggatggacatcatcgaggcaacaagaaggtggaacgcacggagatcattaactgatgtggccaactctgtcctcaagttggactggagtgagtccagattgtgagcgaagaagaagagctgctgctcaacttggttaatcagactagggtctgacatggcaagcggagagataagagtaagatgatgaaaacaaagcgcttaaagaagggtgggatcgagatggggtaggtcgtcaacaggtgatggggtggagatggtctagcgtagatagcagagccgtagggtggaaggaggatgagcggacggcgagaggtcagcggagacacgtgactttcgtcggcactgtccggcacacatccttttactagcttttcctcaaatgcttgttgtattggatatgatgttatctcagttaatattgatgtacacgcttcagatgtaatatgtcgttcgacttggattgaagatacaagatacaagaagaagtggcaccagaaggatgatgatgattgagaaaaaaaaggcatgcattttcacaattactattttctctgcatgagtgcgggcgtctgctttccacgaggtcgctctttgacgaccctgcagacaagagaaagacgggataaacagacggccgtaccaacgtcatccaattgaatatatcggtcagcacaccagagccatgaaagagagtgttattggtgttgtcaaagtacacagacattttgtttccgttcttgtgaccattgactcctggtttcctggttcggattcctcgggtaagccatccgtagatcgatttggggtgagtgttggacttggactttcctcgtcctcctccgtggggatggtcgcatctataatgaggagtggtctcttcttgtcaatacataatctggttatcgatgtggaaagataaggaacatacgcattcatggctactccacggacccgaggtcgtcgtccgagccatcgtcttcggccggctttacccaagttacgctgaccgtggtatttgcttttgacaaagacagaaaggtagacgtagagggcaaacaagatcaggctttctggcggacaaagtctcaatcatgcgattcaagtcacggagacttacttagagatttgaccgatggtagcgaacgcgttgctcgggatcatcctgacctctccgctctgaagcttgacgaaactgtaaatctttcccttgtcgtccgctttttgatgactgaggatacttcccgtggtccctgcacttctgcacaaggccatcttactgtctgccctgagagtgatgttgtgaatggctgtaccggccggaatgagtgccagctggaggacgttaccaggcttaacgaccagggttcgaagcaagtttagagcgaacgatgggttcgttccaaaagtcgtcgattgggtatacgtcgggttgaacttgggagggaggatagaaggcgccttcgtcttgatcggctcactaatctgagattcttgaatggcaggggccgaggtgcttgagaacgaccgctgggatagcccactggacaatggtttgggagtcgacgaagtttgggagagagtaactaggttttcggtggctgaggtttcgaggtttacgactgagagtcatatatttgattacagcagtacgttatcaagccatttaaagtcagcaaacatacactctttgtgatggagaataagtgtcaaaggagaaagtaaaagaaaaaggtaaaggaactcaccctcgggaccttcaatcaatgacttgggctcgagaggaactccaaattccaagagatgcctggcctcctgcttgataatccatttttttcccctctcctcgacttcttcctttgttctcgcatcacactcctcatcccactgaggaacaagccctctggggataccacttcggtagctcgtcaagacgtctccggctcggataccatcaggtgcgaggacataactccagccaccatgaggaccaagaccggtcctgtttcggagaagacaaatatgagccgatcgtccggggtcgtactctatccggacaacatcctgcggaccgctctcgagtcgcatgaagtcgatcagtcggtgtcgccgtttgtgacctcctccaatgtgtcgtcgaacgattcgaccaaactcgcctcgacctccgttctttcgaacaggcgaagtcaaagccttgaatggctttccgggccagagccaggggctgaaaggcattttcaagtgtcgaactccctgtaaaagaaagaagggagagagacgacatgaaagaaggacgcagagaacagaggtaggagccaagtttagatgtacgggtttgaaagtcagaaaaaaccaatgaaacaactatgaaacatcaaacgaaaggatatagaaggcaacttacaggcgtcttgggaactccccagtttccatggtacttgaacagagggattgctctagacccagcattagcgctgttgaacgattcctcggacataccaccgatggaagcatcaaagtcatcgagccgatcgtcatttctgctctggaaggagaaagagggagatgacgatgaggacgaaggttcagaattcgagatagtaacaggtgcagaagacgcatcggcagatccagcagtggcagcggaagaacgagatttcgattgatcctgcttttgcttctgagcgcgaagggaggatcccttgccgtagagggcagagagattagcctgaccagaggacccggtagtagaggcgtatcgtacggacagcagtgcacgagcctgagggatagagactagcggccggatcatctttctttgtgagggaagagaagaagagtgtgcgtgtggtgagtagaaaagagccagaagagaaggagaacagagaaaaccatggcgtttctcggtgatgggtaacagtggttacacaatcgggatacatggttacatcaccccttacccatcacccatcacccatcacccatcacccgccatccatcatcggaaagcggttcaaaggacaccaagaatccttgaacgatggcgagagggacaaagagaagacgggtagcccccaaagaagcaaagagagctgaagaagggaccgattgggcgttggaaaaggagcaacaaaaggcagggtatggctagtgcgagaaagacagtatcgtacagcaaggcacacctccgatccgtctgatgagatgaccgacccaattgctgatatcatggccagttgagaagagtatgcgcacattctatcatagcatgctgtctctagtatcgaatctagttcatcagcgacgagaagaacagctcaatacatgcgctatacgtcgtctctcgcctctaagctgaaggccatcttcacaatgtaggttatctatccattagattaactgcgcaggctgttgaacgttgctgctgttcttacctccgcttagcatacaaggatttcattcactttcgatcctattctctcttctctctgccatctatcttctctgtttcttccttgctttctttctttctcttccgcttctttatctagttcttacgctccgtttttgtctcggcacgccaaatgttctcaaagaaacaaaataaatctgacaatcggtcatctctcatacttggtgacccccaaggctccccgtcacagccgttcccttcgacatcgcctcccccacgtcaatcgttccagcaacagaattctcagcctgactatatcggtcctcctccgaccaggtcggtcgctcaaccggcgaaggaatccaaaaacaggctctccttctttggacgtaataaggacaaagacaaggatacgaccggaccccaagccggtggaggtaaaatgtctagaacgacttctagattctctatcgccgggagtcagcagcaacagcagcagcagcagctgttgaatccagtgggcttcggacaggacctcgggtctggactaggcagaccgggcgaaccggtcagacaaacagatctccgaccgcagagctcggtaggagactatgcgtccagctttggttcatccgtcaccccgcctcctgctaccaatgcccatcagcttcgagcccaacaacagcagaattatcgtcagaacggcaatatacctgctcagcagcagcagcagcagaaccagcaacaacagcagcctggccatcgagcttcagcatctgtctctagctccttgatgaagaacccagcgctgcagagcgcggtcgatctcattaacttgcacccaaacaaggtacaagcccactcccctctctttttgcttcgacatggagagaaagattctgagcggctcctttttcttgcaatcatataggtgtacgctacatcgcctcctacgctaaaggtcatgacggccgccagcccggacgggaaacacccaaagtgagtgtgtatttctcacagcatcttctacttcgcgcgtgcattcctcatcattaccttttccattgcaacacaggaatggtcctcctggaacacctggaaatgactggcaagaagcttggatcgagttgagaggagtgattcttcgttagtggttcttagtatccttcaacggtgtttccttcttctcgcttactgatgagctaatttacacatggacagatacctggatcatgtcagaggttcaagaagctaatgctagaggagaggacaagcaccctacacgaacaaacgtacgtctccagcccttttttaaattcaatctgaacgtgtcttctataaacggatgcaaacccttcacttgctcatgaacggcgcttttcgtcttttagatcaccgacgcctttgtcgatctgattcaacctctgcctccgacgaaacatgatccccaagccggtcctcacccgtttgtattctcagtcaacaccgctggaatgaacagtgtactattcagttgtccgaaccaggagatgatgcattcctgggtcactgccatcaggctcgccggctgggaaagttctagattaatggagatttatacgggtcatttgtcagtaacttttcccgcacgcttttacctcaacggctggacctatttcctgacttctctcgtctcgcttgatggctttttgtcagacttcgaacgacaggtgttcatcctgctcctctgggctccgacaaccggcttgctggctggtttgacgttcgaacttttggctctcgccagtggacccatctctacgtcgttctcagcgtcgatctcgagaccaacctgactggtgatcgccgagagtcaatctctgacaactcgtctgtcaaagacaagtcgctgtcatcatcggcaaaatcaaagaacaggctgtccagaatgttcggcggctcaaacccgacagagctcgagtcgacgccttatccacccgcgccgggtgaaagttcacccgttcgaggaaactccttgaacaatcgaccagtcggattccccggccaacacacggtgaccgcccaattctacaaacaacccccaccatcaaagcagaactcgagaaactcggtcgcaacgcccgtcgtaccgttcttgacggtgactgatgtgttccaggctctggcggtattcccagaggtcgaacgagagatcgagaattcggccatgttcaaaattgaaggaaagctgagtggagcaggtatgggtagggtcaggagagatgaaggttggatactcatgatcccgatggaggaggatccgaatggagaagggttgaacatagcaaagagagcggacatgatcaaatggttgaccggtgagtgatatgattttttatatcttgatcactcctgggaaggaactatattgtctttctgttacagtgaactaaccttcgtgcgctatgttggtacgcgtcgcagctttccatgacgcattcggcctatacggacgacctggacagtactcttgggatgtcagggatccaaaatccatgttcttcactcaccctgtaagacatatcaccatctggtatattgcgagacttaaatctaattataatcttctttcttgacgttttcttctgaatctatgaactcttcagaacggaccttcggccgaggaactctttttaaccaagccaattcctaaccccgacgagatctctatctcaagaccttcttttgtccggtctcgatttcaagatatcctagttgcttcgcttccaggaagttccatcctatccacctctcaacctcgagctgaattgtcccctgccccggcgcctacttctcctgcaccagcgcctgtagcttcgcctgttcctctgtcgtcacctatctcacattcggccgcccaacaaggccagttcatccctccttctagagcggctcaacaacaacagcaacagcaacatcagtctcaacaaatctcatctggtgctattccgcctgtcagacccacgtcgcgcgaacctcttgacgcttgggaaagagaacgggaacgggaacgagagcgagatgtgggtagaggggtccgtacggtgcccaaggagtcatctccaaatctaccacagacgggtatagagaaaagtttccatattcctcctttggcgttctcacccgacaaaggacaagattcaaatcgcaacactcctcagctcacgcttgctccagtcgttgtgcccgctgcccctatcgatcgagcacagttcgagcaacagcaacagcagcagcagcaacaacagcaacaaaaccagcccgtacaaaagtcgttccctcccaggctgacactcgacacagagaataagccggtaagcttccataatatagagaagtcatcgagtcttagtcgaaagaatcaaccaccgcccattgctatcgctgctgaagacgcagagtctgatttggcctatacggcctctcctgctcattcctctcgcccccagatgagtgcatcgtcgagcccgccttcctcaccccaaccagggtcgaaagtcaacacctccgggcgcggttccacaacctctattcagaatagagagaatagtcagagtatggaaagcagtagagtgaacaccgcttctgggttcagccccagtatgtattcacaaagttcagcgccctccatcagtgccacgacttggactcagagatcgaacccaacttctccgcccgtttcggtcaatcaattaccgtcccctccgccagtgcatggagaggttggtgcaatcacggccaacagtgtacatgaacgaaattttgctactcctcttgcttcgtttggcccaatgacctcatctccgatagaagtcgatcgacaacaacagaagcaacagcaagttgatagggccgagaacaggttcaaccattcgggagacgaaagcttcaacgaccattcgtttgtcccgcttgagatgatcgaaaccggactgccgacagaagaggagctgagggcacgagcacaggcagaggagcagaccaggttggcttcggttgcccagcaagagcagcagtaccaaccagctcaggtacgcctagttctcttgtctggtaacatgactttcacacttttgctatgctaatcacctcttgaattttttgccctgaattcctcttggttgttcctgtggaaatagaaccagggcactctttcccccaagagagaacgggtcgacctcggacggcgaccatctggtgctcgagctgctcctcctaaaagaaacttctcagaatccgctacttccatgaccactgtctctgacgaaaataacgagcaagctcagctcgacaacttgtcctcaggacatggttccaccgatcacaatgccgatgctttagcagctctttctttcctcgatgcatcctcctcccctgagatcgttcgagcccagatctctcctcgatctcaacctgccctttcgaagacacatgcagaggaggaaccagaaccggaacgaacaacgtcggagatactctacccttcttcattcggtccgagtaagagtgcagcagaaaggagagccaggttagaagctgctcaacagcaacatcaggatatactgacaaaaccgggtaaagctcgctcagctggtgttggtcggtcgacaaagaaacctgcaagagctggtgcctggatatcaagtagcgacgaagatgaagaagaggaggatgaagatgaagattctcctgttgttcaaaaggcagttccccgaccgcttcctataaacccttcgatggccaacaacggcggccgacctgtgtcgactatgataccacaatcccaatctcaacttgctcatcaacgtggacaagagcagggtggtttccaacctcctaacccaggatttgctaacaaccagcgacctggatcgcgaaacagcgaaagaggcggttcatcgtacggacaccaacccgtccaatcgtactatcaagatcgagatggggttcaacaacctgtgccccgaccggctattgctcaagctaaccctcgaggaatgtctcaaggacgagcctcggtgtggaatgctcacctcgagatggctcatggaggaaaggctgagcaagatccgaataagttcgtgacgatcgaggaaccggaagtcaagttgacgaaagccttcaaccccaatgggttacttcaagctggtttggaagatcgggacgatcggtcagcgaagaggcaagaagaagtcgccagatcgagtggagtgtcgctaagtgtgtcccctgtcttcctattttgtcgtgtttatatgaccattgtgactcaaaccctgtttgcttcttttccttcgtagtcaacgttccagcccctccaccccctcctcaaaccggtcttctaggcgccatcaccgctcacgaacgagatcgagccagagatggtggagtaggagcggtcctgaccgaaaaagaacgagatcgacgactggccgtgagtctttatgatgccttgtacctcatacttatcttgtcactgacaattcccatctcacttgtgcctgtcttctgtgctcctatctttctgtgcatgaattgcaccggacaggaggaacgagctcaaaagatcgatattctccaacgagagcaactcgaggccatgtcccaggctggcggcgggttcggctataatgcatatgggacacagggatacaacgctccatcacctatgatgggtggcatgccaggaatgatgccttggggaatgggtatgccgcctcctatgagtgcttacggagggggatacggaatggaccctcaggcacaaatggtatatttcttctacctctaactgtatctccagatgactaggatctcgaaaggctgaatggtttgttatttggtgactcgtacaggctgcaatgatggctgcccaatctgcttatcagcgtatgtttttgttcaacgtgtttctcttctcgatttgctctgtacttactattcctcttccccttcttacattatcatttatgtctcgataaaccacagaggccatggtgtcttactctcaagccggatcagccatgggcggcggtggcggtaatggtggcgaaggtgaccaagaccaaccgaaccgatactcatctcctcctctttccagctggggtatgcccaatatgatgccacctcaatggggatacccgggatccatgatagctggttctcaacctatgacgcccatgccgtatatgcacccgtcaccttcacaaggatacccgggaatggcgagtccggtaccaatgttcaatgcagggcaggggatgtattatcctccccaacagccgatgtcggttcatggaggaagtgggtttgggacacctgccgcaggaggaggaagtgggcgcgcgagtaggaatgggaacgagtcgcgaaatgggaacggaaatgggagtggaaacggaaacggatcaagcggaccagggatgggaagggagggtcagtcgtagagagtaactcccggctgtcgactgaatcttctgtttttcctctttctttatttttttttccttcttctcttgtgggatcccttcggactgtgagacgtgcctatataccgatattcctttatacgcactcctctttctttacatcgccttcgactgatctggacatatgagtaccccgcgaaatctagtgtagtctttctcttgcctttcatcctaatctatcttttttcttcttctcatacatgttacgcgttttctctatattattctcgcataaaacaaacgatcttgatctagtgtgattgagtgtttgacgaatcctcttacccgtctcttctaccgtctcgtttcttgaaagtgtatcattttgtatgtatcacaagaggacgctcctcatcttcttacacaagaacatatttgtaagggtctgaggagaggaaagatgatacgttcaatcaagtcagccgattcgtaccagaagaagaaggaggagagaaaaggaggaggagaaagaaacataaaaacaaaatgaagaaagaacatactaagaatacccttcgggtcgtacgtcttcttgatttgcttcatcatctcgatcgcctctggggttttcgagtaatggatgtgagaagctttcatcacactgtattcccgttccggatgcgacccagccacgcgcacaaacagatcggatcagggtggtttagttgattaataaacggatcatagtcaagttgagatgagatgaagagagaaggaaggacgaacccaagaccgtgttcggcactgatcgatccgttctcagcagctgccaaacgaacaatcacgttcagaatcgtatcaaagaagaacagaaatcagaatccataaagaaggagaaagggagagaggaaagatcagagagcataagagggtgagccagatcagacttaccggtaagctcgtagatgagaggctcgatggcagcttcaacttcagagtcccacttctgagcggcgatgttgatgtgcaggttcgaatctccgacgtgtccgtctgaagatgaatgaatgattgattcagaagaagaagaagaggaggagtcagaaatatgtgccgaaccaacgatgagatgggtgatggtccaaggcccaagacttacaaccgacgatagccttgatcttctggttgacctcgtccccctcgacaaacagccccttctccgtcaacctctccctcatcttctcgaccaacgagtacatctttggcacaggcaccgagagatcatacttgtacaccgacccacactttccagcagcctcagggatggattctcggagggaccagagagcagcgagctgggtcgaatcctgcgcgagaacaccatcggagatgatctcggactcgagaaggtgctcaagaagcgactcaagcttagcagagtcgtgctcatcgttggagcctccggtctcgatgagaacataaaactcggccttctcttcgagggggtctctggcgatcgctccggtggcgtatttgtgaaccatgtcgaaactctgcttgtcaaagaactcgaaagcactaagaatctctccgacgtgctgcttggtagcagagaaacacgtctggacggcctcgaacgaggaaagtgcaaagagagcaacgtttgtcgaggtaggtcgtcgggggcaaaggatggtgacagcggtgatgatacccaaggtcccttccgaaccgatgaacaactgcttcaagtcgagacctgttgttgatcacaggtggtaccgccatggtagatagaaagaaaaaccaggaagtaatcaattatagatcgaagaagacacgaggattgcgcaaagcaaaagaagagagactgaccagtgttgtccttcctcaagccggctttgacgccgagatcgacgatttttccatcagcggtaacgacctccaaacccaagacggatccatgaagggacccatatcgaagcagtcgaagtcctccggcattggtagcgacgtttcctccgatatggcagctatgattttccaaattgtaaaagacacccggccgaaggatggcattgttaatggcgatagctgcgtctattttcaagtctacaaatgacggaagctccgactcacgaccccttcgctccaagatcaagaggcatcatgtatccgtcctttccgatctcgatatcgagggcttccagaatgcaaccagcatcagcagtcaagacacctacggggcgcaacgaaccgacgaaagcaaagagggttaatcgaggagccttgatttggaggaaaccaaaaattaagaatcgcaacgcaagacgaaccagagacagaatcgaaatttcggacggtgttcaagttggagaggttgaggatgagctcatcatgcacgggaaccgatcctccaaccaagccagtgtttcctccttggggaacaacggcgacgttgttatcgttgcaccacttgagctagagtggtcccaagcccatgtaaatcagacgtttctggagtgagtactgcatcttctgtttctctcatgtcgaagacttgtcgagaaggaacacaaagagagagagagagagagaaggaaagataggttcggacggcggagccgagcgttcaagaattctcggaaagggaaaaaaaccaaccacattagccacttcctgggtagtcttcggcttgacgaccacaccactctttcccttgtacttgtccatccaatcgacattgtactgcaaaagctcctctggctctacaggagtatagccctcagtagcgatggtcgactgaacctgcgaggactctccgacgagcttaaggatagcagagagagacgaaggcgtgatctttgcaaagtccgctcgaggagcgacgtgggaagcgaaccgaggcttgggaagggcagcggccaggcgagctgacgggcgtaagactcgagagaacatgatttgataagagggaaggactttctgcacagcgacttgacaaggaaggcctttgcggacgaccaggagcgatagagtggtggtcaaagatgagcagaagcagacgaaagtggaaagtggagagccgatataatatcttgctgggttcattggctgggttaaggaatcgtggttacgtttgggtggttacggtgactaccgatacgttcgctagcacaacagagagtaagaaagttcattcaagaaacagaaactacattctagggaagcagcctgcttggagtttgatgctacagaacagaagatacggaaacagaatggtagatattaagacagaattcaggaacggactacaggagggagggtatcaaaactaagagggaagcgtccatgctcaaacggcgtcaggagcatctgcgatcttggcctggttggcgatcttgatgctcgcaggggatcgctcagaggcgtttcgaatggcccatgtaagctcataggtcttggcggcgtccatgtacgaggatagaatagacggttccggaccgccctcgatggcgtcgatgaagttggatacctccgagaagaagggatcatcatcagtgaatcggtgaacttcttcgtggtcgtctccaggtcgtcggacatagagggtagggttgttgtacggatcaactagtctgagttggaatccatcagcaaagacctccaattcacacgaatatacttgtccctgtaaagcgacggcgtggatgaactgtccgacagctccggactcgtacttccaggcagcggtggtcactcgggggattcgatcgtgaggaggaatcttggactcgtcgattttgatcttggagagaactccaggagcctcgttgtgttcgacagagtgagcaaagacggtcgagatgtcgacgtcaccaccaaagtatcgggaaagatcacagaaatgcgttccctgctcgattacaggacccatggagatggacttggtccaccaatcgctcttctcgatggcctcgtaagcgcaggcatatcgggcgatcgtagccatgacagtcaagttgttgtcctgaaggatcttcttcatctcttggaccacacggaggtatcgaagcatgtatctagaggcgcgccaagaaaaaaaaagaaagaatcaggctctcgtgctcaacgagtactggatgtatcggaataggattgcgagaacttacccgacagagacaatgttccctcgcttgaccaatgtatcagcgatgaacttcgctccggagatcgacttttcccagggctcgcccgtagcgacgggcttctccacaaacatggccacatccgggaagtttttgaggagctgaagctcgagatcctgaggaggcttgggtccacctcgatagagcggcggagacccaatgacgacggcgctacaattggtttcgataaaaacgtaagacatcagattttttaatccatcgtgtattctgatattaaggcaagatgaacgaactgaggcttcttgacgttcccaccctgaacggcccgagagtaagcggcgacatcagagtagactagcgtgccctcgtaggcgctcttgacgaacgagtctcgcttcttctgaagagcgtcgttcgctcgggcagcagaaggatcgatgagggcaacgaccttgagtcgaggtccaagcttgtgttccaatcggaaagagtggttccaaggtcctaaagagatcaacgcacgaaggcaacgtaagagtttgaacaatgtacgccgagagatatttctctcaacaaggacagaatagaataaacaattacgaaccctcgtcagatccgaacatgatgttacctatagatcgaaacgagtaagcgacgtgagacaaggcaacgaacaacaagtgtgtgcatccgtgagagaaccgagaacaagatcttaccagctccgaccatgacaatgttgaaatcctctccgggagcaggaggagggtgcctgtgagcaagtcacattaaccggtgagagagagtgatgaaaatagaaggatgaatacgaaaaggacaaataggccgaatgagccgaaagatcagtttcgggttcttccgttctcctatctcactaagtctaaactcgggtctgtacccgactcacatgtgcataggagtgatggactccgggtcgatgacattttccggatcatccggatgggctgtctctctccgaacagaactggtagagaaagccctgtggccagaggtgattggtgctctggtcgaagagatggaaccagaagcggaggcccttaaggactgagcgatgctcggatgggttgagaacctggcgtgtgagccggtcaatgacctggcaacagtggcgtttcgtagtatgtttctcgaaaacatgatgggacgtatagacacgagtggtggttagaagagaaaagaagagaaagacattggagaaagaaggagaagggaataagaacaaaaacagaaactacaccggttacgtagttgaaatctttttttacgtggagatttcggttctgacgcggggtcctttctggggacgcctctcgcggtgaggtcatcgagtggtctctgtggaatgaacactcaagacagagaaggaagaaaaaagtaaagaaaaaatcaaggcggaagaaaaaaccccttcataggtcttaacttttgtttcgtctcttgagtgttcatcaatccttgatccttgattcttggtccggaggtttttttgggtagtcgttgaatgaagcgtatgctctagtactgagcatgacccaagcagtcaaagaagaacatactgccacttcgttcatggattaaatgctcttctttctgtggtcaacatatgctcaatctttggtcaatgtacaaaaacttctcgatgtataacaagtgtgcctcaaagatgtgacgatcgatagatgtatccaacagcatgactttttttctttttctttttttgatgaaaattcattgaaactcgaaaaagtaaatgggaaaacaacctctctcaacaaactccaacacacacttaagc

SEQ ID NO: 587 - DNA, 32353 bp, Xanthophyllomyces dendrorhous
ggatggtcttcttgatctgagcctcaaggtccttggtcatggatcccttggcgatctcagcaagaaggggctgctgctgggcggtaaggtgggcctggaaatcggcgtcccatcggacgatgtcctcaacggggacagggtcgagaagaccgttgactccggcgtagatgaggggaaccataacctcagtggagataggcttgtactgtccctgcttcaagagctcggtaagtcgggatcctcgggagagcaagaatcgagtagaggcatcaagatcggaaccgaactgagcgaaggcggcaacctctcggtactgggcgaggtagagcttgagggatccggcaacggacttcatgatcttggtctgagcggcagatccgactcgggagacggaaagaccgacgttgatagcaggtcggactcccttgaagaagagctcagcctccaagaagacctgtccgtcagtgatggaaatgacgttggtgctgatttgacaaaccgagaaaacatgttagaatttgagtgcactcatccgcgatcattttgctccaacagtgaactcacggaatgtaagcggacacatctcctccctgggtctcaatgatgggaagagcggtgagggatcctccaccgaacttgtcgttcatcttggcggctcgctcaagcaatcgagagtggaggtagaagacatctccggggtaagcctctcgaccgggaggtcgtcgaagaagaagggacatctgtcggtaagcaacagcctgcttggaaagatcatcgtagatgatgcaagcgtgctgtagatgggagacaaatttccgagtcaggtcaaagtacaacagatgggatggttgatagaaaatatctcacctttccgttgtctcggaaccactctcccatagcacatccagagaaaggagcaaggtactggaggggagcggcctcagaggcggtggcggcgacgatgatgctaaaagatgggaagcaaaaccgaagtgagaatgagaattgctgacaagagatgagatgattttacgtacgtgtacttcatggcatcgttctcctcaagggtctggacaagctgagcgacggtagatcgcttctgtccgacggcgacgtagacacagtactgatgaaggagaaaaaaacatgagatcaaggggttgagttgaacgagactccttttttgaccaataggcgcgtcgcatttctagaaactcttgacaaaccacttacgagcttcttggactcgtcctgtccgtcgttccatcgcttctggttaaggatggtgtcgatggcgacggcggtcttaccggtctgtcgatctccgatgatcaactctcgctgtcctcgaccgatgggaaccatagcgtcgatgggcttgataccagtctgcataggctggttgacggatcgtcggggaagaattccgggggccttggaggaggctcgtcgtcgctcggcggactcgataggtccctttccatcaatggggtttccaagggcgtcaagaactcgtccgaggagcttgggtccgacgggaacatctgtatcacaaggggagaaagtgtgagatggaagtattttgagtgttggttcgagcgagaaaaagaggtactgaccgacaatctctccagttcgcttgacggtatctccctccttaatgagtcgatcgttaccgaagacggaaactccgctgttgataggattgagaaaagaaaaagcatggtttaaaaaaaaaacaagacaataaaaggaagccgttcggaaacggaaatgtttggtaacttacacgttgtcggcctccaagttcaagcacataccacggataccagaagagaactcaaccatctcctcggcctggacgtttcgaagaccgtaaactcgggcaataccatctccgatggcttttcgaggtaaaagatggggaggataaaacaccaatgaggacacttttcgttttctcgagatgaaaagatgcagacatactcaaaactcgaccggtctcctggacgtcacctccggtagaggcaccagcaattcgggactcgagaatggaagagacctcagaagcggctacaacaggttgagggaaagagtccatcagctttctgaacaatttttgcattcagccaatgaaaataggtaacgtaccaggcttagcggtggcgtaagccctggcaacggtggggacagcgacggaaagtcgggatcggagctgagagcatgaaagtgccggtttggagagatggatgggttgaagaaagcgagattggatgtggaaaaaaaagttttttagaccgatggatagaaaaagggacagatgcgatggacgacaaaaaagatcgataatggcggttgaatcccattgtcaacatgacaaaaacgggcaccgtgaacaagatgcgacggaggtggttgtcaaagagagttgagatggagaaaagaagatcgaccaataaagaccaggaagcgatgggaaagcaaagggtgaaaaacgcaacaaggagaggaaaggaggaggaaaaaaaaagatgggcgatgaaatcagccatctatcgatctgaacaataatcaagcagaatataaaaactcacggcagactggctagcagcccggacggtcgacctgagggcggagtgcatatttgggattcgtgttttaacgaaagaaagaggagaaggtggtgggttgaagggattaggcggagagggcggaaaggggaggaaacgaagctggaccaaagaaggcgtgggcccaaagaggcaaaaaagaaaaagacgatccaggagggcgttacatttctcttacgtaatatatgggatcacgtgtcttttatgggcaaagccgggacgatagaaaaactaatggaatagaatgtttcatagtatcaaagcacaaggcattaggatttttccctgcccttccaacgttcaccgccgttggatttgacctcccaatcagataaagcatcttcgtcgtatcgttttccttttgcgctaccttcagcttggagaaaagagtcacacggagtggcggagaaggacgaggagtttagtaggggaaaaggaaggtattcctaaaagatacgtatgtttagagacagaagttagtttgtgagtgcaatctcaagtgaccgaggaggacctacgttcgcgatagggtgaacataatctggtcccgacacaatgagaagaaagatagatttagtccaatatctagtgggttcctctttttaaacccgcacatcaagatacacataagctcacgaggattgtatttgtatccagcgccataaccgagatccttcatcaagcctgtaggcgcatttctcatttgaagtggaacatcgtaaagctctccaggcgcgcacgcagcttcagcctacatcaactcaagcattcatattcagtcagatatacttgtcagtcttaacaagatagctggtaaagaacggagaaaagagagaagatatgttacccgattgtaagcttcatatgagcgagttgacttgggcgcctcagcaagataggcaacacagtgagctaggttgattctgatcatttcaaacaagacaatttcaccgaatacagaggaaaccccccaaatcagctatatccacagtatcaatatcacagctcttatcgagacttatagaaaagaattaatttacctacactccggccttgtgcacagaatcataaccatcattgacgtatgtgagtacaatccataagggtatatagaggaagagattttaaaggggtctgagcatacattccgatctgttgacaggcaaccattgttgatgcagcctccgagttcgtccattatttatcaatatccaataacactgctgtcagataacgataccccgtgcaaaccttttttacaggcgtttgatagaatgaatagctggaacacaccaacggaagagcatgattatcggccaaaccgatgtcttcggaagccatcactatgattctcctagcaatgtatacagggtcttcaccggcctggatgattttcaatcaataaagatacatggggggaaattgttatttgatagcacgtcgggcatgtatgcgcgcttacagtcaacattcttgccagccaatacatggcagctgacccatctgatcctcgaacacttttctggatagctcatcaaaaagggctttaatacagtccacgaacgattgtctcgtcatctaagttgatatgtcgttctccagaaacagactcacatgtagagccgagatcatatcataccgagcatctccagtacgatcatacctgaacgtcaatgttctctttaaccccttcatgagggcatctttcttctctgagtcccacttccatagacgaggttcaccttgatcagggagtcgagccctcagtctacattcctttgcaatcaagttcaacgctgtctctagcgagttcaaagccacacgacaatccccattggctgatgaggatagagagctgagcagagtgtcgtctaacaacgggatcggaggaaagtcgtttggatcagatttcggggaattcggtggttcggaagctggtggaagccagacctcagaggtgtggccttggtaccattttcgacaagcccgtataagaactttcttaacctcggatgaagatagtttcttgagtgtgatcactcgacagcgagagaggagggcttggttgatctatgaatcagctcaaagtatcacactcaacgcagatcagtttacgatgaacacggtcggttcatagtagatagtacatacactgaaagaagggttttctgtagtggcgcccaccagctgcagaaccccagactcaacgggaagaaggaatacatcctatacagtccaaagaatcatttttctttcctttagaacaaagacccagacaggacagatgaatagaatgacttgcaatttggcttttggaaaatcgatgaatctcgtcaatgaacaacatggtcctctttcccgtcagctttagcatattccccgcctgttcaataatctttttcacatctcccaccccggcagacgtcgcgctgagctccctcaactcgctatcagaatggtttgcaaccacacgagccagtgtcgtcttaccacatccaggaggtccccagaggatacaactgccaagctcgccagctctgatcagatccttcatcagagtcccatcagacagcagttcttcctgtccaaagacttcgtcgatagtcttgggacgcataacctctgctaggggacgtactgccatcagagcatcgtgagaagtgtgttttggcttcttggaaagtggagcgggcgagggagagcgctggcgaacggatgaattgtggtcggtaggccttggctcggacttgactgacaggcgccgtttcagtcctgatgaagcagtgaaagtgtcgacaacggatggcgctacctgggttgattgataactgctggatgtcacagctgcctcgaataaaggagccagcttttgagccggtttgggaaacgaggtggaaatcgcggcagatgctatctcgggagttgatgatctattgccaggtagccactcgcaagaggaatcgagatgtctgatgaaaagattcgccgataagacaacgcttagtatcttgcatgagttctagaaggttgaataagcaatttatacccacctattgatactgctctcctccaaaagaccagaacaaatgggacattcgactgaaatcaacgaattcaattgtcagcgtattgcatctagatatttaaaatctacctaccagatacgaaccaatgttgtccggcattgttaaaagccagatgaatctcgagtagcgttggtcgttatcatcaccatcagcaaaacgagctggtggagttcaggctagatcgatgaaacaacctcgtctccatgacgaccgcgcgtcttccgaatttgaattgttcaaacagatttcccgggcgcactttgctaacttctaagagctaccgacaagtgtatgaactgcagtcgaacgaccatattacgtacactctctagatctagctatcgccaaaactcaactaccatcatgcctggaaaatctcgtattaagaaacccagactggaacctaagccggactttgagacgggtatgtcaaagccagcctatattctcttctcttctttctacttcagtttggcatgaacgttggataatcttgcagacattgattcttttcttcttgtgctatcattctataggcctgaactactgggcagatattccggcagacaacaacggtgtgctcggagggttcggaaacggaacactcccccgagtagatgctctctcctcccgaatgttcattctttctctcgttcctcgactagctcttgttccctcctctctcaaaacactacccaccaattctccctctacttcttccattcggactagagctctggacgtaggagcaggaatcggccgtgttactggttctgtattgatccacttgctggatactgttgagatccttgagccagcacctcatttcttggatcaagccgtcgtcgactctgccaaatggaaggggctcggaggggtcgaggtggacaagaagatgccgaagaaggccgctaggttctggagaggaggtctggctggatttgatccggcctctcctgcagcgtctgctgacgagttgacaagaaaaggattttgggacgatgaacagaacgagcgaccagaggggttgaagtacgatgttatttggtgccaatggtgtttaggtcatcgtgagtgtctattcgtgtttccaaccgtctcttgctctcgtatatctgctgaatattccttggtttcgtttgtctcactcgttatctatttggtggatgaataacggatgtgtcttgcagtttcgacggaagacttgattgtatttttcaaggcagctaaggcggctcttctaccaaaagagacgtatgcggtaatcgttgtcaaggaaaacatctgccccgacttagaagaggatggaatgaagggaagcactgtattcgacgatgaagactctagtcttaccaggttagttcagatctctcaaacatatatggtttgtgttgctcatccgactaaatccttgatctctacatgcatatcatgtatagatcggacaaggcttggaggtacgcgtttgctcaagcaggtctggaactcgtcaggatggaagttcaggttcgtcctcattgcgttttaccttacagataggttacttggctcggatgccataagtatgatctcctaatctattattaaaactttgattcacagcaagggtttccggatgagctgttccctgttcatatgtaagtttttactaaaaaccaacacattcaattgaccccatctgtacagaaactgattactatggtctcatctgttctttaccgcacaggtacgctttgagatgagatatatatgaacgttacattaattgaaatggagatctttcagataccaaactctatcatctcgtcgttgtccttgaaatttgctatgcagctgatagatatatcggttgagcgatgctgttcggatgtacagttcttgtgcatcagcactgctatatgccgtcaaatgagagcgaagcgacatcgcagggcagtaactcttaaccctaaccagaatccgacggtaaatgaatacccgtcggccgaggttttgtgttcctgggtcgatctctaatcatgctctatcaacattgtttgcttggaacatcgactcggttgacgcttcatcatatcaataccctctgctgtgcggtctataggacatcatcatactacgtgcctcctctagactctagagagcaacatggatgccatcaacacttttgtcgccaagtatgtacaaacttgatctgttcgactatccgtcacaactttgtgccttgctttcggtcatgaagattcagcccagactgtgagatttcttctgattagttttttgtttgtttggttaattcaaatcagtccgtcatataaggactatcttgctattttaaagggagctcgtaatggactggttcgttcggaacccatccaagtcgatctgaattcttcatatattcaattgatacttacgccttacatcgtttggtgtggatgaccttctggatgttgatctgacatgttgatttctcgctaatcttcgtcaggtctacggtgccaagattcggtgagattccttcttaatttcttctggaatatgatgtgtctagagaggcttgggagcgtccgatgcggtcattagtgatgtatgctaaacgctcttgaggacggctcatcagatttccgcatgctttggtgatgactttgctcttccatcgaggagatacgaaggccaaagcagtgagttctctcttctatctgtccaatagaccgcctttgatagtatgttgtgaggaagaaagaggagataggagtaaatcaatggctaaatatcgctccattatcgtccgggtcgagcggtgacactaaaacagaactttgtatacaaagcaacgaagcagcatgcattgtgagctcatatgtatcataatttaggtcttgatttatagccaccgtagttaacgatgcttgtttgttccatcgattcaggaatctggcaaagtttgtgacgatatacaagactttgatgcttatacagaaaaagttcaacggaggtaaagaacgaaatctggatacgtttctatctgggttgatgggagggtatattgtgtttggggaaagaaacgctgtgaacgaacaggttggttacttcttcggtccaacacaccttttcgtatttctgatcgaaatcgttttttccattctctcttgcctctcgtatcactagattgtgctatatgtttcctcaaggtaaagtgttcgactcctaatcataaatttacatctggcaaacctgacatctattctctttgggagtacactcggtctcacagagtattagcttcgttccttcctcgaatctaccaagcaccgagtcacccaattgatactgccgcaccgacgaccatccaacctatcccgcctgctcctctaccgtttagtcagtgcttgagcgatacaaaagactgaatttctgctgaaagtttgttcatatattgactcgtcttttcactccatctaggtctgtttgcgagtgtggcctggggactggtgatgtatattttccgacacaacggcgagaccctacaaggtgcgtgcgcgatatttttaccttcatttttgttcttgtactcctcccccctctggaacgcattaccgtgatgcttacgagaatgtccttttgcttttctctctctcggtcgaatgcgcgatcagctggaatggttcgtgcatcaggatgaaacttctagactgatgaacagcgatagaggagtctctcactgaactgaatttcttcgtttgttctgcccaacaggttaattcgatgacgtatctatatcgagattctgatacgtggtcggatctaagatctcttttgtggcataacaagtagtacggccgacggggtgggataattttgttacaaccaaaagatgatcttctcttctttgagctgttgtatttatgttggttgttctattcgttctcctccttttctctttatatagtacatcttttggttagtcgatgtatgatatacggaaagcgaagagcactccgagtggagtggagtgtccaggctgagatgaggctgaaagggtgcgcagtcgatgctggccggcttgcacattttgacttacgaaagcgattcccagtattttcatccgcactctcttctctttagccaatccaatcccaccttgagcttttacccgtccaatcctccaccaacgacgactaccgccttacaacaagaatcactacaacaactcttgtcctacaaccagtgatttcaaaggccgtatatcatgttcaagtctactctcatccgaaccgctcgattggcttcggttccttctgtgtcaatgtcgatcgctcgaccggtggcagctgttggtccttccatggtcaggagtcagcaaaggggataccatgccaaggtattggatcactacaataagcctcgaaacgtaagtgttacctgtgttttcttcctttatttcgttctttgtctcgactcgaacgtaggagcgagaaagacttttccgatcagatcggaatcagtggagtgctcgccggcgtaccacttttctttttctcttttcctattcttaccttgataaattcgatgggatgggtagctgaccaagtggttcgactggctcaaacgtcgcttctttaggttggaagcatggacaagaaggatatcaatgtcgggaccggtcttgttggtgctcccggtatgtgatttcgagggagatctaatcctgcaacgtctgcgtttctttgctgatcgtgacactacttttttgtgtgtggcgacaatagcttgcggagagtgagtttgtttgctgcgtcggatgttgtgtgtatgtatatatatgatttgcctgtactgattccaatggtttctttacctccttacagtgtgatgaagctccagatcaaggttgacgagaacggtatcatctctgatgtgtgagtgatcgatagtgggacgggagtgcgcgtgcgtgctgatctgatctccttctttttcttctatgggattcactcttttgcagcaagttcaagacgttcggatgcggctcggcgatcgcgtcttcttcgttcattaccgagcacgtcaaggggatgacccttgagcaggcaggcaaggtcaagaacacggagattgcgaaggagctaagcttgcctcctgtcaagcttcactgctccatgttggccgaggatgctatcaaggtgggttctcgttcatcgctactgttttagataaacggtgtcgacaccctatgaactcgatagatggctgatgattttaaatgaatcttcatccacgctcacatctacatctatagtccgccatcaaggactaccagtccaagcgaactcctgctgtgagtagtttcaagttgtgattagataaataactcgggctgaacaaaagacaagttgatcaactgaccaaatgatttgtctgatgtaatttctgatttgtgtgcctgtatgtctattttaggctgctcctgcttaaactggggattaggatttgtctatgcgattttttcacctttccttctgctttttggttcatgtacaaatgttttttccactttatatttgattttttaagttcttcaaatctgttactatcgcctctgccctatatcttctctttctttattccatctggtgtgtcttctctttctgtctttgaaacgatgtccttgcgaaggccgagggggagtgaaggaggatgagggtggggctatgagtacagcggaagcagccgttgggattccatattctgatctctatactgctcccgtagtcactctatctgccttgccgtgcgtgagtgtgcgtttgtctctagtccttgccttcttctgtagcattaaatagtgaatctcattaaagttatatggctccaagagcatgcagaggaaaaacaaagtaagacaaattcgaacacagtcaaaccgaacaaagacaagacccatagatagaatagtgttataaaaagaaagaagaaaagattgataggtaaatgcaatctaagcgataaacagacaccgcccgtctctgctcacaccttgtgctctcccccgaggctttttttacgcgtgcgaggaggatggcggacgggattagacgcacatgttgtgttttttaatacatgttccgtttttttttctattgtgttttttattagacctatctagttccaacaaggtgaggcctaaacgctcggcctcatacgccgcccatacgcctcgcctcaacatcaccattcccgttttggctcttcttccttttttctttctctttccctctgctggatcttctccatttggacgttcctatcatccactcgcccatccagctcgcatacacccatatctagacccacccacacccacctatccttatatacatactggccctgaacactcacactcagtacaagttcacgctctcatactctcattcacgatgaagagaccaccgggcagagtgatcgagcgtgaacctcccgaacactctcgatcatccgaacagtcaacatcggtcaacgcgtcgtctttttcgtcgacagattccggtcgtcgtcttgggataccttcaaagagaaacctactttggttgatcggttacctcatcgtcacaactcctcaacccggcttggccatcccagttccgtcttctacatcgacgacactcatttgtgaccacccttcgtcagcatcaccatcgccctcggtttcgttcccctcgtccctttctgtcccgaaagtctatccgtccgcgaatctaaaagaaaaagctagttctattttcggctcgtcacctgcaccttcagacgatgactgcgaccgagtcagttgccgtccctcgttatcgtcaccaactagtacacagatggccgtaccgagacagtcaatcggtcactccattcgcgtccggactctcgatgctgctcttgaacaaaaacgggttgtcgatctataccgttcggacagctctgggaattggcatctgaatacacaatgggaactctatggagttggtccagccgtcagtctatcaggattttcttcacgctcgctcattcatttacaagctcacacggtgtctcgggaatgctgatttgggttactggtttcttctcttattcttgttcttcttctttcggttcatggtccgtacttgcgatgcacgcgtcgttcagaacgccgccgtatccacaaccggcccggcagattcgaccgcatccgccacaggcacgtccgtttcaactaccaacgtctccacggtttcgcctaccaggcttcccccaggctggggaacgacctcgaggagcgagttcgaattaccgttgatcgtagcgtgcagcgtagcgctcgcactggtcgtcttggtcaccatgttcatgttggtcacgtctcttttgttccacccgttctcgttcatactccagactgtcactcatggttcttttcatgcgtcttttcatatcttcttatcctctttcttgtcctgactactctcttctcatcgatacaacagattcatccgccggagaaataaacgccgaaagaaacctaagaagaaaagaccgagaggaaagaagaccgacccaaccgaggtcgtctaccccaagccggcttccattacttcggctgttgagtccatccagacccagccgacgaaggaacgaccaaaaggaaagaaatctcttgtcggaacccttcgttccaaaggcaccaagggattcctacggctgagaaaacgaaaaaaatctccaggatcggatgaagatgaagaaacggaggatagggacgatcatgcatgggcaagcagaacacgtccagatggtggtatcggtggaggtgttgcaggaggagaacacggtccaacggacagagtcgaaccgttgaacgaggaacctcggcctccaagagtcgcgtcttactcttcacttgatccactatccttaacgagcatgtccaacccggccagtctgacagatccccctacgacgacgaccactgtgtcttcaaccgtagagtcctcaacgtccgtcgaaccagatacgaacaggaccggagagcccacatcggtcgtttatcacgagaacaaccctccatccacctctttggtagattctaatcgcgagctcactcttccagaaacacctgactctcaccagcctacgcctcctgcttatcgcgcttctcaagtcaatccgtcagcccatcgtcatcaacacaaccatcacctcggcgattcttcgcccccccagtcgccgatccattctgaacaacccccgattccatattcattatcagcaggaccagggccttcagatcggtccaacggcacacctatgcctgcgacgagaacgggaccagaaggggtactagcctcaacgatggggtcagttcctggtcaagcatcgtcgacgattatcgacgcttcagactatccaagagatgaaaagttcagacctgctcggcctgtaacccctcctttctcctcgagctctacatcccacatcaacccccaaatctccggcagatcgaccgaggctggcagagaaactacgacgacgacgacgacgaccacccacatggctcatcatttggctacggatgataaaggtgtgttggccagattggccaaccaggcgagcgcaccggctgacctagacggagcacctctgacagaaggccataggtcagatcaaccggagggaaccgctccgcctggatgggaactcgagaatgcttcttccgccttgatggtctcgccatctacgcctgtcccttcatcttccctcttattctcatcatcgattcctcctctagtcggtggttcaggtctgcctcattcgaacaccgtttcggctgaagaaggtgagggtataagcatcctacccgctccgcctaaacaatggggtatgaaaacgatggaggacccgtacatctcgttggatacctcggaagttgtacttggaccgccggatgagtcgatggatcttgctgattatgtcgtcgacgacgacgacgggggaggtacggatgacggacaaggcttgccctccgcaccttttgacccacaatcagagccggcagaggagggagatcatctcgaacaggggcaggaggcgcaagctccgtcagcaccccccttggatttggaggacgaggaggagcaggaggaagatgagagagagcaagaacagggacgaagcaaaaagtcgttcgaagctagcgcaccggatctaccagctcttgaagaagatgctagtgcgcctcatctggagtctgaggcttaaggcgaaggtcaccaaatttagttacattctaccatttccttttttttcctctctccaaagttttgaatctgcttagtcttgtcctttttcatcttatatcagtcagccttcttctccctctatatatcgttctctaaccatcaaaaataatggacactgctcgtcttggtttttcctgcttaaatgttgtatatctgtcctcacgaaaagacgatctttcatattcgcttggctctcttattttcattcttgtctccctcttctggatctttcgtctgctctcgtttctctaaaatatcaactcttgcgctcttcttttctctttcgctcgtcgtacccgtctgcatcgattcaatatctgatagtcatacatactcaaaatataccatagaacactctgttcgttcataagccaactttttctcctcgagcgaacaaagacctaccctccttcttcgtttttgttctctgtctttgttcgttttacgttgttctaccacctctccatgcttggtcttcgctctttcacgtctttcggctttagtactatcttgatgaacatctagcatgtgtggtgtgttatgtcgtagtggttcctttacagaggtagacgagcctgggcgcatgatcatccgcacgcatacacgaaaagccatgaggatgctcatgctcatgcttagttggcgagtcgttgtgtgttatcgtccgtgcattgattcttgaaacgtcggtcctctttgaagggccatatgtgctgtgacttcgttttcataggatcctcagcgaccttcagcgaatgaaagaaacgcagagaagaggaacgcaagacaggaaaaagaaaagagaaaaggcagaaagaggaaaacatgggatagatgagttggataggagagaagagagaggaagagaacgaaaggaagaaaacgcgagtcagggacgcatgggttcgacctaggttcattcataattcccgttcgtgtttgatcccgacctcaaccttcgcctcgtcctcgtccttctccttgacatcctcaacctcacttccgctcccacctccaccctcggcctcagtctcgggccagcagagagcaggactcgttcctttgaatagatactcgcatttctccaattccatgaccgacaaaagctcgttttctctcgcgcacgtcatctcgagctagaaaggaaagagaggtgggatgctttgtgatcagtcctaaggccgaccaaggaaagagtagtgaaaagaaaagaaacgtcaaagaaaagaacaaaagaaagagagaaaagaaccttgacactccgatgtggaccgttccagcatttagctcccatatcgtacaactgtttttggtagaagccttctgttccctctgtcgctttggaatcatagttccactgtttgaacctcctgtgttcgtcgatggcgaagggggtggtttcggtatgcgagagttcaggaacaagagggaagagaagagtaccaatggccagacatcagcgcgattttcattgaaaaggtgaaaaagaacaaaggacagaaaagaaaaagacaagctaaagaacgcaccctaggctgttgaccgaaccacctttattactcttctgctttgcctctccaaagaagcacaactcataggtgtactctcccagatttttttcgatacacgtcccctccagcttcttccattcaccctgcggaccaaacttggcggtcaggtccgacaaagtcgactgagtgttcgataaggatgattgaagatttgtcagcgccgtttgcgcgaccgtcagcttctctcgagacggcgaggatgctagacgatgagtgaagtgatgattccagacacaagagttgaggggaagaagacaatagagagcaagcaagcaagtaagcaagaaaagaagttagaaggcaaggttccaagaaggcaactttttcgaaagttttaatgatcagaatcaaggtacaaaatcggccacaaaccagtagaggccgaagatttggccttggccttgacatcagttggctcgacaactcctagtttgatcaaccactctacaaagcttccacgaaggaactcgtacgactcgacaaatggatcagggatatagtttccgatgttgtacacttttttttaacacaacgtgaatatgatcagagcatagaagaatcccgagggtgaacgaagagtcaatattgatatttaatttatggtcgagattgatgtaaaacaggatggactgacaaattgaatcttcagctaaagacgcaaacgacgagcttgagaaggaggaggcggtggtaccatcatcccagccgaccagcagaccttccagatccagcttctcgagctcctcgagatcttgatctgtgactgcttgcgaaccaagctcctcttccacagcctccttcttgatctcggtttcgccttctccagttccttcagcaggaggagttcggccatctgagttggacgatggaggatgggtcatcgatgagagttaacgcacagctcagttacacgaaagacaaggaacatcaggaaccgcgcaccatggaaaagttccatatatcctttggcagccgctcggacggccatatcctgatagttaggattgtagctccggacaaattcctccatgattcccttcagctgctctaattcagtctctgcccgggcggttcgcgtctgcaaggccgataagatagaccggtggtttaagagagattggaacaaggctaaacatatagaattgaaatgcacacaaggagtcagctcatggagacacgttgctacgcagacatgggagatgaaccgatggtgacgaacgagaggctcttctcttttctttagtggctccttcttcggcttcagaggtctctaccaccttttcggcctgtttgacctctgcttccttctttgagacatcttcgaccaatttctccagctcctgctctagctgaacctttcttttttgagcaaaggcgatataagatgatcttatttttgctccctggatcatgataggaaagaacagggtcagaagagaaagataggatagggcggttcctcatctgagttgtagcgcaacgggtttgcagcgtacaaccaatctagatgaataataacataaagacaaagacggagaaggatagttaaacgaacggtctttctaatcttggcctccgcatctcgagccgctctgaactctttcccaatctccccacatcgattctcacaaaccccaggagcttcatcggatccatcgcaacactccggatctgttagaaaccagaatgaaacagttgtgtggataagtatgggagtttgataaatcaaacatcattgccggcagagagatatatattaatttaccgcagatgccatcgcccacccgactggatagaatcacaccggggagatgaccgacgttggcgcaatagaacgtcgagtttctacacgcagatgtgcctagatatacattgcgaggaatggaatcaccatgcgtgtcaaaggaaacttcgtcagctcattcacacgcttgatcgcacatcgacgtagaggaaatcagcaaactacgcaccaggctcgtcacttccatcttcacaatcacagtaatcatcgttcaccgcattccacgagatgacctttttcgaacccgtcagacatgtgaaggttttctgcgcagagggcttgtaaagcgaatattctaggaacaaagagttgtcatatagtaggattagtcaagcttgaacaacatacttagactcgtcttgcgaacgacaacctactttctggattgagacccttgatggtcgacggatcaaaagcggcgacctgggtagaaaccgacagggaagaggccattaacagaggaatcgccagaacagggagcatgactacttcttgtcgagagagagagagacgagtggactgtctggactgtctggtcggtcggtcggtcgatctgttcgtgatggacgttgttgtagagaccagggagaatgatgaagtgaggagaatgatgtggcgttccgggtctgaaagcggtgcaggttaccaggcagtcatcatcaacagcggcagccaggcagcggtggtggcggtagcagtagcagcaacgacaccagcgacaacaaagacaacaaggacaacagcaacgacactgtcaatcaagagcttggccaagcgcactcgtataaaccacacagaccattcagtcccactaaagactctgcacctccatcgacttgcccaaaggccagcgcaccgatgaggtaacctgggctgctgctgctgcggagaagattgggcggccgtcgccattagccatcccgctcgttggagttctatcttcttaccttcaaccccgttcttgcatcctacaatccgtacagtcttatactctctcaagtccaatgtcaactgtcgaagcccagccaccttccaagcctattcaggtcaagctcgtccttctcggttagtcctttggtatcttgttcgcgtcagatagaaaccggaagacagtcggtctgaactcggccgctttatccctcgtactgcaaactccttgcttgatttcttgctcaccttgcttctgtctttctgggtctctcttgaaacatcctcccttggacttcaacaggcgaagccgctgtcggcaagtcatcagtcgttcttcgattcgttagcaatgatttcaccgagaacaaggtacgtcctgaccatcgacctgatctggactgatgtgtggaccgcggtcggccgagcgtgtactgatagacgtcggtaccacttttttctcctctggccttccggggaaactctcttccaaccttcaggagcctaccatcggagctggtaagtgcaaacatgctgagacagtacagacgcaacgcaaggtcaaccgatatcctgacccctggcttatttatcattgtggctcggatcatcctcttagctttcctgacccagaagtgtagattggaagacaaagttatcaaggtccgtcagcagtctttgtcagatcgatccctccgatgaatcatgaacaaccaagacttattggaagaatcatgtcttttcttctctcagttcgagatctgggataccgccggtcaagagcgatttcactcgttggcacccatgtactatcgaaacgcgagtgcagccgtggtggtctacgatgtaaccaaggctgtgagtggtggatctctgtcatccgttttccctcttgacccaacgatatcttcagacatcatcatgcacatgcaactagtgactgatagaagaaagcgttggccccggatggtccctttctttcatcgcttgcccaggcctccttggacaaagccaaagcgtgggtcaaggaactccagcgccaagcaaacccaaatatcgtcattgctcttgctggtaacaaggtacgagcgcttccgcatcgtccatcaagcacaaacgcccgttatctttcagttctaaattcatgttgtcatctctgtttcaaagttggatttagtgaccccgtcgactgagccggcgtcagaagagggagccgaggagccggaagagggagcaactccggtccaggctaaagaaagtcttcgacaggttcccagggaagccgcagaggtcagtttgttccccttcagaatgttataatcatcatctttattcgtactctctatttaaactctttaacattcgatatactcatgcatgggtctcttgaatcaaaatacaatcaaatagcaatacgccgaagagtctggattgctcttctttgagaccagtgcgaagactggagaaggtgttggtgaggtattcaccgaaatcggtaagtcgtcatgtgacttgtctttcatagaacgagatcagtcgttctcactcccttccatgtgtttacacactttgcagccaagaaaatccctctcgagacactcaccaatggacccgggcgaacggcagcggcctcgtccggaaacgccgctcgagccacctcggccggggcagaaaacgttgcgcttggagagaacggacagcagagtagggaaccttgtgcctgttgaaccatccgctatggtcttttctacttctctctctcattctgtgcatgtcgagttttcctgtttgttgtttccaattctccttgttttgtttatccactgctctcgtccttcggcccctctttccctacaccatcatcagatgatgatggctcgtttcttctgccctatctcacccctctcgacctcctgctctgtaccatctctatctttcctatttctctctaaggagttctctcctgtcctctttattgggtctcttttgaacccggcttggtaggcagacaggcaaatcagacggtttggtctatacttttcatttcccatcttcatatacgttcctctttccagtctttccagtctttcctctcgatcttcatctgtctacctgttcgttcgagacagctttgtttcgttgatttatatcatgatttgttcattcagctccgatctttagtcaacactcacaaggtgaaggttcactctgtgtcgaagaagaattttcacaatcggtcgacatcatcttcatcaacataatcagatcatccaacgattgtgaagggctcgtgacaacaaataaggacgaaacaaaggaaaagaaaaggattttgccccagacaagaagggtctaagacagaagcctggacgaacaatggtgatgaaggagaggcgagaagactggagacgatagatatgcgaaagagacagccggtttttcttttcctcatgagaaacaacttgagtatgagggacaaccccatagagacaagctggataaacgatacatttacaactcgacacacacgagcgcagaccccacacgatgttatatctgagaggcggatgatagaacggcaggactctggatacgaaattgaaggacaagccattgtaaatggtagaagtagcctaggccctcaatctctgaagatatatctcgagatcgatcctgatacccgagcgaacgaagtgagacccaaatgaacaagaagaatgtcaaaaagatgatttaaaggtcaagggaaagaagagagacgaccttaccatccacctccgacacggaccatgacttttcttacttttccatcctcccctccgcctccgctgccactcgtctctccttccggtcctcctggtttcggtccttgcaattttaggtttcgatgcatctccagcaccttgcacgctagaacctttcttccccctccgctacctgtcactgctccgccagcggaacatatgaccttgaacgcatactgtccttcagacaaccctcttgccgcttctcctttaggaaggagatctatcctctctaccccgattcgacatcgattctgaccctgtccctgtttagaatgttcatagttgaaatgaagatcaagtcggaaattgttcacgaccctagcgatctcctgatcgagcgcgttgaacttgtgtggcaaatacggccatgtcggttcgttctgtcggcccggttgatcgatctctgaccgagaagccggacgtaaggataatcgagaaggcgatttactgatcgtcgtccgagaggtcaatgcagacggggatagtgatgaagaagaagacagagagagaccctgtcgagttggtgagtccatgttgatcgcctgttgatgctgaaacaaagttgacggagatcgaacggccggatcgaaccctgcagtaggagagtgtttttccgatcccgcgggactggctcgtgttaaattagagaacgatcttctcgagcctagggacgactgtctagcagtcgtccggctaggcgaattgagcgaacaaccgagtgccgcttgggcggtctgcttgatgatatgattaggtgtttgagatcgactgtatgacccggtgggaggggccgatcgactttcttcgtttccgaatgacgaagaaggccgaggagggagtaagcttgaaggagagagaagttcttcacttgccatatcagacaggctgtagcacgattggtagcctcctgatgtcggagaaaggtagcgtggagacgaagaagaggacggcgtatggcgggtatgatcgtaggagggagttgaattcggatgaagggtttcttggagatttcctctcgaggctagtctaggtatacggctaggcgaagacacagccgacatttctgctcttgaagccggccgaggaatccggctgggtgtctctggtcgcagtgacgctcgggatgaagatcgagggaaaattgacggaggtggactcaggcagcttgggcttacacaacgggcgctggccccactgaatccgccaacagaactagtaccgacagacgaaggcggagacaaatctggccgtccactggtacacgacgacgattgactgagcgtgtcaagataccgagtttcaccactataatgggcatgggaggatcctgaggtagatgagccgattccgacagatgaacctctcgagggcggtcgttggatgtttgctggactgggactttgacttgcacccagggtcagactcgacaaccgtttcgtcaaccctcttgagggcgccggagatccagatcctatctctgatggcggcgctcgaggagaatcatcgactctcatggagccgttccatcttggttttcccgccaaactatctgaagaattcggctggcttggtcggcccatccaagtagtcaaggggaatgagagggaagattggtccatttgaggcgattttgaggattgagtcgagatgcctatagatccagttgaggccctccctcctgttgttttcgaaggtgtatacgttcgagagctctgtccatcggacggagtgcttcctctcgttgaaaatccagacatcttgcctaacattctttgaaacggcgatcctgggctggacagtgagctagccatggatttacgaggtcccttggtggttctcacggaaggagtctgataagagccgtcggatgcaggagagtgatgggtgtcagatgtgtatttgtcagattgatgtgaagagtcgtgtcgaggagacggatcgtaggtttctgaggaggaactgcccgaaggtgtcaacaagtgaggctgcccgtatgaaggagatgtggtcaacgtagaattatccatagtggaagattctttggcgataagaaagaggcgcgcgctgtcgatttcgcgctctacatggttcattctatctgtcaagctgaaaaggcaacaaaactcggtaagtcagcgaagatcagaaatctaattcatcaacgctctctaactggtttgatggtttactgacctcttccatcgggcttgagtatcagtgtgtctattttacgaaaggggagaagtggcgagagcaaatgaggatggatcattgagactaggctcaaattgatgaaagtagccgaacaaaaacaacacatgcttatacgaagcaagactccactgacctgcgcaatgcttctccgttacttgtgactctctccctgatagacttgtcgagaatcgaaagcactttttcaaccgacggccagtaatacttcttcttggcttcatagctcttgagcgtttgctcaaacatcgatatcgtcaacagtggtgcctgttcgggcgggtccttccaaaggtcgaccgggtgatgtgcattcggttgatctgacggcggaggaaatcggagctggcgcacttgttttatgagatcctgcatagcccgatccaaaagtacacatcgagtaaacaaaatcagcgcacatatgagaaagaacgaaatgtcaaagatgtgaagataagtacatttgtttgcgaaactgctttctccaaactgtcaatcatctggtcggcctgactgacggcaatgcggaacctatcgagccaaccatcttctctaagttcttccttgaccttttctacgctgtctgtgacttcgcgccagtcttcctcgagcgcggcgaaccgcctgatgagtagcgaggttgaagaagataaaggagccaacgaagaagacgacgctacgttcagatcggaagaggaggatatctgattgatacgagattgaattgagggaaggagagaggtgacggaagctaattgcacggccagagttgcgagcactgtctcgaccgaggatgatcctgtagaccgtccatgtttgttagacgatgaggctgaggctgacttgtgccgcaactcttcgatctctatagacgaggacgatgaaaggcaaacaaccgagatcagcaccagacttaacaaagagctcgattcagactagaagttggccgagtgaaggcagtcccatggtctgtttgactcgcatagcttggcctgtacgaacaggaacaaatatacgaaccataaactctggagtgcatctctgagatgttcatttgagcttgagctatctcagccatcaggacttcctgtgtaactccatcgtccaccacgagaggaaaccactctctgctagatccaagtaaatcgaaaaagggaatgcagccggtgacccagatcgataacaggataagcgacggtaagtaaggatcaagcctggaggaaagagaaaatagcaggcagactaacgaggattccatgtgatctccgctacttattttgcctggaatgaacctaagcgtatatatctgatgataggtgatatcaaggatagatgaaggcttgatgatttggatgaactcttggtgttcgttggctgaacgctccctgttggtctcaatttgaacaagagaggaccaaaacaaggcaagaggtaaacaagagcgacacacgtaatgagagaacgaagtcaatagaaattgatgatacagaaaactacgaaaagactacaatttcaatctcgtgtcgtacaactcgttcacaccatctcatcatgtcaaccggaccgtccaacaagcctcttcgtcagctgtcctccgatgtatcgcttctggcatcccttccaaatagaacgtcccttctgtctctccttccagacgctccggcttatgttcctccggttgaaactctcgtcaagcatgctccgcccgaagctcctccgacgaccaaggaggactcgctggtttttggaaagagctttttgaaagcagttcgtgagcttcaggctagtggagtcgagaaagatcttgaccaatacggtagcagggtggaccaggtcagagagaagctagagaacgttaaggagggactggatgacggcttgaaggtgcagggttggtaaagattgtacgcttcggctcgacgacggctcttctcgaatgaaggctggctgtcgaaaatgtcgacagatctctcgcgcttgctctccatcttccctccacaaggcgtttaaaagctggccgtatgtacacgtccattcctgtgaatttctgtccttctactttcacgagtaaattgaccgttctttgttgtggattatctgtccagattgaccatcagacactcgaaggatcgatgccgaaccgctttgatgattcgacggcgaaatcctccgtaaattgatctaagattttggtgtctgggaggattgtttcctcgtagccgttataggcatcaaaaaaaagaaatctttctgaatcaagaaacgtcttcgtgtactcgtagactgtctatatgttgatgtgcatgtatcaatgaatctattattcatcatatggtcgagcgaggagacaagaagttgatcgacatatgcgcatacaaccaagaaggtagcaagcaagcctgtacactatactgtctattggaatattttgtattgttttttgaaggtttttgtagttctctcgtagtcgtgggtcagaaaatcgatcggttccttattctccctgtccacaaaacccgcccccatcgtgtcgtttgttctgccaccatctccatctttcatcgttctccttgcttcatcacccaggccaatcgagaggttgttagcaacatgtcccacactgtagaggttcgtttcttgtctctggccggcttttcactatcagaaaagttccatctcgttcggcccctttgaacaacacaagaaagctcatgcttcgacgccttcatctctgtgttcccgtctcctttcctaactatcctttctgttcctttcttgatactggaaataatcaaacacacacactctctcgtgttactcgtcaatcgaatgttcacgcaaagcagtcttccggaattaacgatgatgatctcaccccttcgaccacggctggctacaaactcggtcaggaacggtcgcttgccgaacttgcagccctcgaccaagaggacgaatcgctacaaaagtggaaggcttctcttgggctaaacaccggagctgtaggacaggccggacccaaaagagtaagattttcacagttcaatatctgctctatccttcctcttgtccttcacttgagctttcaggagatgtagatgttggcttctggttcatcgtcactgttgggctgatcgtcggaatctttcatttgctcttcctccggctaactaggttatgtaaggtctttcatctcgctcttttctgcaaccgtataatcatgtaaatttctcacccacttcaaatatgtcctgcgtattgcgctgttctgcccataaatatcgattcaacggacaatgaattgacagcccaaaaaagctctacctcttatccccttcgctcaaagtgcctcttactctggacctaacccagtctccggatgagatcgccaaactcaaaaagaaccctagtaagttcttccaggaattccgaatgagcgcatacacctttgcactctggaaagccgctacatcgcttgcgaactctcatgtaaatacccttttgcttttgacacttggccacctatcgcacattaaacagtcaacatcaaggaaggaattgaatactccgttggaattgagttcacgttcgtgttctctttttcaaaaaacaataatacttggactaagttttctttactagatggctaaatatggtgtttgtcttgcgcgcatgtccgaccgtttgatttctcatgatgcagcgtggaaaaccagatcgtctcaggattgaagtatttgcagttggtcaagagatctgggtcagtacactgtttgttcataacattccaacaaaactgcataaacctgcttccaccgtcgaacccattgctgatctgttttcttcaatcggacgcaaacactcctttccgcaattcttttcactttacagaatcaaagtcgacaagacggaaaaaatgattggttcacatggacctcaggcggaaccttacagccgaattgtaagtcatcattctctttgtcttgcagaatttcgtaccattgttgaccatggataaattcctcccgctctcgttatcccttgcaaatgaaagatcgccgaagaagagtcgccttcgggaatgttggctcggtcgggcacgtataacgttcgatctcgaattgtcgatgacgatggtgtagtctatggtcagtcttctccagtcgcgaaagttcactcacttcatcccgaacggcattgttctgaacttcggacgttcgtgactacggtcgtgtaccacatataatattgtacgctcaacagttgatttcgagtgggcattcaagttgacgacatcctggtgatcatcgactttacaaatcatgtaacttcccgtctattccgtatggtttcgacatgatctttttctttcctcttctttctctgtacggacgctctcaattttctgttcgtttgatacgaattcatatttgtgtccttctctcttcttctcttttacccttttattatcaccacgtttctttgtctctttctatgcatatcttcaactcaacgctaccatccagcttggattttcacccactctacttgacatgtcgatctcacttattgtgccctcatgaaagatgaattcaaaccagccaagaacattcaactgaacatgaaaatcatgagattggtccaagaaggattaggagaggaaggaaaggaaagaaggaaaagctgactaaaagccatgcgaatgggagattaggtcgtctcgtagatacataaggcgtggaaatgtatataggaagaagtatgaggtgggaaaggaaagaaaaagattgatcgtgtgggtccgtgtatattctatgggttctcagactgtaatagagaagaacatcaagagaaataacgtttccttttccagacaggtaaaggggaaagagaagacagggtaaagagaggaaggggagcgaagaagaaggacgggggtgtttgttcgttcatctatctataattctcagactttaagaacatcttctcctggcgatagaagaggagcgctacaatcgaatgatgataaaaaaaaaagcaaacaacgtcagactagagaagacgatgttttatcacgagaggaaaagagtcaaagatagaaaagaaaaggaaaagacataccccatacccgttcggacaagatctctggtttggtggcaaatcgatagatggacaatagaaacatataagaaacatgaagaagctgtgggacagacaagctggaggaaaaggtaacggactctttagtagcgaatatttcgctcaaaacgaatgcggcgaaactcgagtccgtccaataatcacctgcataccagaaaatcagaccagaccggacaagaagtaagaagtttagaaacatattcaagtcgatgaaaacatgaagagaaacggaccatgtgcggtcaagagatcatagtattcgctgacaattcccgtactctgcaggcagaaactgacgttgcgcaaaaaaaaattcggaagacgctcagtcagagtgatatggataggaagaaacgataaaaacctgacttactcgatgttaccatgtgggttgagcgcactgaatcgacgttcggctcgagtacctttgagtcgctcgaaccctacccctcctgtcaactgaggtagtcatgacgacaaaatcaagatcagattgtcgatccgtccaagtatgagcaaagaaaagatgtggaaaaagcaagaagagtagaagcagaccggacatacttctacaccgctaggtaatctgatagtctctgggcgtttgagttgagatgagcctgaacctccaaaaggctgaaatcatttccaaacaaattacccgacaaacatatatgtaaggcccagtatttcgataccggaataagaggcaaagctcaagaagactcacattaggaagtccattgaagatctgtgagagagaccccataccccgacccatggaatccgagaaagtacttaacaaaccagccgtcacattggagatcaagagtggctccatggtgcgtgccttcttggcgtcgacgcatgcattgagcatgtacgcacttgattattgggaaagcataatcacataataaacattaatgtcctgtctgatttcaaactaagaggccagaatgaacaaaaacaaatgtttgacttacattgggtccctgaagaggaatacaaatgaattgagaaagataagcaaatctgattcacaaaaggacgaggaaaggcaagacggaaatcaacaactcacgatggatgaaacacattgtacaaacttgagacagccatgcatcccattcgacctgctctgtcaagtgcttcgtccggaggagaatgcttcgttcggtcccggccctgattaatttgcggggttcgtgtaaaacaaggtcagcaatcactctggcaacaattcgaaggcggatgaagacgaacagctcgaggaatgagctgggcggagtggagatgaatgaacagccctaatggagatccgacgaggaacaaagcctgagtgttgaagataaaacggtctttggatccgtatatcacctggaatgtttacaatacaaattcgagaaggtgcacagtatcaacatcatcttgcatcagggatctatgagggaagaacgtagagaactgacctgtttgggcaaagttgaaagagacggtaggttggttgcttgggccgaaagtacttctgcaaccaaagcggatcctaaagaatgccctataacatgctattcatttgatacattcaaacggaaaagaaagaatcaatagatattgaacaactatcaatctgtgcgttaagaatgaaagaaaaagacacaccactcttcctttcgtctcgaatccaggatgtcgtttacaccaaagcctatacgtcttgttacattgtgtcgcaacctgtatacccacaaatcgagaaagatagtaagctcccaccgtgagcgaccttttttgagtctacaatcagtccgatgatggctcatcttttttttttcacttacggcttcaatcatgcgttccttgtgatggctcatgaagtatggtatatcgatcaagacgttgtttgtaacttctctcacccatgagatgtttttactcagggtgatgtcatccaaagtgaatctgtcgttcagtcggtttacgaagattagatcagtgttttcgaaagaagagaatgatgacagcgataaggaacatacttgttatctaattcgtgatctaaatcttcttgtgcttcagcatcattttgtgcaaactaagcagataggggatcagagagggggtggtgagacagagcttgaatgagttctcaaaagcaatgagaccttcagaccatctcagagacatacctttagactcgcccgccactgaattggtagaaactgcacttggcgatcccgcataatactcttgagcgcagcgccagtagcctgtttctgagcttcttttctaaggagattcgtgcactgaacatgacccaagtcgacattcgtacgaatcgcgagtaaagatagatgtcagtcattgaaattgctagagttgtgatcgttgatggagttcgacgcacatagacaaaactaaacccttcatgcgtgagtgccaactctgagtatgccgaatcgggaacaaagaaactattgtgtcagttgtaaacctcatcaggtgatagatcggaagaaacgacacatacgttggccaattccatgtacaactagaatcaaatccgtcacttcgccagctgggggctctccaggctccccattcggcttgtagaaaatatccaagaaagaacacggtcagtacagtttctggctcattttgacattcacagatgcgtcgtcccgtccatttaagctcatcaaaggtctcaccatcatggtaggtttttctactccttcaacaaacgaaccgttcggtccctcatcgacctccgtcagctttttcgcgagcccctctacacctctttgtaagtcatctac

SEQ ID NO: 588 - DNA, 67598 bp, Xanthophyllomyces dendrorhous
ctcttgtgatatccaaacttgttctagcgctcttgtgacctccgcctcctccgtttccgttcatgatagaaggcgcaacggatgatcgactggatgatctagagtgggattctttcttctcactcgaaggtggatgggcagcggtgacggcagattggaagccccggtacactgaaaaacaagcatcatcaagatgattcagttaagggaggcgtaacaggagcacgagatggagacgatggggaaggagagaagaccgacctagtgttccaccagtgttagagctactcgatgaacgtaaagcgttccatattgtgaccgaaagtctagcggtgatactttctctgttattgtcccatcccggtgtgtgccgattgatgagacagaaagcccatgagaagaggaaacatcttagtactagattcagagaacaaatgagacaataaaagttatgctgacgagatgatcctggctacgccctcatcctgatagaccacaaaggagccacctgcatcctcttttgattgtttcagtccgtatcgaagttttgcctcggcctctttaccgttcagcaaggccgcttgtagttcctctccatatgaggactttaaggaagtaggaaggatgtgcagtcagaacgtcgcgcgtgatgaacggttgagttcagatgatttgatgagctgcagacttacgacccacggtttgatctgactttaagcgcgcgagcatcaccgataaaatgatggaagaaaagaaaaaagtggacgagagggccaaggggaataaggaagaaaagaaagtcacattcaaaataacaagtcgagagaatgatgttgttaaaaagaagacgaactgaaacccttcttccaattcgtcacatagcagctccgaacacggcttgtcttccgagaagaaccatcttgctctgcggaccggtatattcggtcctcgatgatgccagctaacagtaccagaagttttcgaatgagtttacacgatgacacatgccgatcaaagcgtagaaagaaaaagggcgtactatacagggtatagtttcatttccttgacgtctacctcgaataacccgtcctgtttgaacaaagtcaacggtattgagctcagatggctgatagtccaacgctttcttcatcgactacgccagaaagtgaaaaagatagaacacaaacctttgcaacagggacaccgacgaattcttcttccttctccatttcctcggcagtgtccgctcgcgtattctctagctcaagttgcaacctcttatcctccgcctcgtcggcttcttctacctcttcttcctcaatcttaaccgacctgcctgcgtgtctctctcttgcttgatctttctccttcttcttcttcgcatccttgtcctttttctgctgcttcttcaagatttcgtctaatgacggattctttgtcctcgtcgcgaattgttcttcgggtgtgaggccttgccagcgggcctccatctgatcagactcagaagatgtgaaggctgcatagatctgtgcgggtgcagatatcgggcttccctatgattgagtcgatggatgtcattaaaagacagaggaaggaatgaaaatgcgtccgcaaggtgtgtaagttcggacgcgtcgacaagtggacgaaaagaggagaaaattggaagagaaaggaagacaagacacctaccaacagattgaggaacggtgtgccgaggtgaacccaacggacatccagaggcggggcctcctctatagacgcggacatgagtgcttgagcttgtgcttgtatgtatgtgtgtcgaacggtgttagaggatgtggatatgagtagaatgagtaacacgtatcttgcgtgagtaggaatttggattagccgggttgaagtgacgtcaacagtgtgagctaccaacatctgatagttccatatgctgtttactcttgccttctttcttcgcttgactgcttgttgcagattcattcatgatgttcatcaatcgtttcgtcctctacgagcatattctagacattccctttcgagtcctcccacccggtaaacctccacaccagcctcggacaaaaggcgactccccgcacaatccacaaagtccggtggctcctccacaccctattacccggaaaaaggttgaatagaaagaaacaatggcagaatgcaagaaggatgtcaagactctatccattcgatcaaccagataaattgggaataagctcacgagaaaaactctgttgacctggtactttgccagaagcctcgcacaatcaggctgaccactcgtcctaaccgagcagggttccagtgtggtataacaatccgctttcttaagaaggtcttcgacagaccatgtctcgctgccctcccaccgttctccttcttgcttgttcaacagctgacaaagttcgtcctctgagagcgccaaaagtttgaacacagccgacgactcggcgtgtgacgtcggacgaggaggttctctagaataaccggtcgagaggacgaggcctgggcccgagcattccttgccaggaggagaaggtaggacgagaatggagcctacgcagaacgcagttggcgaaacttcacacttgagcgacaattctaggcatgttcggagatgatcgaggtgaactctgtctgatggaaacgtctcatcgaatcataatcagacgtttgtaccaaacaagaccaaaaaaacagctacaccattcacaagtcaacaaacacagatagacaacaagaacaaaccactagtgacaaagctctttgaagaagacccggctggactgatagccaaagacatggttgcagagcactcccaaagatgttgcaggcaaactgagtcctactccgaaatctactgcggatttccaccgtggcaatcttccttctactagccggcccatctccatcatgttggccatcaaccatcatcccgtccgatcgcatctgcgttgaatgaatattaacctgcccacacagatagcaagcatggcccaatcttctaacactcaccagcccaaggagggggacgagcagtctttcagcgtatgtttcgtctcttcagtcttcctttggcctttcggcctgggtgatttcgtcgtatgacatcagccgattctctttccttttgctcgccacctaatccttgatctttctttcctcttcttccttttttttttttctcttctgctctgtatgcaatgctctgtgatgacagatccttcctcaccctgctgtgagctcttttgactagtttcatttgttggactgtgtccatctcgcttctttgtgactgatcctcttcttttatttctctcgccactcagacaaccaacgatccttccactgatccagcccttcagtctggcaaccaaggtgccatccacggaggtcgggagccttacgtccccagcaagagtctggctgacagcttggagaccccaaagagtcgggaggaggttcgtcattttctttcaatctttcataatgaccatgtggtcgtcttgtcatcttttgtcttctgtcatctcggagggagtcagcctgactgactgaacgattgattgaacgaacggaatgtgaaccctcttcgcgcgccgtatctcttttcatctttcatctcctaaagctgcaagcagcctccgctgcgttgaacaacaaagagtaattgggatcacctggcgattttctagagattgctctcctgccgctttctgcgcgctgctaccttccatttcttccttccatcaagttctgtatccatctttacctgtttcatctacttctctgtagcgttcttgttctgtttctctctctcctttcatgatgtttgagaagttttttctgttatctcatgtcaatttcttgtgaaacagtgggagttgacaaatagacgtatccctttgctgacggttagagagaataaatatttatgaacaaaacagcaggatcatcgaggagtccaggcaagaaagaaagagaaaaaaataacacagaaaacgtttctaatcaaaacgggcggaggttttctttagagagggattccagcaaactcatcgtaaccaagcgcaaggttcaagttctgctcagcgaacaagcgaaagaaagacaaggtcagtcagataacctagactgtagaagaaaaaaaaatcaagaagaaagcgctggaacggacctgaaggcactgagtagcggctcctttgagcaagttatcaagcgcaccctacaagccaccgtgaaaagcaacccgatcagcatggtatctcgacaagaagaaaacaaaaaattggcaaaaagacagaaacagaaagaaagaggaagcaaggggacgaacgacgacgacgactctcctaccggaactgtgaacttgcaacccacccatcacccaaccatgggtaccctccacgttcctcacgtcgaccacaccctccgtcggcgccaacagcttgatcatcttctcatctccgtaagctttctcgtacaactctttgatctccgaggccctcatctctttggagagcgaggccgaacagacagagatgatcccggcgtaccacgaaccgacagagggaatgaaggagagctcaaaagtgctgggcgacaaggtggataggtggtgggatgcttctcgctcgtgaatgtgatcagtcagagagtaaggcttgatggcagatcgaagggtagcagggtcctagggaacgtaccgagacagcgcaagacaaaatcctccaagctggtaagcaaccgatcaagaagagtaagagcttcagggagatcactcacaatcttggacacggtagtaggagttccatcctcagcaggctctccagtcttcgttccggctccactgtacccagaggaagcaaagatcgtgggtggcttatcatagttcaagtagggcaagagagggccgagcaagagctgggaggatgtggcgaaacatccggggttggcaattcgtttggccgatcggagggcttctctggagtagagctctgtgtgtattcaccatgttcgttttgtgtcgttttcgttcgttcgttcgtaaacgtgaaagaaagcacaaaagaaaagggaataaatcaacaacacttagtttacgaatacacacaaatgcctcagataacatgaaggaattgtgaaggaaagaaagaaatctcgaagagtttgtaggacggtcacgagtggggtaaaatcaaaggcatcgatatacccagaactcttgaactaacgacctccttcaaacaatcaagatgtgagaggaacaagaagaagaaaaagaaagatgggaagatggagggaaggaaatcaagaaacaaaggaggacgattctcagagcaaagtgttcaaggatttaccaggcaaaccgtaggtccagtccttctcgaaacggtagtctgctccaagatcgatgatgattccctttcctcccttctccttagcaccctcgatggcgtcgacaaaaggcttgcagactccattgggcaaggccatgacccaggcgtcgacctcaccagcctcttccatcctggcaatctcctttggggacaagttcgagtaagtcatctcggacttggagtaaccctcgagaggtcgaccctcgagctgtcggctcgacacgtgagacaggatcatgttcgggtgctggtcaatgagggaaacaaggttctttcctgtccagcctcgggcgccgatgatggcaaccttcttgggcgcggtagtggtagcgggggatgaagcggtggcgtaaccccttcgcaagctgggctgagtggagtacgatcggttcaatcggtgaggaggggtcgatggtccgacgggtaggtacgtcctggagattcggttcttgccttcaaactgggcaatcgccttctcgacctccttgatgtcgtggattccgtaccagaacaagctcttgccagcccgagtgaaggaaccgtcggcacgctcgaagtgccaggcccggttctcatcatctgtcttggcagtccagaagagctttcggtggtcctttttgatggtgtcaaagacgttgtcgacaacgctgttgagcacaccgttccgggtggcgaggaacttagtcatcactgggacctcaccctccggatgggagaccacagcgaccacgtcgaatgtctcatctccgtaaacagtgtagggagtgtccttcaactgggagaactcttgagcgacagaggttcgaccggaaagaacttcagggtccaactgagcaaatacatttcggagcttatcagtaccgacagtctcaatcgaggaagacttgtaaagcttgtatcctcttcgaatcatggttccagctccagagtcggtaaagagctccttctgaatgttgtcggccgagatgatagcgacggaggaagatcgaggaaggtaatcgaggaggtccttgatctctcgaagcttgagcttggtgccgtatcgaacccaagactccttcatcaaagcgtcgtactcctgataaacgtcgtagatttaaagatcgcaaataggaaggcagagtcaatgtgactattcaaatagatctgagacatcgagcgagcttgtagctgtaggaaaatgattttacctcgtccaggttgataacactgattttgtcaccggtgactccgtggaagagtccacccttctcgttaatataaagaaccttcatgggctccaagatcttggcgagttctccggctgcgacgtcggcgttgacgttcaagagctgaccatcttcggtctcagctagagaggtcaagatgggaagcgctccggctcggatggaagcttcgatgggggtcttgtcgaccttggtaatctttccaacgaagtggtatttctccttgtcgaggtactcagcggtgaagacaccggtgggaataggtcgggctcgggtgccgagctcctcaagagcgttgacgagcttgaggttttcctcgaggaaaactcgctggaacgggtcacgagacgcgacgtatgagtgtgagcataggtaaaaatgcgaccggtggaaaggatgatcaggtagagaattcttactcgggcgatctgaagggttttggcatctgttaatgtgatagaatgaggatgagacgagatggaagagatggagatgaaaagtaatggtcagatcatccgcaaagatggacacgggtctaaaatccatagataagcgacataccggtgatacggataccatcaatgtagtcgggcacgactccctcggcctccaagatctcgttgctattcagagaccgaagagaaggatgaataagtggaaggaaatcggatagcgtgaagatagatggatgtatgctcacagctgaggtccagctccgtgaagaacgatagggtaaagaccgagtcggttcaaaaaggatagagataaggcgagatcctgaagctcgttcgtcaagatggctcctccgattctgttgaaagagaggttgtattgtttcgttagaatcaacacaggctttcaaactctctcgatacagaacctctagaaatttcgcgcgatacagaacctctcgaaatctcgcgccagaaacagaagacgcactttagaacagcaaacttagcctggggtaagacaccctgggagctgccagaaggagaggacgagttggtgaagatcctaagatatctctcgacctcatttcgtgatcctaacgagtgaagaagtcggacgatggtatccctgtccatttgaccgacctccctagcgccagaaatgcctcgctttcgcatctcggatcccacctgggagacagagagattgaaagcgatataggcgctgttggtcgaagacgagggcaaccgatgctgctggagctgcttcggcacaccggccgaggcgagagtagacagcctgtaagctgaggttggagccgaggcagctgccttggtgacaagacgcctagccgtaagggatggaaggatagacataagtaagagtatgatgggtgatggtgaaagaaaagaaagaaggatgggcaaaaaaaaggtaaaggttgctatgggcgcaatctccattcgaaatctttagcctcttagtctttcttacccgcggcgagtcatgtttcccaatcagctcctttattttttatcatcttcagcatcacctccatctttggttctttttgttcttgttccagtcttaaggagactgtttcttcgttcttgtcttttgaatgtgttgcttatcgaccgagtgtagtatctgctgctatcgttatattgtgaggccggtccatcggccgggcgctcgtgaatcgctctttcaggtgtcgcccggtgtttttttcatcgctcatgctctttgaaaaacatgttctttcatcttgcttgacgacgatacttggaatattgttcaagacacgatggaagaaaagatggatatactacaaattaactttccttacgtaagaaggcgcacacacaaacacatatactctaagccggctcttctaacggctgtaagctacctcctgcttcaacaccaacactagtcacatcagcttgaggaacttccactgtgccagcgctagcgctggcagtggcgatagcagcgacttctgccgccgctgccgctgcttctgccttttctctctctgccttctcggcagcagctcgttctgctttctctgccttttctgcggcgatagtggatgctacccgagcggcattcacagcagcaacccgattggcatgttgagacaacacattcgttcgtcgggtcgcctgagattgggcttgtcgaatttcatcagacgcaagtccaggaacctgtaaaagatgaggatacgatgaatggaagacttggttattcactgcatctcccttcgagggagagaaggaagtgtgaaaagtcgataaaatcttactcggatgttgtgatgcatttctgttgaggaaacaaacagctgtcagaattactacaaactcacaatgataaaagaacaagaactatgggtagataggcataccaaaatgaagctgaagatccttgacttccagtacattgctctttcgatgtttggccagtcgagcagcgaaatgagtggccgaatcgataagctcatctaccatctctagtatcaactgcagaatacagcacagagggagaatgcgaagaaataatgccagtgtcagagcgccgtttgacagaggagacgttgaaaaaacaaaaggaaaagaatctactgacatcctcaacctcgtcctccagcttttctcccttttccacgctctctaccacctctcttaactttcgttttctgccctcctttgtccaatcgcctgctccgttgccagcaacctcatcctttttcggaccacccatcccgcctgctcggctcgcctcatcccagcctgaaccagaccgagcaaccaggctcggtgtaccaagactaggtccagccgccagaccggtcgacaacgttggtcgagcgccatgtggatttggatgaggcgaagcagtcgtcttgtatgtaggaagtgtgttcgaatgggtacccattgacggtcgcgttataggaattggttcgtttcctaccgcaggtgttgacccattcgaggcgttcccaacttggccttggccttgctgctgatgttgttgctgttgtgactgttgttgttgttgctgcgacggtggaggttgggatgattggtgttgactctgagactgttgctgttgctgttgttgctgcatatgaggtggaagggacggtgttccctgtcgaggaagacctccaccattgagaggcggtcggacctgttggttctgaattggtcgtccagccattcccggaccaccagtcgtggtaggttgaagtcctgggtttcgagcacggccaggaggtaactgcaagttaggtaaagccgggctgttgatcccttgaaccatagatggcccagaggttggagttccagctcctgccccagtattgctgccagtggctgtattgttgttgacgttattcgcggtaggagaattggtgttaccggcggatgaacctgcagcattcgtcaacgttcctcgagctagttgggcagtatagtgattccacaaactgagcagcttcggggtcttgagaagataaatccaattaagcgaaatagacgagaggagaaagaaaagggttaatgtcaaccttattctagaccaagatcatgggtgggaatcaaaatacaagacaaagagaaagaacgaacagtcgtgaacgtcttttgcctctgttcttctgacatcccctgcaaacttctgaacaatgcgagagcagccatttgttggctgtttgaatttgtcgccggcgtcgtaccagccggcgctaccggagtgggcgttcccgactggactggtcttacaggagcgggcgagggtgaagcagtcgacgctgcgtattgtgaggtctgcggagtggacgtggcggaaggaagtgtggaggcggcagcattcggagtagaggtcgaggtcgaggcagccggttgggcaggtgaagcgcgttggcttgagagctgagcttgcatctgtggagcatacgccatcaacgctcgaaacttgaggatggttcgaaatatgatacaaagcaatgaaaagatgagaaaacaccatagagcaaagaaaagacattggttaaacatcgaagcaaggagtaaatattcaagatgcgaaatgaacaaacctgttccatctgagcagggtttagttgacccttccttgcgagattcaagagttgaccaatattaacattcgccagacctggaggaagggttaagccacctgtcgctgcagctgatccggtacctgtgctcgctcccgcaggtgtgtttgcctttggtgttccattgggattctaatctcattcgaaatgataaaattgagataacacaaagaaggaagttccaaatccaactctttagtcaacagctttccccgtctgcaagacacgatcgagtacagaattccgaaaaagagggaagcccgattaacacacctggccttgaagtcggagttgctgctgctgctgagcagctatgatcctcaaagcttgggcttgctgttgttgctggttggtaatattactggacatatcctcgtcttgacggatggattgggcaacgtcggacaggcgcgaaagatctggatgttcttcgaacagcaagttctaaacctttggacgacagtcaagtgagatcgtgaaactatcagtcaatttcaaaagacattaacgaccttctagtccatcctgactcgtcaagagaagtcacccatccgcccttgattcgacgttgtattcagtgtcgataaaaagacagtccagcaagggtttctgggtacaaacagcttgtcatccagaaacattcgaccttcgtgctttttactcaagaatcgtcatggaggcgcgtctcgcgagaagccggttgcatagatacttacaaagagccaagagatccagtggatgtatgtatttgagcgagcgtgtgctgaagatgatagtgcaaacgattcagatgaaatggaggcaacggtcgaagttgtcgaatactcgatagattcggtaactggtcccgaatggcaccccatatatgcccaatgcttgggaccaaatgtcgctccagtcttcggccacttgtgacactgggtttctttcaagaataaatgatatacagacagaaacaaggacgggaaaagacatgtgtataatcgtgatataggtatgtttatgaacgtcctcccattcctccgccagcgctgacggtgcccgtgaaatgagcatccgcatcctgccagaccttcataaggacatatgcttcggaaagaagtactctgacctcaacgtccgtccaattttgcgtaggtagcgattggaggtacatgatgatctcctgtatgaagaatattttcgtaagaattcagacagtgagcgtctcttactgggagaacagaagggattcttatggatatgtgtaattaagcttttaatttagggaacttgcctggaaatccttcttcatgagttcttggctccaattgacaaggaaagccgagcagacatacaaatgaaactgagagaacgcttctgctccttcagcctgaacaaagaaacgaaagacatgaaagtcaggcgaaacatgaagacgatgatgcacaacattaaaggttgatcgggacgtactagataagtatcccacatcctgattgtagcctgcatactgatctccctcatgagcagacaattcatccatcggaacgcaaactgcatgaattctacgccttgttcttccatatgagatgccagtggagctattatcgatgataagaaacaatcaataaacagccatgataggaaagaaaggaaagacaaaaaggtgaacaactcacggtctatcctgccaaccaattctgccatctttcgaacagaccgatgaatacccggttgggcaaatatatagttatcctgaataccatccagtagtttactcagacaccaaaacgaatctgcctcaatcgctgacaaaatatgaggcggcagctgagcaatatcaaacgtctcgggatcggtttctgcagattgaatccataccgacgaattgacaaacgcaatacaacttctaatcagcctttgaatgtgtttgcgcgatcccacgaccacatctgacagtaaagagcgagcaaacctatgtatgcggaaaggaagatttgaaagaatggaatgacaagatcgttgatcccttgaacgtaaccagatgctggatgccggatagcccagacgtaaagtatgcgctcgagagactgtgtagaacgtaaaagccaattggtgttctgtatcaacacaaaagggcaagttcagagacgaaaaagacacacgaaccctcattgcaggctccattgaccatagtgggacgccaggtcgtgttctcggaacgtcaatcacaatctgatgccatatctattgtatatgacccacaatgaaacaaacaggaacgtcatgagaccgcgcgtgcacgtctcgttgttagtatgcaatgtccgaggaaacgcacctgttgatctagcgactttgttccattcttgaaagccaacctagataactcctgatactcgtttcgttttcttgaaagcgttgtcatccgaggcgctgtcggcagaggtaaatagcccttttttttacaaaaacacctgcttcaatatctctgatggttggacatgttgattgacgaggccttttcttatgcatgaactcacgagtaacatctgccaaactattggtcgaagctcgttaggtactccgttccaagccaatgacttcaactctcccgaatcaacgccgagaccattcaacaacagcttctccagcttttctctagtccgtctagttcgaagtgattgaacccggccgagtcgattaccgcctggagaacagatcaatgagggagatcctatctgttcgggtgtttgaaagtttgaagcttctttcgctttgcgaagcgtatgtaccggatctgtgttttccatcgacacataagtttcgtcattcccggaaggaaacaagggagaacaaacgatcagtcgactccttttattcgcatagtgatcgatctcagagttttagacaaagaaacgaccgaccagccagaatatgttcaatatcagccttcatgaccccacccttcggctctgctggtgcttcctcctcatcgtcaccgatatcttcaccatcgccacctgtgattcccaagccaatcgatggatctgaaactagaacttcatatgccgcaccggaaggttctctcttatgatcgtctttcttcgaagtcagccttacagaatcactgatgacgtcttcatcctctccgcctgattttaacctatggggtaaggacagagaagttgcagatgacgaagcggctctccttcctactcctcccagactagacagaaaagacgagggtgttcgactcggtccggcaggtcgagagccaagtgaaagtgaggaaactgtgttggtaagttgcgcttgagcttcggtctgagcatgtggcttcgtgtgtgatcctccggtaaaggacgatggcgtcggtgtcgggtattgtttcgtctttgacgtggacgatgttgatccgagcgtagatccagatccggatccggaggcagatgcagaggttgaaggtttagatacataagctgtctttgggacgactggatcctcgctatccgaagcagaatcccaagcgtcgtcttgatcccatctttgttgtcctactttcgagttgtttgacgaatttgactgatgggatggatagattcgactcatttctcttctcctctgataagaaagataaaccaagcgagagacgggaagaggtaggagcagagagcggagtggggcggaggttcaggcttgaggttgaggttgtgctttgatagagatgggtctatatcaacactggggaaagcgaatataccggacctctttttcttttgtgttacgcgttttccaagagtttgtctctaagcaggatgagttcaaggacgagacctgtcggatatgagagctgtgtgaagaaaagatgcctcttcaaaagcgtgcgactcaaactaagcgggagcgagcgggcgggcaagtaaatcggttgaaagagcgatgggccaaaggagggaaatgaaatctcatcccatcacggtgtgaatgcttcgttgtttcgggtgtttgttcgatcgaaacgtcgtcatatttaccaacatcccttctccttactctttctttttccccatctgctctttcttgtgtatgactttgatctcatagtcattagacgatgttgattccattctgcattctggcagatgcctgccgaacaaagacaaacacaaacattgatcgtatacacagaaggaagaaaaacaatccaacaagacttatagcaaaacaaatctgtaatctgaacctcttctccttcctcgcgcaacatcttccgacctctaacaatcttcttgtttttcttccttttgctactctatttcaacgcagtgaacatctccatcgatcgggtgagtgtctcaatctcggcatcaagcagtttcaactagacaaggatcaagtcgaagtgagcatagcgtcagtaaaaagcataacaactcataaaaagaagatagaaaacgaaacttaccttatcggcgttgttggcgaggacctcggcagggatgttaggcttctggctcaaagcgaccgtcttctcctgagaagtcttagcgatctcaatcttcttctgaagcttctgaacctcggcatcaaggtcgaccttaccctgtaaccgatcggagcagcatcggatgcaaaacaattctctaggcgtcagagctgattcaactgttggataaaagtgaaaggaaaggtgtgcgacttacccgaaccatcaagtgaacggtgacctcagcgttgaccaattcggaggcacaaccttccggaagttcctcgaccttgctgatcacctcagccgacttgcatcccttggtgagactggaaagaacagtgatttggctctggaacatctcgttcaatctaggctctgatacctggacaaagactgtttacccatgaacattttggaaatatataaagcatcagaaggatagttggcaaaattttgataacctgaaagaatcatgattcaggataacgtaccctgaagaccggactggatgttgtaagtggaagcgagagaccgagcggcctttgtacatgagaacaccaaatcaaagtccgcctcggcctgaggatcagcagcgtcagctgactcctcagggaactgggccaaagaaaccgacaccgtcttgtctgcaggtcgtcgaggtaatcgctgccagagctcttcagtcacgtagggcatgaaagggtgcaaaagtcggagaccctcgtcgagacaggtgtacaaagtctgctgagcagatgctcgaacctcaggcgaagccttttcgtcggtcattgacttggaagcctcctaaagtaggcaagccgagagacaaagagacgagatgatgaacaaacaaacaaatagatacaagaaaaggcagatgaaagataaagaagacgaacaatgtagacatcacagaactcgtataaccagaagttatgaatagccgtggtggcggacatgaagcttcggtcggtgaagtgcttgttgacatcggccgaagcgatgttaagcttgtggaggatccatcgctcaactacgctctccttgccggatcgctataagacaaaaagcctgtcgattgagctctgaatgatcgagaatatcattgcaagaaaaagctattaaaaagatatcagagaaacaaaccttggaagtggatgcagggacgaaaccagcatcaagcttaagcatggcgaaccggatagcattccaaagcttgttgcagaactttcggtaaccctcgactcgaaggatgtccaagttaatgtctcgtccgacaccagagtatgcgcacaaagcgaacctgagtgcatccgttccgcactgaggaatacccttgggatagtcctttgcctgaccggcctttgccttggcaatctccttgtcgtccaagtttccggccagaagctgcttgtgaaggtcttcaagtgcgcaaccctgcatgacatccaaaggatcgatcacgttacccaacgactttgacatctttcgaccgtgagcatctctgatcatggcgtgaaggaaaacctctttgaacggcatctggtcggtaagctggataccaaagaacaccattcgggcaacccagaagaagatgatgtcccatccggtttcgagaagagtggccgggtagaagtttttcaggtcatccgtcttctcgggccaacccataatggcaaagggccagagtccagaagagaaccaggtgtcaagaacgtcgtcatcctgagcaagggtgtactttcggccgttggcgagcttatcggctcgggcagtggcctcctcaatcgttcgtccgacaacccaatgctgggtgttcgcagcgtcggtggtctgtccttcgatatgaaccaaataagctgggcatcggtgtccccaccagagctgtcgagagatacaccaatcctgcatgttctccatccatcggtaccagtcggcctcgtttgacttggggttgactaccatctctcctgctcgagtcctcttgatggactctgcagcaagaggctggcagttgacccaccactgaggcttcatgatggcctcaatcaagtcaccagatttactgcaaacagggatggacattgggttgtcctttgtctcgatgtagaagccctgctctttgagggcatcgatgacggcaaccctggcgtggaagcgcttcataccgttgaacttttcaccagcgttagcgttgagagttccatcatcgttgaggatgttgatgaactcgaggttatgtcgctttccacactcgtaatcgttgtggtcgtgggcgggggtgatcttcacggctccagttccgaaagccatgtcgacggtgatcgcgtcggtgacgatggggatctttcggttggcgacaaacggatgaatagcgaactttccgtggaggtgctaaaagtgatatgatgtcgacgaaaacatgaagagggatcaacaagattgagcgcaacaagagatcaagtataaaagaagaggatacgaacagtgtatcggggatcatcagggtgtacggcgatagcggtatctcccaacatggtctccggtcgagtggtagcgacgatgattctctcgtctgatgcgagcgaaccgggtgtgcaatcaagagacgtgtaaacacagttaagaacgcgtttctccaatgtccattttcaaagtcttcagaaactcagccagatcgaacttaccggatccttcaatgacgtaggcgaacgaggtgattgctccgaactcgaacttttccttaggatcgtatccagggacggaaagcatagttcgtccggttaaagtcttttgatcgacctatgtaaaataaatggacagatcgtgatcagaggtggacaagagggctactaggagactgatagatgagagggaagagaagcttcggcttacctccaagttggacagggtagtgttcaatcgaacacaccagttgaccaatcggttctctctgtaaatcagtccatcttcgaagaacttgcagaaagcctcattgacagccttgctgtgggtctgtaggatcgaaagagagcgcacacaaagcgggtaagtgatgattgttcgtcgcgacaagatcatcggaaggaaacgtacgtcgctaagagtaaaggcgactcgctcccactcaaaggaagctccgagtcttctgagttggttcgaaatcttaatttggtaccttggagaggttggaaggggagagccattgattcaatgaaaattctggttgagacacagctgatacaaggaagaatttttggactcactcgtccttccaagtccaaactttttccaagaatttctcccgaccaaggtcgtgcttggtcaacttttcatccttccacaatcgcttctcgaccacagactgggtggagattccagcatgatcatatccaggagcatatagcacggtgagacccttcattcggttccatcggacgagcgtgtcctgaatggaaacggtgagagcgtgtccgatgtggagcgcgccagtgacgttgggcggggggaaaggaacgacgaaggttccttttggcgagactgagccatcggcttccatcttgggcttgaacatgccttccttctcccaccagtcataccaagcagcctcgacggccgtcgggttgtaaccggttgacatcggaatggtcatgtctgaggacagccgacagatagaatttggttgattgaatagaggatgtagagaagaggtgagaatgacggaagacaaaggacgagaagactatgtgtaggacaaacctttcttttcacccttgggagtggtgttgacgaaaggtgcctcttcaaccactttgggcttctccttttgctcctttgccttaccctctcctcggggcttgaccggtcctttggcggcggctttcgcggccttctcggcagccttggcagccttcttgactggaatggatatgcagagaggggaccagaggaatgtgatggttcgaaggtttcgatcgagagaaaggagaggagaacaaaacgaaagcaatcatgaaatgaaggaaaatgcaaagatatgagacgtttgtggtaaaggtaaaataattagaacgcagtgaaaagagagaaacacttacgggctgacttcgaaggaccctcctgctcttgctgctcgacagggtcagacatggaaaactgtttgattggtacgaaggtgtggtgtatacgatatgaaggtatccttctgaaaaagagacgagtggtagagagtgtaaaaagtcgactgtggatcatccacactggcaagggtcaggacgtaaggagagaagatcgagtcagagaggaggcgaccgacgatttgacgagatggccctttttcttcatttttttgttttcctagtcttccttcctagtcagcctccgctttttccctattgactcggcctaatatgccataaaagttcctgaaaattgcaaaagaccgttctgtagtttgtttcgtagtgctacactatagtctgtatagtgcatttgtattttagtccgttcttttgtagactgctgttcgtactgtagtctctgtagtgcgagtagaggagtctggtcgtacagtacctcgcatggcgttcttctcaatgaacacgtcctccttgatacattcttctgggagacaatttctatctgtggtaactcctgttgctcggtcgtctccctcatgttactcttgttgtgctctgaagaggtctcggatggaaacgagatgaaatttaattcatgcgctcgtgcatcatcatcacaagtacacttgagtgatatatgatcagacaatacagagcgaacaaggttagtggtagagtaatattgaaagagaaggacagacctggggtatttgtgtgacatatggcgaagaggactgctggttcagaagcgaagagatctcgtatggtagtttgctctctgtagcatatggctcgaacctgaccctgatacatccaaggtgagatcctttcaatttgttcttacatagagagcctcactcccccatccccatacatgtgccatactatctccttctcctcttgacctctgctctctatctctttcttggtctggatggttcacactgtgagatattgtccgcatacagatatatgaaagccctgactaatcaaatttacttatgtaagctctacccaagtcgcttttggcattcgacctcatcctccggctttctctccttctgtctgcattcgaaaacctcatcggccaaccatgccttctgcaaagaacgtgttgaggaacttcggtagggattctgcccaccgaaagtcgctcctcaggtgagtcttggtccattgttcccaaatttgcatcttccttcgcttttagacagtcagcagatcgactcgcacagacgctcatcctcttctgatcttgctggttcttccctttttccttgttctctcatcccaattcgacattctcttgcaacctatcctatcaataatcacagaaatttagtcgcctctttgctcgagcatggcaagatcgtcaccactctcgaaaaagccaagactacagccatcttagccgacaaggtgcgttcgaattcctttcaatatctcctgtctctgtatcttctctctgccgatcggaaggatgtgtctggtgcaagttcacaactgaattatatctgccttgttacactttcttgtcgtcgttatgtctcctatctatcacatacatatatctcctctctttcttttcctgtcgctcttctctcaatcaggcgatcaccgctgccaagaagggcacgcctgcctcgtttggaaaggctcacagcctggtactcaatcacagtgtcaccatgccgctcctattcaccaagcttcgagaacgatatgctaagagacaaggaggatacacccgaatcatcccgaacggagttcgagcgggcgatggtgcaaactctgccattcttgagcttgtcgactcgcccggggagatcagatttgaaatgacggccagagagctcggaagaaagtactatattgacgagctgtcagtcttgtttatacgttttcctggttttcaatctgtcctgaaattcttccttgtgaagtcgctcatctttgtccacctttcttcgttgtccgaatcgatagggcaaacatgtcaaaaagaaagattttggacccggcggtgttggacaagtatgaaaactggaagttgaaggaaagggtagaaaagtgcctcaaattccgtccagagggtgcggaagaggagttaatctctaaggccgaggcttacagagtatgtttctgtcgtccctcctcctttctctcttttgttctccgttcctgatctcgacctcgttttgtgtgtgtatctctcctttgcggatctgtccgaactcgtcttgaaaataggacctgttgagagccgagccggccgttcacggtggtctcagccgagtcgatctggacaagttcaaagacacaccggaacgaattcctacgtgcgtccctcttctttttctgattcttgattcattcgccctctcgctctctttctttcaacaacatggcgctcattcaacttttccacccgtccgttgtatcgtggttcctttcctttcctacaactttcttatgcctcacagtaactccaagatcctccctgtcaaaggccgacaggtccgagcaggagagctcttaccggccatggcgatctacaccccccgaaagcctacgccgttcaaggaacgacacgactacccccgactgccatttggtcgacggatgcatcttaaaggaaaggacctggccgccttccatcagaacggtccgtttgatcctgtggcggaggagatcgctcgaagtccgagtggagagttcatgttggcgaggacaccgcttaccttggctagaggcttgttgggtaagaaacgtctgcccgtcaagagattcggtagaaacggagatggtctcggaggttagacaacgggtttgccatcaaccttgcctcgcaagaggtacacaaagggaggataatccccctctgtttcgtttactttcttggggtggcaggaggcaatcgtgaatgaaaatgaaaatgaatctattgaatctttgaaggatgttttctaaaatgcgttttgtcagttcaggtaacgtccaattactgtttgttctctgtctttcaaacaagtcttccatcgtagccattcggatttcaagtaaatataggagatgaagagaggaaaaaaagagaagaaagtggacgattgaagaataggttgagggaaagactggattatacgataacgaaaccaaagacagcttgaatataaaaagaagaaggtagtgtataggaagaaaagaaggagatcggactggattacaaggaaagaaaaaggctaaagaagtgcatagggttgtttggatctcttcctttatccaaatccggcccagaggggaccaaggtaagatacgagcgggatagaaggtaagaacgataagggtacgtagatagaaggggaaggatcgaacgaaaagaaaagaaaagaaagaaaaggcaaagtagaaacgataagagcagagcaaaggcaaagcagctttgttcggcagaaccaatcgagagaagtgacaaagaaagttttaaaaaaggacaagacaagaaacacactcccccttcttaatattcctgaggatttagattttaaaaaaaagaaagaagacagggagaagaaaccccgacgaatactcaagagagatcacagactaacaaacacaaccaaggagagcaataggaacacaagaagaaatcaagccagagctcttcgctcgacgcaagacttaccgacttgtttcatttcttcttgatcaccctcaaacctcttgaacgtctcaggctcgagcttagtccgatttagaaaaagaatcgaggaagaatcgaactaataacgagtgatttatccaagcgaatcccgcatgaccccaaatgatcagaatcacacccacagaagagcgtgtcggaagaacccaaagaacgacaagggcagcaggaatgcagaacatagaacgcgaaagaagaattgagagcgggggagcaggggagcagggagaaagggagaaagacatatgcttagcttcttgaggatcgaacagtggccttggaattccaagggatggataggtgataggaagacggtgaagaaggaatgaaatagttttggagagcaggagggaagggacaagaacgacgggcattggacgcgtcggaaacaattaacaagggggaaagaacatcatcttttcctcttttgtgatcatgtttcttttcgaaacgaatccgaggtagttctggcagaaagaatcttcgaacaaatacggccggaggagagatggacaaggggagaagaaagagagaagacaagaaagtgagacagataagagggactaacgtagcaccgactccaactccaaataccaaagctccccaagcggcctgcttaaaggtctgcatcgctcctccaggaggaggaggcaccaaagctctactgttggtagcgatccttcgaccctcctcaagctcctcctcctcctctctcttctcctcgtcaatactggtctcctcagattcaacctcctcgatcgtcctctttccggacttagtctgctcaattggctcctcctggtcctctcctttcatctcctcgtcctcggatccgacttggccttcgtgtgcttgcttttcagcagcggcagcctcggcagcggcttgaagggccgctttcttctccagttcctttgccttcaactcctcgaccaatcgcttggactccatgagttctttttcggcagcgatcctcctctgttcggcatcgatcacctcgtctaccttcttggcatcaacctcgacaataatctgggaatcagattgcttgacctcggcagacttcgaaggggttgacgaaagagaggaagcggcggcagctctagtggaggaccgaagaggcgatcgctcggcctgcgagggggattgagatgacttgatttcagaagttcgtgttcgcttagcagccggagtcgagccggtgctgtgctgggaagaggttgagccagagaccctagaggcattgagctcctcagaggcggcttgagaacgttgagactttcggtactgctgctgaggatctggattggcttcgctaagagccttttggatcatatgcaattgtgtgtcgaagaatttttatgaacagtcgacacgtaacagagatttgcaaatcagaaaatatcgacgaaagggaaaccagagacccacgtacctcgattaaggagatgattccgtagtcttttgccacctgttgagcaatctctaggacgaccctgtacacgaatcaaggactaagtgtcagctgataaaacctctctcagaccgtctgctcgagggatgcggccccggaaaccccatatcttcagatcttcagattctgacgccgaagtatgtctggaggacggctgcattggcacatgcagggtgagagaggtatataaaagagacagagactgaccagcttccagcgagtctaatagtattcgtcgtctttcctccattagctccgctattgtcaaagttgttcttgacccaatcacactcggccttctcctcctcatcaagagcaccggggaaacaggctttaaacatggtggtgagggagaacgctccggtatcgtatcgtcgaaggatgaacgcgtgtccctccggctacggcgagagcaaagggaaagaaagaaaaaagacagaacaggacgaaccggtcagacactacttgacagaaagagaatggaagaactgacagtcggaactttaactcggccgacgatgatctcatgtccttctcgaacgatagtctgatactttacaacaaaattctccgggggtactgtcgtcgggagcacagcatgattaggcagccagacctggcagatcgacaatgggaaataatgattgattttacgagaaaacacaaaccattagtgaggtgaggattcaatctaagcgatagatttcaggtcgagcaagagaagattgaaagaaaataaagacgacgtatcgttaggttcgtttggtctggatcatttttcctgcaatctgatcttaagaacgaaaaactcaccggctgacaggaagagagggccgctgatcgatcgcctcggactaaaattgaccacgaggagttgaaatagacgcgatggaggttgaagagaagaaggcagcttgcgttaggtccaatcagatccattcaggagagaagaggaaagaaaggaaagaaaacaaaacaaaacaagaagagggagaaagtcagagaaatggatatttacggtagtggttcgtgccatttggtagcgctaggtatggatggattgaatgaagaagggtttgaggttatttgatgttaaacgagaagtgttcttgctttatatagaaaggtcaacaatataggaggataacgatgacggagggtgtgtgtatgttgggaggcaaagagaagttgaagtagaaaatgaaggagggcgcgttttgcccgtctctttcttgccctcctgatttcttgagccaacgatatgtttctgtctctcttgtacttcacatcaacttgctgatctgaccacacggccgtatctcatatgacgataacaaatgcattgtatagtgaaaaaatcggaaaagtgaagatgacaccgtcgcacactaggcatactcgctcccctccggaggctgagggatctttcggttgttgggctcagccatctctctttaagaaccggcagacaaagcaaaagaagtggcataggtcagatcaaactgtgaaagaggtgttgtttaagatatatatacaaacggcctagtacccacttgcgcaagttgaccagaacggtctcgatagacatatctctcttccagttgtgcaaagcggtagtcctcatgcccctaaagttaacctttgctcgtatattgccggcgtcagaaagtgatggtgaccagcatatcagcgttctcagagtctcgatagtgagcagtccactgacgagaccattactcacgactccgttgctatcgttcacaccgggcaggacgattcggcttacgaaccgaacagtcggaggttgagacggatagtccggtccacaaacgatcttgagagagtagattcgactctcgaaaacggtctgatatcaatcaaggcatcgagcaatcaatctcgggattaaaatctttgcgagcgaggacaagtgcgcgaacgatgagcgtagacttacgtggccgggaccaatgatggttccattccaagatttcatctccatgtcatctccgtcctgtcgcgaaggatgccggagtacaacagaagaacggtgacagcaaagcagcgatagaacacgcatgtagagtaagtatcctacgaaaccgaatggacggcatacaatggatcaccattgccctgaggcttacagaagaaaagacaaggggaacctacgtcaaggccgtaagagcagcttccgtctccgatacctttctctcctttctccaattctcctagcagaacaaagtttcgagggacctgggaagtcattgatgggaattcgatggtcactgtgtgatcgctgaagtgatgttgacgatggtgatggtatctgtgacggatggacaatctcaggtggcaattctatcagtcagaagtccgcagcgaaaatcgtgataggcaggcgagcctgagttctctcatcaccacagatctaccatcatctcttgcctttgtttcttcctacgtatccatcttatcccatcgcacacgatctggtcgatcatgtttagacagcagaatccgtttgaggaacaggttaccaaagcgacagatgaaacgctcacgtccgaagattgggctctaaacatcgagctatgcgacaaagtgtcggacgaaggcgagaccgggtacgcttgttcatccttccagctcgatattaagatgatgttgggatcagaagttccgagtgcagctatctgatatgtgtatgtattttgtatatgtcagagctcggaacgccatgctggcagttcagaaacgattggcccatcgcaacccgaacgttcaaatctttgctcttgaggttcgttccgatctctagctcaagggcgtctgtgtagaagctctatgctaacctctcatgatcaccggtccgatagcttgccaacacactgtccgagaactgtggacaaaacatccacagggaaattgcctccaagagtttcactgagggattggaaagagtcgtcaccgatagggtatgtgtgattccagtcctcgtcatcgcccgcatagccccgtttgtcattgctcagagcataacctctttctctcaatagactaccaacgagcgagtccgacagaaagttcttcagctcatccgaaaatggaatgatgcgtttcaaaatgattctgatcttggtataatgaacgagctgtttgagagattaagaaggagtgagtctttcatcaagcgtatattagcctacatcacctcgatactgattatgtagaatacctcttcaaatcttctttcatctctgtagacagtgaatacagctcggtacttacaggctcctctatcaacgaagctcctccggtacgtagtgttcctggtcacttatgatcgacctctgcgatacatactgatcgagccctctatatgcgtttggagaacaggatgaggaaatagaacgcgctcgtgctgccgcagaagaggccgaaatgcagcgagtcctcgagttatcgaaacaagacaagggtggcagatccgttggtgcgtcctatacgaaccagtctcgccttagtggatcgtcgtcgtccactggagcagcatcagcagccgttggctccgccgccacgtcctcgtcgtatgtacaaggctcaactcaaccaaccgcccagacacacaacaaccagcatactgcagcaccacgtagaccggtaacgcccccactggaccaagcgagtcgggttcgtgcgttgtatgattatacgcctgcaaacccaacggagttacctttcaatcagggagatatcatcaaggtcattggccgaacgtatgctgaatggtggcgaggaacgttgcgcggtcgggttggaattttcccagtgaactacgtcgagccattgcctattccaacctgggaagagatgcagagagaacgagaagaagaggacgaggtctttggaagtgttgctaaattcgacgagctcctagaaaagcttaagggcgtcgacgtcaacagaggagaccgagttgaagaaagtagggagatcgaagagttgtatgggtactgtgtcggtctacagggcaaaatctccagcctcattcaaaagtaccagagtcaaaaaggtgagaaatttcattgctgggcaccatctcattcttcaatagcataatcaagctcaccttacggcgaatcttcctctggcttcaaccttgttcagccgacttggagcaaatatccaacatctttactcaagcctcttatcaataccaatcaatgaagaatccccaagttcccttaccccagggtacgctttcatctgcctttgccttctttcatcttgacaggcgatgccatctataccaaatctttgcgccctgctcaaattcagaaatattttcttatactgatcatctctgtgcatatatgtccttcttgacgacaaaacaccaacagcttacccgccaccccaccttgttcagcatccttcgtatggtcattcttctgtcgaccaggtgccacaacaggttccaaccgccagctcgccagcttatgctcaacatccttctgctcaggctcaacctcaagctcaatctcaggctcatctccagggacaagcacatgtacatccacaacagcagcagcagcagctacaacaaccaccaatggacccgcaatgggctgcgtactatgctcatcagcaggcagtcgcgcagggtcatgcaccagcttcaatcccgggtcagactggactactaccgcctgctcaacatctaccgtctcaagatggtcgtcaaagcccgtacgtcctctcgtctgacggtatagagagcgtttaccacgtactgactaggtccttccctgaattactgttttgtccttgatgatactgtgatgaacgattatatagttatgaccctcaacgacgtgagcaatcaccttctcagcagatccaaccatcccagtcaatccatccggccgcccagccttctcatttttctcaacagaataaccaaatgaacccaggggggactcgaccacctcctcagtatctgacgtcacatcctcctgctcaggcgagttcgccgagcaacaacccatggagtggttgaagatattcctctgaataaaacgtagtacagtcagccgttgctcgataacgaacgaattctgaggtctggacacaggaggcctacagcactcgagcccagtcatatcgaggttacgactctctaagctttgctctctagcgtcttcattctattttctgtatatatcggtgccatctattactttgctctcatttctctatgaatgcaccttcctacctacctgtttcatgatacaatacccagctgtccgatgaagatatacaagagagagatggaagtaaagaggacgcttctgtgtgcacggacctgtcatctgatggaactattctgtctttcatctctcctgtcttcttttgctctttctgctctcttcttcgatccaggatccatctcttcgtctcttgtctcactttccatctctgtcatcgttcttagtatcaataagaccgtcagtatcaccaacatcagtagccctaattgctatcatgtccgacttgagaacgacaagaccagctcaggcttctgtacaagcgcttcctgggataagtaaaagatccaggttgccttctcctgtcatcaagtcatcatatggaggtaagagtatatgcgccacatatcgtttcctctcttcctgttttctatatattgtttcggtcctgaatttataaagtgttgatctgtccgaaatgatgttctgatttgggttgactgttctgatagctccgccggatctagcctcaattcgacgcattgaaagacactcgtctcccagtatacctgtcgcggctcgagactctcgaccaagtcgtcgatcggtttcattcatctccaagacggctcaaaccgaggaggaagaagagagaggtggaagcgaagatacagagatgaccgagagtgaggctaatttcgaactaattccaaaagggctggaaagcgctaaggctcggtaagacaggtttcccttctatcatgcagcctagatgtgtctgtgtagaggagagcgtgagaagggttcattctctgcaatgtgtccagaagtgataccctttcgaacggttgcaacgtggccttcttgtaaacctgaattcgttaaacgcgtcgctgttgttgactttcgtctacggttacgcttgacttcccgcatttatctgaacactcgttctcttcgactcttcgccttcacctatccatccattctctccaacggtctacggtcgatagatacgctcgcctcaaacaacgaaatcataacatccaaggccataccaagattcacgaatcaactctcaacaacacgtctgtcaagttagtctccgtctatcaatcatctatcgcgaggggtcgcgtcataactttcgttcgcgtcttgttaagtgaatgatctcagtaacgaattcccatttactttcttccttttcattcatcgagcagtatagcgacagctttccaccaagcttccaattcggacaatcctttcgtgaaatcagggtcattcgtcacctctggtttggattcaaaccaccaacaacctcgcgtggaaacccaactggcttcgtctgaaacacggccagcctccactcacaagacgatggcaaactcccaattccagccgaatacatcattgtcgtcatcctatcgatcatcctcatcttctcgtcgacgaacatcacctatgcctccttcttcacttactgaaccccagatggctattcctaaccgggagcgaacaaagtctcccgttctagaggctgttgctggagcagctcgagctctcagccctgtcagttatctacttaaacccagagtcggtggtcagttggacagcttcattgacgaacgagatctcaatgagaacgatgaatcgtccagaggatttctcagcttttcaactgccgcggtctctccatctagaaaaaagacagcagaccggagcgattttgaccgaacgttcttgtcggctacaacgcaatcggccatggactcaagcatgagcttcgaccgatcgaacgagagcagctatcgattcgaagaggaagagaggttgcttcaagagatggaacaaaagaaaggaaggtcaaacgcagtgaatggcgtctataatactcgcgacttgaacgcaagtaatggaggttggtattcaggattgggcgggtacgatcgagggacatccgaggtttcttcagttaactatctatcttccatgaagggcagatccccaatgtctatctcgggcgcggcgtatagaccaccgatcgaaacagacattgtcttggagaatgaatatgagagctctggaacggacctagaagatccaaatgaggatgatcccaacaagtcaacgaagtctacacgccgccgtcggcctcgagtctcgaaagacaacatggctttcaagtaccaagctggaggatccggctccgatgaatactctgactcggaagagaaacataaacgccggagaaagaagggagaggcaacgtctactggcgcgacaggcatgatccccattgtagaaaaaagcaggcgaaaagggactaaaaaatctacgaaagagacaaccgggtctacaaatactcgcaaagagttgatcgtctttgcggatgaagaagagatggaggctcgtaatgatgattcgttatctagtggaagatctattcaagcccctaccggttacgacgatgactccagagaggaagaggatcattatcccggatttttacgccgtcaggaggaggataatcaatttgtgaagcgagtcggttcccgagattctcatctacaggattcgaccgcatcagcttcatccagatcacgaaccccctctagacagatccttcctcacctgactcaggatgtgcctccagtaggtctaatgtccacccttaaaaaacttcctttacatatcattcggtcagttctcgtggccactatatttctctgcaacatggtcttcaccgccctttcgtgggttctgtctagaccaggtcaactccttcgcgatatgcgggtaaactccactatgctggactggaaaaaacttgcaccgtttctctggggagcatttggtcttctcagcgccgcctaccttgctggttcaggttcgatcgagtcaagttctccatcattaccttcgtcaccctcgtcctcttggttgcctttcttatcacctcgacaaccttcttatgatgttccttctgttcctccggaatccttggaagaagttatcaaccgactcgcctccttggagtctgccctaggatctctctctactcgaactcaaacccaaggaaacgatctctcaactcgattcgccactgcagacgaccggctctcatcggatgttcaccgcgccttcgagattgttcataagaaccaggaggatagcaagacaaggtttcacacccttgattctatcgtcggtcgcttacgaagcgatgtccagaccctcaacgtacggatggtcactggcgaggagacggttactagcttagacgcccagatcaacggtgtcactaaggagctccggtcgttggatgagaaggtcaagaaggcggaacagttggcgaagaacgctagtaatgctgccaaggttgctcagcttgccgcggattctatcgaagctcaacttccggcccggctattcattcgaatgaatcccaagacaaagagcttagacatcgaccccgtgttctggaaagctctcagagctgtcttcgtcgatcgaaaggaggctagtttgctgggcaagagtcaaccatccgcctcaaaggatcaaccagttccgactcctaatccacagattccttcctgggatgatttcttgtcacataacgaggatgctcttcgttcgtggaccgattccgaatttgatcagaaggctcagtcaggcgttatcgtctcgcgggttgatttcctggacctcctcaagcgcgagcttgaggcgttgaaattcggcttggagagtcaatttgatgatcaaacaaggtcgatgggcgatgaagttctggcaaagtcactctctgctatcaaagtggcctcagatgatcaggcatctcggccgtcttctcgatcacccgcttcagaggacacatccgccatatcgacgatcgtcacttctatgattgattctgccctgctcaagtactctaaggatgtcctcgctatgacggactatgcgctcgagtccgccggcggaaggatcatcccttctctcacatccaaaacgtatgaaatcaagccgtccggctgggggactgtattcggtcgaaaacctattcaaggacggcctccaatcactgtgctcaatcctaatatcaatgtcggttactgctggccgttcgtaggatctgtgggtcagcttgggatttcattggcgagaccggttatcgtctccggagtaaccattgaacatgccgcgagggaggtaagctttgatttggcagcggcgcctagggaaatcgaaagtaagtaatcagtgtacagattcacctctcgctccggttatcttgttctgatccctgccttttgtttctctttctatctgttttgtttagtctacggtcttccagatggtgaatctgaccgtgccaaggtgcaagaacacaacgctcgtcgagctggatcagagacagagtccgatgaagcgctttctcaagtcaccaactatttcttgcttggttctttcacgtacgacatcgaagcgaccaaccatatccagacgttctctattccggaggatattcaatcgttggagatcaagacaggcatccttatcgctcgagtgaaaagcaattacggggatgactatacatgcttgtaccgagtgagttgtgtctttccttcatctagctcatactctcatgttccgtgttcagttgctgtgacctttgctaaaaccccaaactatcatttcatcctcttttgtagatccgtatacacggtagtcaataaccgcattttctctcacatccctttcttctttcttcgtcttttcatgattgcttttgctttttacagccagtctctcgttagtgatatcacttaatatagatgccgccgtggtcaagcatattacactaccttttcttcttgttttctctatctctcacaaccccttctttcaacctcttatctctgtagttgtaaagatgtattctattgctcgcttgtttccgttaaacatcagaatgaccacaaagatatcacatttctcataaaggaagaaggggaaatacgtatatgtaaagttaaacagcatgagagacaaccaatcaatcccagacacccacttcttgtagcaccttggccaaacggcctgaggtcgtaagcaaccaatatcaaaccaaacatcaacaagagcatcgttagcaacgtaaaagagcatcaggagaaaagccgcgagatgaacatacgatagtccttcaatagttctgccaactcgcccaccttcagctcacctacatcatgtacattcaagaatctttccaccggtgggcttacagatcctccgctctcgagaagcctttgggcggctataggaggagtgtggactcctgcagaagcgatagatccagtagaaggctgtcggccagcaagtgtcggacgaggcaagcttgtcgaaggagatagcgaatcaagggcattgttaagaagatcggccttgggctcagatggtgtggacaaacgagtcgctcgatcaagcgaggctacagaggattttgggtcagagggcgatgggatcgagtagaatggagtggccttgaagaaaatgcgaaggaaggtaagcgaaatttgattactagggcacaacgaactttatctcttgcaaaagatagaagaagtgctcacttttggtaatgaagcagatagtacttggtcgttgggacgatcccccccagtggcaagcctagcgaaccgctgactgatgctcattcgctcgcctctatccgttggcgcaggctgtaatggcccctcagctttactcgcaaaggacttgaatgacgacacgcttcgcatacttcgagcatcaccatccttcctccacggacttgagtcgtcgtcgtcctgatcatccgatagggatgcttcaggagattctactgctgcatcgtccgagtcttcgcctttgtctaagattgaaactggtctagaagatacatcgaccatctctcgctttggcccccactcttggtttgctttggatatcgagctttctctgagtcgttctatccgatctttggctccgatcccagctacgctagccgtcaaactggctatggagaaacttcgaccttgcaggccaggacggccgatactaggtgcgccaggaacttgagccatcagtccctccgcggcgacctgaccgctaccgaggagcgttcggaaagcgcctaggccagaatcgacaacgttattcagtccagtagtagccaactcgccaacagtcctagcccgaccgcgagttcgaacacctggctgggcagtcagaataccaaggtccttattgagttctggatctacaggagggaagtcggcactgagcactcgtccagaatcccccagtcccaacgacttgaaatcaacattctcgaggaagtcaaccactgctgtagtattgaccaaagcataggatgattctcccgaaatggacatgctcgatctatacctctgtacatagagtaagtctgagaccaatcgtgcaggattggatttgactacactgtaaatgatgacaggtaacaacaaatctgccccagagcttccgcttccggtgggtgttgtctcctcatttgttggttgagtctcctctggtggtttcgtataaacctcctgttctgatgtcacacatggtgaatctgaagattgaggcgctggtggggctaacatactctcggacatggcttcttccagaggagaccggagatatgaatcttggctgctactcctcgccgccgaaatcttgtcaggaggtgaccctaatggtgatatgaactcatggttagagacggccgacaatttgttttcagtaattggagctgagaccggaggatcaatatccttcgctctgggaagcgaggtggtcgaggttgtgtcatctgagcttgacttgggagatccaggaactacggggctagaacctgaggtggacttttttagatgagccggaagttcttcgtcttcaggtctcaacctgattggtggtagacccctcaatccatcgatcacaattttgtgggctcgaacaagaacaagagccttttgcttgggcgattggtgagagggtgactgtagcttttggaactctgtgaggacagtcccaagatgttatgttaacagataatcgccatcggtgttgatcagaattgatatcaccctattgaagagaagaaggcacgtaccagctcctacggcacggacgatgtcgtttagtcccttcctaaccgtttcgttcctatcggcggtctctttctcttcgatcgtcactactcccaaatgatctaatgtaaggtctagcatattcaatgcggcgatccgggaagccaatgcttcgtcatgcttagaatcagttgcttttgagggtgagaacaaccttcaggcatgcccagtggtatcaagttattatcagcttcctcgatgctgacaaccgacgtaagaatttgaagtgaggtactcacagattgtagtgacaagacatgactacctcttctaccttatccaccccttctaatactatcttttcgatctctctttcctttttctctctttccttctctctcttctcctcattttcacctcctggctcgatagatggaatgtctgccgagaaatatgcataaagctcgtcatgaacgaggctagagaaggactgatacacggatgaacaggcctctggatccgagtaggatactggggcagtgattgttgatagagtcggaagagaggtagatggccgcgaacgggatttggaggagatgggtgattgcaatgagtgagaacggggctgagcggcagagggatggggcatggagataaacctggttggtgcaaacaaaacagacttgacatttgatcctgtcctagaaccgaaaacttgataaactcttacctttgaacgccactgatgactcctgtcggcaggccgctcaatgctatctctacccatcctctcgttcccataccaatagccttctctatctccgtcttcttgatagctcggtcgactccccaagcagaaatgaacacgatttcttccttcttctctgtcgactttggcttgacgtctccatcaatcgaaggactgggtgattgggcgcgctcaacagacggcgagggtgatcctggttgagctagaggatccttcagcgaaacactagaagagtatcggtgaatcgatccagtctcactcttggactcgctttctgcatcgacatctctgagagttatcgtgggtggtttgggggataatgtttgaggctcagaagaggaagtgggcaggacatcagcctttggcctgctgaataagctggcgaaagggttacggggagcactgccaagcaaggatgttcgtcctttagctgcactattcattggcacggtcggagttggtacagctggagctggagggggaaacggtagattccccgaagagtgaaggactgtgagtgttggaaactgtttatccgacagactcggatgaacataaggatatgaaagttgagagagcgtttgactattcaatgtgcatgaaaacgattaatattgtctactgacagaaatcaacagacactcagaacattcgtcggacataatcactcacgatctagtcgaggggtctataagagaagacatgataggaccatccgtcgatataaacgacccaaatgtcaagattgatctatcaggccctcgatgaggcgcaaagatgacgacaatcagatcatgaaaaacacactttttggagttgatagatatatgtaaaccagactcacgaatccatcctgccgataaatccacccagtgtaacgaccaaagtactatcgttggctccgccgttacagaagacaatatgctccttaaagacctctggagtgatatctgtcgtaccaatcgcgatcagaggagaagcaagcgggagtagcagtgtcgcctggagtttcgaaaaaagcgagagaatgaaagcttgttcatcaacacatgatcacgttttgttttgccaaatgtgtctggacgttgcctgaagtcagaagtagaatcatgacggaccttcttgaccagcacaagatcgatcacctcctcccagggtttctctcctcctttagcaaccagcgtctctaacatcttcatacctagactatcatttcccaaaccgagtcccctttgagcttctgccttcaggtttgtcaattgcagtcttccagtcaatgatcctcttcctgtcgacccactgttactcctaacaattgcccccgcgcctgcgcccgcaccaatcaccgttccattctccgctccagatagagctttggaatctacacctgttagtccgtcagatttcttccctgttgctccagaggtgacagcgatgtcggtcgtctctacttgggaggtcgatgtagttggtcgcacagggtttgaaaataagggcatccctccagtcccagaatgagaattgttggtgatcgaagaattgatagaagacgaagcgttcatcagacttgaggtcgtaggaatagatgaggtagatcctcctggtgtcctccttcgaggttgataaggaagaggcgaggatgactgagcgtctgaaccggcatgagtagatggttgagctgacaagtgagaatgagaagatgaaagagtgtcggccgacgttgaatctaacgaattggcttgcgaactgttctccgcgctagtcttaggaggtgatccaaaacctagtttctgagctgtaactcttgacaaaggattcccttgaaagagatgggacatctgtaagctcgatagaaaaggtggaaggaacggaagaaagaaggaagagatgggtcgagggaagaagagcgttctctcaacagaagacgcgtcatgtatccactgggcgtaaccatcacttgccacgtggggaaatgtgaccgttaagaaagtctagttgtcgaacagcatggggtataatatatatcgttcacaggtagcattcactctatcaaatacaactaagaagctcaagcgaatgcaaccttggcttctccgcctcctcgcttgatcatcagccctctctttcccacgccccaatatacagccttgatgccctgatcctcccctccactgatcaggctcaaccgggatttgatctcgctcatagggagcgcgtggtcctcggcttctagcaaagcgaggaaaacatgagcgagaaggacgccctgaggagtcagtggatgagccggcgtagaagatgaggcgatagacgagctcgagataggaggtggaggaagttctaattgagccagagaggtaaggaggtcgctttgtgatttttgataggatgagagtgtgtaatgaccagtcagaacatgttctaaatgcagagcgtcgttagatacgacgacgaatatgatgtgctcacaaggtatctctcggcggaagaggttcgccagattctggcgccagagatgattgacgtaaaatatcaccgaatgaaatccataatttattctgcaacatatcacagtcaatatgtccgaggagtcagcaacggtatcagcgtaatccccactgctggcaggaaagaccggacatgttagaagacatgaggctcaccaaaattgtctccatctgcatagtgatcaacggctcgtctatcttctcgtccgctttgtcgtttatcgttacatccgcttccccatctgcttcctgttcatcctcatcgtacaagtccctctccacttccatcttctcaactctgtttactaagggctcatcctttctatgacttctcaagaatactgtcggatcctcgtcgtcatctcctttcccatccttctcctcctctatagtaacatcacccgaatcttgatcgggaggcgcatccttcacaagacccgattggacaggctcttcattgtccaacaagctcggcacaaaaacctccttcggcgtgcgtttctgacttgccgccaagaaccgagtgatcgtcggagtttgccattgagctgccctaggagttgtaggcgcgcctatctggtctttcagaacttcgctggagaatggttttgctatcggtgtgcgtctgggctgataagatgacaatagcttaggggcaggcggtgtagatgggcgatttgcttcgacctagagaaacccagtgataaacatcagacaaccgtacatatatcaaaaatcaccatatcagcgatcaaaatttatatagacataaaccagaaagggcaagtgttgatcaacgcttaccgcttgttgagcgcgcttctccttagcaaatttcagtttctgtagtttcatcttcttcgactcgagttgcttcacccgagctgtctcttctttgaacaggtcttctatcgaaggctcagtgtcaagatcgtccaatccaacatcctgaggagccggttcgggctcgggcatctgaagatatgttttcagtacaacccatttctatgaatctccgttcagagaagattcgaaacgggaaacgataaatatatacatacatctaagagtagttcatccaattcctcgttggtctgtctcgataattcatactgatccatgagttgaatgatgaactctcttttccgaggcatcggttgactacacaatcatgtgtaaaggagactcgggtaagcatctacgtacattctggactacgttcgtatctggtcacggcctgatacttactatccatccactaatttcagtgcagctcggaggagaacgtctggctcgacggttgatgatgcgttcgcagatctatttcgaagaggtgtcacaggttggactgacgtgacttcaaacagtgtttgattcgcagacgctggaggagcatgagctgtcgttgaagtgtgtttcgggctgacccattcgttgagtagatggaaaatcaaacagagaaacaagagcaaaagttgtcagcagcgttcacgagaggacaagtaatttctacccaccctacatatttgaatagctctctctctcctggattagcatcccgaacgttagctggaaacggtctagacattgatacactaaatggccctgccggtgcagccggatgactctagagcatttcaagaagatatcaaggataaccggttaatacagatcagatagggtgaccaggcatgggggaagagagccaaggaagatggagaaagacttgactaactgatgcctctgttatctttgctacattggtttcaaaccgatccaagagagccataaaggacggcatgatttaagaatgatagatgtcgggtacaaagacttctgcgatattagcgtctgacgatggagttcgtttgatgagataaatatattggacgcgtatttgttctgtctggacgcgtttaaggcgaataaatgaatatataagctgttcatctattcgaccatcgacccctcgaactgcataccacgtgtttgaccgataattccatctcgacctcgtccgaccaaaccgaaatccgaattcctaacatacacttacctaacatacatagcgctctattggttcagtcttcatcaacatggccaagaagagatctacaccttcgactccctctacttctcaagaggtcgaaaaagctggttccgtactctctggaacagtttcctcttcaccctcatcgccctctgccccttcttcgaggccagcgttacagtcgactgattcggaacttgtcaggatcaacgcagctaacttgtctcaggcaaagctggcattcgacgatactctccgagaggttcgctctcctttttcttgttttcttaccggattaattctccttttgaatgtctactaacctgattcactgcgtttccctctctgtattctgctggtgtttgcttgactgaattatatgaatctcttttaatataattttattcacaggtcttagtggctcctccgcatgcatacacacaatcactcagacacactgacctcaaactcttgctcgggtggagtgcctgtctcatcgcgttgggcacatctggttgggcatacagacacagttgggaggagagcaaggggccattgaagattgctgtcgttctgtaagtcagatctttctttaccattcgagttcttctcaaacattatggaacagtatgctacggatcttcctgtttgggatattccgtttagctaagagtatcactatacagaatgactgatattttgctcgttgatctaccttactctgaaagatatgctatcttatccaccatctcgtatctatatacatacttcatccaaggccaaaagatttttgttgggaaacggaagacccttactgacggtcgagtaagccctgcttatctcactcttcgttccggaagcacgcgcacgagtagttgctcatatttcgttttgttatcggtgatcggggtgtcatagattgagactagcataatcacggtatccacctcaacaaagctttcccccaagccggaaaggatacctctggtacgttttttcgttatcttgctgttcctttccttttaatagtagttctagctttgcttgtggtgatatttttgcatcttgattctaattatgtttctctcatggccttctcgtttttctggttccattggccctccttctgaattaatactctgcacaatagtacaatatcagtctatcatccttgacatcgacgaatgccggaaagtccttgctatctcgaatagagaacgaaggctcaaaatctatcggcgcgttcgtcagtgcggatggagtggtcgatagggtcgagttggagagctggttaaatgggttgttggagggcaaggaagggaaaagcgcttaagcgcgagagtatccgtcctacttgctagttcttcgggcgacttcaggaacggcttatatacactgagcttctttagtatcgttctggggacatcatgctttcccttctcttttctttgtgaaaatcgatgtacgtgttactttgcaccctctcggtctgcctaaatgaaagtgtggcgtatctcaatttggtattcgtgtcaagtgtcaagggggggaaatgtagaggtaataaaggcatgtgaacatctctgaaagatgggatatattgcacaaatgatgaatgatacagtatcagagttcgtaaaagtatgtatcggaatgtctgtagtaatagagagatattgtccataatagatataaagaaaatcaagaaatcagactcttgagaggaagatgttcgttctcattaacactatagatcagaagcatccgcgtaagtcagtcagtcagttgcaaataattataaacaagagaaggaaagaatcaaatacggaccaagccgcaacataaaacagcagcaatcgctccaaagaaacagccgcaacatgctccacagcagccgccacctctaattcgggcggcctcttctagctcacctgtcgattgcgcgacttgtggtgggctaggaacgggggttgaagagagaggtatcgaggaggattctgggaatgtgcagattgaaatcagatgagtgttggtcaataagatggaacaagtaaggcgaccaagagctttaggacatacgcatggtgggagccacttgaggctgttctcgtcggatgtcgacctccggaagcatggcttttttgtctagggtgacagcagcggcagggtacgtggttgaggaaacggcggtgctcatagcgctttcgttagaagtgagtggtaggaagagcttgtagagtgagatgcaggcgagtctgaacgaagagagaaacagatgacgatgtccgttcccgcgctagatattattgagctactctttatacgaacggaacccagaaggccaagaattgacggatggcggttcaagaagtgacactacgggaaatacctgtgcgcgcagtccgggtccggaaccggctcggccgggacttatcctccgagacggtagaaattctggcaggtgttactcaagcgtttgacataatatatgaaagttgtataagccaccttatttgttccatcaaccctaacctcatcgacaacacccatgtaccacagagagcttggtgaacaaaagttcatggttccatcttcccatcaatcatgtcgacacccacttgctcgccctggaggcttgattatgcatctggatcaaacaagtaagtgatgcttatacacacctgtccgcttcatgtgatcgcatgatctgatagactctgttgtacagctctcaattagcgacgatccctaatccacctggagcaaaccagaagctcatcaagtctaacaaggtatgttctatcaccataggtcaaagatccttgtcattgaacgcatccctcttgaatggaagcttaccatattttatatgctttgttatctctgatttgactgtctcaaaccaagaaatcgaacccgtcgtcgaaggcaacctcgacagcggttgttaacccgatggacgatcctctagccgctcttgggttcggagggacatctatccggatgaaacgagcttgggaattagcgttcagccctgctaaggtatggacgtgtttttctactttgtctctgagactgcagggattgacgcgctatttcgttggttatagtccttaccgatgaacgcgttcatgttgtacatgtctggttcaggcgtccagatcttctcgatgggaacagtcttcatgcttctctctagtccaatcaaagcgatgtccaacatacagaaaggtagctctaggatgatgctcctcaagcaaacgagaacgagacaagataagggctaactttggagacatttggatctaaacagtcttccagccgttccagctcccggctaactcaacagagacgaattcatctcttctagggcccaaaatattattcgttctctgtcaatgccttacgttcgtttcgttctctttttccttttcctattttccccactctcatcttcgatgatacatgtcttttgaatactgatcatgtcccgctttgaggaaaacctacgatcatacaggctcgccctcggactttggaaagtagatcagatgggagtccttcccagaggagctagtgatttcttagctttcgagaccagaggaaacgtacgtattgctctcctttccctccttctgaaaccagacaagcgaacagagaatacatcaaactgacccaacgatccaacgggttgacataaaaggctcccgaacgatctttctttatgggctgatacctcctcttccttcctgtcgggaaaaagaaatcgatacggttgtttctcgtttagtctccttgtaagatttgagttagaggtgtgatgtaatttgtatagttttctatcttatgatgattgttaaactttctcaaagagtttccagaaggacggagcaaagtcgaaagatattttggaaggataaggagagtagaaagagatggacgaacaaggagacatcgatcagtcatcgaggcaagacggaacgggagtagcagaataggacggaaacgaatggagatcgacagacgagggatgaagagacgaggatgaaaatgaggcgaaacaagagaacacaatagaatgggacggaacagaacaggataggacaacgaaggctagggtatcgcttgtttgttttgttttattccgagaataagaaatcaggaagaaaaaaaagaagagaaaagcagcaaagaaaaggcgaaggttgaagagttcgagcgcaaaagaagtagatctaaatgaaacaaaagagaacaatagaaagaaccgattggacatgacaaagtcgcatcaccaagcacataggtatacagaaggaggaagaggaagaacagagagaagggtaagaacacaatgaaactagagtcaaaacaaagtaaaaataagaaaagatgcaaggcgtgaggaagagagagaagaaatgagcgcaaaagcaagacggaaagaggcgcggggagaggggaagtgaagcacaagcgacaacagtgtccggctatgctaagcctgcccagtctttctggccaattttttctttgttcggaacaagctaaacctgaaggccgaggtagcttcgtgccaagatctcttgacgttatctgcgcagcccggtctagaaggataggaaagataacagacgggcgagtgagttgagtcaaggaagagagacaagatatgcagaaggaagagagagagagagatgtgaatctagaagactaacgtccattccgagtccttctcggtcggcctgaattcttcttcgattccgcctcgtcttcctttccgttcttcgctccactttgtgggcacatatgtactcccgacaccatatttaaagctctctccgccggtgacactgccacctgggatcgtctgtaaagtcgagtaggtgagttcatgggcgtttggtctaggaagaatgctggacagaggcgggggagaaggaatgacggccgccggtgctctgaatgggcgagattgttctaaagacttccgtcggcttgccgcttgagcagctgagagatacacaacagaatcagcgattgttctacattggagatacccataaacatcccagaggcactcacgcgtttcaggatagatttggggcccactggacgaagcgatagaagaaggaggcgatggatatccacccctcatactttgcctagtatcatacccaaaccttggaccgggaggagggagaatgtcgtccgaatcaaaggtgtggacagtcgactgagagagcaaggtggaccgtctagactttgtgccaacagtggtggttgcagtgttcgggtacctagtggtcgaggtcgaggttgcgattgaaggttgcctgtacggctggtagccatgcgaggaaggagtgtgaggagatgtcgggctgggtgaatcgtccttgtcgctggaggcgatatctagccttggaggaatcagatacatctcgctcgccggctgattccatttgcggccggtgttgattggctttcggttgtttgcccgataggacgtcggccgtccagtctgtaggacaccagagagggtatcaaggccgccaaagtcggcttcgctagaggtggatgaggctcgatcatgaaaggcatagcctcgccgaggagcttccaagccactgtatggattgctgtgcagagagattgaacacgcatttatgcatgagccggtgcagaacaaagaagaaaagagggagaaagacacagagagataggtcatactagtttgcgtcgtgtgcttgaccggatgaatcaaaataggtcgatggttcgatcagactcttcttcagagacgaatgggacaatgacgcgtaggacggatccagaagtcgatcaagctcggcgcgttgaccttctgctgtcttacgtgcccgacgcgcagacggccgctcgaggtgatggtgatgatgatggccgctggacatgatcgcgtgagtatgtatatggacgagtgctttgaatagagtgaggacaatacggtgagaaggatgaagagaaaagatgggaacgacccgtcgaggaaaaggcttttggggaaagaaagtaatcgataaaaagtgacatcacgggtgagacagcccgacaggtaagccctcttttctgccttttcttgtgcatgccattcgttcccacccacgaacagtccagcttttccaagggaacaccgcacttacagtctgttcagatgtatgtgagcgggtgggtgtatgtatgtgacagacaagtctgagtgtgagtgtgtgggtgcgagtgggtgagagaacacaagacagacgacagtgagagagcgaaagacaacggaaaggaaaacgtgaggacaaggtgagacttacgtaatcattattatttttgttgctatagtcttctctgtagtgtgccatggtcgatgagtatcatgtagatccgaggcgactgctgcctcgaggcttatcatgtacagatccagaatgtctgtcttatacatgtacaacgggagtctgctgcttctcatgtctgtctggatgttgagctggagccaaaggtggcacggtgaacagatgaaagacgtgtcgtcatcggccgtagtccgactaggacttctctagtctttctttcctattggccttgtagtctgtagtgtcaaaagattacgcgtgctaggaaaggatctaatctacaatcaaccttcttcaaacacacactctcaccacacatatgatcccttcggtacatcatctcgtctgtctgtcactcgttacatccacagcatcagcattctcctttccatctccgttcaagaaagcaaggttcacagaaaacggcctcgttctcgcaggtgatctcggtctcggtcgtcttgacgggaaagtcgtcgccctgggtgattgggatggtgatcaatcgttcgtccagctggtttattctttcttctgcgttcatagttctcataacttattcgattgatttcttactctacttgcggtcacaccgtagccttgatgtattcaccttgaccaacgatcaaaaggaaattcacgtttggctatgggatcatggttcgcacagcacctcgctctcatacacacacccttcctgcctagcctgattttttcttctctactttcctcctcaaatatcttcagtcaactttaagtacaccaaagcaaagccgacaatctcaaccaaaaacaaggttcgcaatgtcgtgccaggtgatttcaaccacgacggtcggttagacctgctcgtcctgtcagagattgatgacggtggctggtggaatgagatcaaggagctttcagtcgatctatacatccagcaagagtccggagagtttggtatgatgatgctactatatctcgagctccattattcatcaagtgcttatcccttgtgcgcgcacctttcctcctacagactcaccggtatctttggacagatccaccttggtccaaccaacgattctagattctacaggaaacctcagaccggatctcctaggtcttatgtctgagaagaacggacagcaatcaagcctgaagctctggcagaacgacggacatgggaactttaccatgtatgtgttgtgttgtctgggtcaaagtgaacaccggcctgtactgattgactgtgggattgcgcgcgaatcaaaagacaagaaccgatgttggactcttccaaagtctgcacattatcagaaccacatagcaacgcgttcgttgacttggacggagattgtctcgccggtcagtatgccgttacagtctgcctacccgaggatacgcttctccgtcctctgttctttactttcatccacatggctatagacgttcttaccagacgcatgtctcttttcttgacttcaatctcatgccctgcgtgaatcacagacctcttcctacattgtacagatacctacacaggtgaaaacaccttccaaatctgggtaaatcgacggggaagttttgtgctctctcacgaaggccaattccccaagggttcgggcatggtcacttttgccgatatcggtcggtccattcaatttcttctccctcctttctcttccaatcgttccattctctctttccatcttactaacctccctcggaaatcttttgcactaccatctctaccttctcagatcgagatgggacgctcgacatgatcttccctgtttgcaaatcattctccgcttcaactggaataggccaagattgttctgtcaatgtcgtttacaaccagcagattcctctctgctctaccacctcgaccgtcgtcctggacaaagaaggaaaaagaatatgtagagattcagctgatctttgtgtcgctgatagtggtttcaagtttgagtttgatctctcgactggagtgagctcttttctttatgctttcctcatctacgttgcctcgacctccttgacttgtactgattttcattaccttgattatactctagggaatgacaagcaccccactctccaccctattcccatcaatatcaagcccgaaattggcgctatacgatgtttctcaatcacctgccgttcctcttcccctccgattaggagatatcaacatggatggataccctgatgttctccttcttctctcaccctcgtcaggtcatgttcaggcagagatactggtctcttcaccttgttcagcagcgagatgtcagggaaaagcggtggagaagaaaaggagagattggaaagtagaggaaaaaggaatggcagtcgttcgtgggataacagatgtcacccgagcaagctttctagatctcgacgaagacgtacgttctctcttcttctattcctttcttctggattatccaaaagtctcttaatcctcggccaaaatccacaacagggctccttggacatattaattcagcgctccggcaaacaagacggaacaaggatctcattcattcaaaacaacttttacaacgacgctttcttcctcaagacaagagtcctgacgggcgtatgcgacggagtctgtcaaccttccaaccggtcgtttcaaccgtaccatccatatggagtcgcttattctggagcttccttcaagtttactatattggatactaacggacgaaaggcggtcactcaggtggcccagttgccgcagacagcttacatggcccttcagatgccatacgctctatttggattgggaaggacgaacaattatgtagaggtttgtttccttttcttttctctcatcgccttgctctctgatgaatacaaaagtgaccggttctcacctctctctcacttgattgatacaccgaacagaacctgttcattgggacgacatcccattcttccccgcattggacgtcgatcgaaggagtcatcccaaattcccaagtcgtcatctcccctccgacaagtagtttaaacccagacggttcagaaacaacaggcagatggagttggcagttgtatctccatccgggcgaatacgtgccttgggtgacggcttccaccgttttcgcggctttgatcttggccggtgtcgtcgggtttttgcatcttcgagaaaaggtctgtctctccctttttgttgtcacttcatatggtttttactttgatcatggattgatcatgtccgcgttctcgtactctttattcagagggaagacgagatagaacgtcggagagcattacatcgattgaacgtaggagccatgtaaacgaaaaatcgatgctaaatgtatataccaaatacatctcatgtccatatctatacatgatatatggtacataatacacaaaaagacaaacgcttcatttcttgtattggacctcttgagtcttctcctttgctcgttcggcagcttcggctgttagatcagccgctgtcgaggcagcgttatctttctctccagtttcttccttctgtaagctatctttctgtgtgttttcgtatcaagttttcgttcagattgggagaatcatcaagtcaggaacaaattgctcatagagtcaatctatcaatatcgaagatgaggaaaaaggagaagaaattggactgacaactttctgagatccatctagggcgccaaacagtgtatctccagctttcgcactgatctgtttatcagagagaagagagatcgaggataaaatagacaggactagggtttaataccgggttctttcttttctagattacagaactctcagaaggagcggttgcttacattggcagctgtgtcagaaacaccttgtgcggtccctgcgagtgcgtccgtagttgatttagtccgaacttgaaagtggttgtacgtcttgagctgaactcggcttcgaacagagatggtcgagatgaatgtccttttgatcatgtttatcttttatttgtcttctttgactcttgttaatctttgttctttcttttggctgtcctggttgattgagtttgtgcttgagaaagactgggtaaaatagagaagcaacgacagacggagtatgatttccgaaaagagatcgggcgattgattctccccagatcaagcgttgctgacgtcatgctctagacgtgtttccctcaattttaatagcattctctccatctcttgatccttctgttctctctttcttcaaaggctcaatatgatgttctatttcactctatcttgactagcaccagttcttagccagatggacgtcgatgtcacccgagttttgattatttgttttccataaaattcaagagcaagcgctcattcatcttcgccctctgctacttcgtattcttcttcttcgtcaccgccaatctgaacaagtcccgaggcgactgaacatccgaggagagatccatgtttttgcaagatcaatagaaattagagatatgtcgacgtgacacgctaacagaaaggacaagtataaggagaaagaagagggaggaagggttacttacagacgtaagtgatgaacgtgacgccaacgccggcgaaccaaagccagcgttttcttgtgaacgcggccttcttcttcgactcttcgatctcatctgctggtctttctctaggcgacgttactccgaacaatgcctttcctacccgagggaccgcctcgatcgtccgtttagcatgctcccacgcggaaagcctacccaacgaagcatcccgatggggccataccgttggggactccggcgggaaacaactcgagaggatcctaagcgtgtgagcttgtagatttgggtacgtcgtccggatctggttcgcaatgacagactgcgtgaacggagggagaaggatgagagatagttgggcaaataggtagaggtccaacgtggttggtttggacgaatcaaaaaagtagtcggctgagccaagaaagttggagagcaacccaagggtgagacttgactgttcaagtaaccgttgggttccaaacttgccagctgtagcttctttgcgctcgttggatgctctctcaagtggagggagtactcgttcggtcgacatcacgcctagcggctgagtcttccaacgggaaccagcgggtgagctcaaaggatcgtccgtcgcgcggagcgcccacagtccgacatgttctaatcgggcttggtgcagcgctcgaagtcgttgagggacgtagtgggcttgagggaaaggaagagaattggcgagatggttgaacaaaagatcgtaatctttgtccgagctgtatagagtgaatgcctggaggagccaaaagaggaggacaggttagggtaacagatctagaatttgttgtatccgcactaggaagagacatggcatgacacaagtagaaagagaaaggaaactaagacaaaccgtcaagtcggccagttcactttggattaccgatttccaggcgactagctctgctttttgtgtcttgctcaaatctttgtctatgtcttcacctttgcccagagaggccgatgtactcttttgatcgtaatctccatcccgaggggctggttggggtgtcggcgtggttgaggaaggagacaaggtggaaaggtaggatatgatggatggaagggaagagatcttccgggagccatgttctaggtatggaagctgccctatttgaaagagtaagtgaaggggatcagcgttgtagatcgggccgaatcaaatgtcgagagtccagtgagttcttaccgttcggagaggcgtccggatcgttactctcgctcaacgtccatctaccaagcagagctagttttcatcagaaatacatggttagtatcaatagcgctggttttggttgacgttcaaaacatctgacaaggtaattgagctcacttcgctgcagcagggatgcgacgaacacagtatctgggtcgatcgcaggtagaccccaagcatccggtccggaccaggagtgaactggaggtgtcgagataacaatattacaatatttaataccagactacagcgcaaccttcagcctatgtacgtacgaattaatgggtgggaggtggccattgaaacgagttctctttgcctttttgctctatgctgatgaacaagagaggagagagacgaggaaagtgaatgtgcagggagaggatactctgggtgtaacctggtgatggttacactgcaggtgtcagcccgcccgacacacacatatgcacaaacacgcacacacacactatactaaagacactctaaatctcctagtacatcttgatatcagatgagctatcagatccaagtatgcactcttcccataccatccatctggtatgctctaagagggagatcatgcgcaacagtgctgagtgagttgacttggagatactactcatagaggttacacgcgtctcgacgcgtcagactttcctcgacgcgtctctcttacgcgcccacaaggacaagcgaacatccattcttttctttctctccttctctcatatctctgcaacacacagctctctgttcactgtggataagcatacatccagtctggatacgtcatccatcgattcatatcgtcctgtccttcaagatgtcggtcccagaacctcaggtgtatctcgcggaagggttcgatccagctagcctcaaggtcgctcaactacggtaagacacaaaacaacaaagacagctcatcatatagattctgccgtttctgatctctaaaccgttctatacgctcttttgcgtttcaacaatccttcatccattcacacagatcaatcctgttgcagcacgatcggtcattcccttcttcggtccggaagcaagatctggtcaatgccttccagacatacatactctcacagcggaagagccttctgcacgaggcccagcagcccgtgaagggttcccgtcgggggattatcgatatggagactccatccatcgcctctaccgactctcaacctacagtaagtataaatttccttagatcttggttctatatctcgagaccccatcggattctgatcatatatccttgttttgatagctcggacctgaagccgagccgtccagcccagatctgaaggaagaaacagtcgtgagtatctcttcctctctcctttcacgtgattcatctttgaggtggtgagtgttggttgagactcgaatggcttttgggttttgaatgaattaagaaaaaacgaggacgacctcgaaagtcggtcgccccaactgctccagtatccgacgaagtcgacattgatgacgagcccagaaaagcaacggttagtggtgatttggagccccttccagagagtgctatcaagatcagttatcatccaggctcaacgctaacttgttttggccgtttgttctatctatccgtctgctttctcagcctgcatcaaaaaaccgacgagcttcccggcgatcatctattcttcctgcttcctcaactgttgaagagatcacctcttctcgatcagcttccagaatttctgaccatgtggctgaagatagcgagccagaagatgtcctgcccgctcccaaaccatccgttgcgttcgcgccttatgcggatgaattggaggagagcggattctcagactacaatgctttccagagtggaaattcctcaccagaaggaaaacctagagaaaagaaggtcaggcgcaaggttggtcctttcccactgttcttatccattggttgtctacagggatcaaatactcttaggttgtacgcacgtctagctagctcacatttatatacctccttgttcatcttacgtaatagtcctccctgggtgtatcctctgtcactgcgcctgcgagaagacgaaaatcggaaatgcctcctagctcacggtcgcttgtagaacctacttcgtttgaagaccatcacgtcaaacctgttgctgacgaaatcactctggctgaggtagcccctaaagccacgacgcgaactcgggcgaaagctcgtcagtctcttcctgccaacttggtcgcctctagtttcatgcccactatggataccctccagcgaccggtaaaagaatggagagattcaaacgcacctgttgctactccgagaaagtccagatcaaaggacaagaaggaagaagaagaagaagacacgtacatcatcgaacggaaggaagaagagatcaagacagaggaggaacgtcaaatggagaactcgaacgcaggttttgttgcccagaatcaattgatcgcccggaagttgtcttctataatccccgcctcaccgacgagcccttcttcgtcgacagaactatccgactacaaagctcttgtcaaaaaggaagatagtcctgattcggaattgtcccatcagtcccttgtcaaacgctctccgtcctcctcccttgttggagctcgaccggtgaccacaatgtcctctctcgctgttcttctcacgatggtcgtctacctttttcaatggacatccgagtcctcattaatcggctactgcgatacctcatcgaccaccaaccgcgtgctccaaactcggcatcaagcgatcgccgctgccagggactgtgtccgacgaactatcaccgacggcgacgactttggatctccagaaggctgtgacgcttccgccctaccccttctccctttcgtcccccggccgacggagtgtactccttgcccggcccacgccgtctgtgccgagggcacgattgttgagtgtgataaagagtatctgttgaagtcgtccgggctcgaatcatttggctctgtcttcaacggacttccaggtctaggtagcgtagcatttcccgcgaggtgtgtgccagatactctcaagagacggcacgttggatttttggccagggcgctcgaggcagagttggccaaggagaagggagtgttcttgtgcgagaccggcagggctggcgagggcgaagttctgttgtatgggcacccagagaatgtgttgagggatagattcctgaacagacgagacgtgcgtcgctctgtgttttctcgagaacaactctcttacctgaagaaaatccaagttgtactgatccttttgtcccctccatcactatgtatctacagccctcttttaccccggagcagttcttcgagatcttcgatgctgcgttgagtgatctgttggcgcataatgatgctgtcgcggagactgataccgagtttgtccctcttgtttccttccttgtttgtttgttttttccttatttatttgttgatctaactttcattgtgcttgctcaatctaaagaggaaaccgtcggattggagctgttcgatctgagatgaccttatcgtgtcgggcaaagctaagcgccaaggacaagcttgacgcgtggaagagtcagctcggaggtgagatcttgccgtttcttctttgtcttcctcctgagtttcagcagagaatattttggactgagattcggttgagaatgctatgtaaaggtgcggccgccatgttggccgctatcgcctatgcccggtctcagctaaaaacgtcctctcaagagaaccagcgggtaaaggagctggttcaggttgtgttagccaaactccgagagcaggtccgtcgttcactcttttctggatttactgtcttttcggcctatctctgacgttcattcctcgacgtaaaatacgcacaggagagaatgcattacgtcgatcccgctcaagctccccaagtgacgatccctgttgcccatctgagagatggcatccttgcttccgaaccttccgcggctggtcgacaaagattatgggcgaaggtcgagaaggtcgttgagggcaacgcaaacgtccgggcgggagaggacgaggtcaatggcgaggtttggagggtatggcaatgggtcggattggttagcgccttgccttctaactagcgttcttgtatccttgctctttcttatttcagcacaaaacggggctgatgcgcagggttccgggtcatcgagattgatttgatggttgggatctcatatttcatatgcatacttcgttctataccttttttttcttcttcttttattgttactattgtttcctatttttcgaattcttcttgcccttctcctctttgccaaacgccttcttcttttgtctctctatacgcccttgttcgattattctctcttgttatcttacaccttaatcgcctggcaaccagtggtgtatctgtgtacgatctttcctcgatggctacgcaggccgttatgatggctacaaatgactacgaatgctagatagctcaccagttaccttccttggctgccgatcgagcctcgaattcttcaaatacctttgagtgacttgcccatccttaatcgaaacctaaatcaaatcaacaagttacttaagcactccgatggctagttggacatagaaaagaactgagatggctaactgagcgtggtaagatgcttcataggggagtatttcggccgaaagacgactgtcgaaacagaagacgagaggagcgccttgtaggagaagagtggtgaatggcagagcaagcatgtttctgcatacagctccggctcctctttctcctgtctcttcctcatcctcacccccccctcttcctctcccagatcacctctcactcccgccaagttccttcgaccgacaccaccatgaccagtaccatgatcgcccccgccgtgctttcgctcttcgctcttcgccgagcctctaaccctaaccgtagacacgtctaaccctaaccggccaacccttttgtctcgtttagcttaccttgcaatcatctttgtcctttgcatgcactctcactctcttcctctgcttgctctctgatagatctagatctgcaaaccaacgaacatacaaatacatactcgatggcttcggatagaatcgatcatgtgccggatccgccggtcgctgaagacaggccaaggctcgatcgtgacgccgttgctgtacataccgaggatagtattgataagacgaacgggatgcgtgaactgtgtacggaacaagcaagagggttacggagatcgtgtgccggagatgtggatcgtcaaacaggcagtctatctgaagacagccataagagtcgtgctagctctcaaccaggtgtgttccaattcggatccgttcgagctatatcattctatgtatgtttctgaacgctaaacgtttcatctcttgggtatggaactggcggtctttttcagacgcagcttcagatccggaaccactggttctgcctatgatacccaacttctcgagactccgattgtcgtccaatctatccatcaggagcgattctagcgttaatgaatacggagaaagcgttcggagcttggattcagagattgcgtcggagagcgaactgttgtcagagggtcaaacgatatcaccttactcatcaactacaatttcctatccaagtcggatagaaagtccctttgaaccagtcgacatcgaatcttcgacgacccagaaccgacccgctcctttgacgcttgacctttcctcgctgtctacctcacccaaccgacagcttcacccttctccttcagcacccaatcttcggaatgcttcgactgcgtctctacatccgtctcaaggatgggcagcgccccctccggtgttccattatcctccaggtcgcgccaaacggaatgcaaaaggacttagtgtatctatcgggttgaacatgtccctagccggctcatcaaactcaaatggacttcctccagctacgccaataatggcttccactggatcatctctacctaaacgaaccagaccagctttgttgacttccatcccggctacaccatcctcagtttcacacacccagtctcagtttgaaatgcagcagacacgcttgacaggatctagtaggaagacgcctagcgtgatgggtctcttaccttcctcagaacgcgatccaacagatatgttaggaggaggtatcgattcgggaaagcaaccttatcaagatggcccgatcgagatcatcccaggactattcatcggttgtgaggagaacgttcgagattggaggagtctgactgaacggtggaaagtaggcagagtcgtgaacgttgctaaagagttgaaagacgtcttggatgaggtttcggatgaaggcgctcaaaagacggatgaacatgtgggtgggccggcaaactcatcggatcgacaatcaatcttgccggagcggcctcttcggaggaacacggtttcaacacctaatctgaaagacccaatatcctttagatcggtcacctctcccacgtcaacaaccatttcacagacagccgatggactcacaatcaccgaaaaaacatacgtcctcccgaacaagaagacattggattacctccatcttccgtggagtcacggtcaggccgatcttgtatcaggagcaggattaggtagaggacgaggaggagctggcttgatcagaagtggggactggatagccgaaggcctggcaggaggcgtcggagtactggttcagtgagttcttcctctcctctcttgtttttgataaagtaagtggggaggctgaagagtcgtctgacgcgtgaacaacatctccatgctcattatcagttgtcaatgtggagtatcgaggtcggcgacattggtgattgcagtcattatgcaaatggctgcaaaaggagagatgccacatcttctgggagacatcaggggaatgcacgatgcgtacgagtttgtcaaggagaaaagtccttggataggacccaacgtttcgttcgttctcttgaccttggctctttcgggttctataatctatgtttttatagagatacactcatagactaatcattctaaatacacagactgatctaccagctcttggaatgggaacgatatctggccgcggctacttcccatcttccgcatcgtatgtcttctacattcaatacggagcggggatttgcagatgagtctgtagaatccgaagaggactggtctcgccgtcgggcagcgctcgaggctcaggaggaagctgagcagatggatcgccaaatggaagaacgacaacggattcgagagtcaccgtcaaagcctcgtcctcattcatcatccgggacggatactcagacacaatccgttttagttcaatcgagttctgtttcttctccaaacaacccggatattctcctgacagagcctgtgaaggtcagaaaaagagtcagtcggagtagtatggctagcgtggttatgactgaggaggatgagggtcaggatggactggcgatgggatatgagttgggcgcaaacaacacaccggccttatcgtcgatatcaccatcctcttcttcagatacagacccttctcaattcgagcctcaactttcgccaacatcgccatccccctcctctcttcagcacgctataatcaatgggcctcagtctagtttttctgctagacgaggacttcgaaaaaaatctttcacgttgccgttcttaccatcccttgatactctcccttcatctccagggctgtcaactacattcgagacaacatactcagaactatcggcttcgaccctgagagtaaacaatgagccaatggggctctcatcccaagtgcttccaacacctcttccgtctaatccggatgtttcgatcgtctcaacttcgagccaagtagtcggatcgcattccatagcgccgaaggcgttaaagtcttcttcatcgccgtcatcaacgccagccttggatctatcctctggaaatctacaatcatctgatactccctcttcttcgtcaaaccaactttctaatccggagaccctggctgaatctgatttcaattccaatatcggcaggccttgtcccgttctcttacctattgactcaattgatccactttcttcagcacctttggcctcctcatgttcggatccggaggttgaacctttctctacatttgtcttctctaaaccaaccactacatcaatatcagcaccgtgcatgttatcgtctctttccggaccggatctcacatcgtcatctcccaagactcggtttggagattatcagtcgcctaggcagcgccgggacgctcaccgacgagcgttctcagtcgacatgccgatcatcctcagtccgcttttcacgaacacaacctctacagggacgtcaacgaattccaaacgattgatgaccgaggggtctttttcgattgggaagaccagagaagaaggaaacgaaggaccggacacagtgatatccaccaagatcccccctccttcggaagatagtactcgaatacccatacacaagatctacgctctcagtcagctttcttcaacgtaaaccatgcacaagatatcgtgattttttgaagttcgatacttttgttactcaatcttgagcccgatcaatcgcttttcgctctcaaggacctttactttatcttcctttcattcacttcacatattcggcttccttttttttgtttggtcaaatactatccgtgttcttgtccttccatttgtatcaacaattcttcagcactacttccatcacacatattacataggcctctgtcttcttaggacttttcttttctatctcccccccttataccaggctcgtttacgatctttcaagcttttcattcctattctcccttgtttctgtttatatgaatatatattgaaaaccgcgaacgttcagacattcttcaagccctccccttatcatgtctcgtgttttcaggccagggtcacatggatatgtcagaactacagacgaggcctaatccatctctcgagaaggataggaattcaaaagttcccaaactctgactattctccttcgttcctccactccagttttgtgtgttgttagtatgggtattggtaggcaggaaattagaagaaaccgaactaatacggaagaaggccgagatggaatgtattaagaagaaaagtagaataggcccttttctcgtgccagggccgaaggaataaaccgataatgagaagataagaggatgtaacaagagtagaaacagagtagacaaaactgatgtaatcgaaagagcagattatatgcaaaaaaggaacagagaaccagatgacagagtcgagcaaaagataggttacgaggtagaaagacacaaggaacccaatcatacacaggcgggaccacacaaaaaaaaacgggtgatgacggagatgaaggaagagaagagacgaaagggactaacctgttttgagtcgatgatcacacaatcacaccttcaacacatctcctgtttataacaagagattttccaagcagcggcgagacacacaaagaccaacagaaaacaaaaagggccggggagaacaaaagagcgggattcttgaagtagtagttgagattgattgattgatagagacggatcaacagcaatcgaaataatggcggagaagagatttatccagggttgctgaaagctatgcatacacgagttaaatgctgaatcggtggaagggatcaaacattcagattggctcagaacaagatgactcgaagtgatcaatccgatcgtaaacgtttaagatctttgagaagaagaacaaatgaattcaaggcaaaaccattagtcaattgctgaagtgaagacgaggagaggcaaagcgagagacgaacctcttgaggtatcctcagattcctccttagcaccctcgtcaaattcttctttgtcgccgacctcatcaaaccttcttttccccacctcttcatcttctccctcctctgctaactcatcttcaaattcatcatacccacctggctcagactctatgatcaacaactcgctttctgcgtctgagccctctcgttctaatgcgtctgacagctcatgatcgatgccgtctagatcagtcaccggagtcgtatcggccacgggtgagagcagaggtgaatcggcataaagatcatttagcgctgtgtcggttgtgagtgaatttcgagattctaacacaggtgcggtgggaggctgtaagcgtgttgtagcttcggcaatggcggctccttcaacaaagtcatcagtctcaggctcaactagaaaagaaaaggagagataaataatcagataaacgcttgaaccgagacgaaggttgcgatcaggaaaaagatgataataaagaaattaccaatgatttcaggcacgttcgacaaactttccttctctgcttcctgctcttgaagctcggagtcctcttcttcttcgacctccggcgcatgagcaaacacctcagggataggaatctgttcgactgcatctaccgaacctgtcgccaacgctgcctccatctcaactttcctcgccaaatctttctcagcctccgtctcgtccggtaactctgattcttggtcatgttcctctgcaagagctgtttcatactgcacaacgtcttcagtacctgtctggtcaacggctgcggcttcgtcaacatctccatcagaggtctcgacaacctcggctgaaagaggaacctcgatatccgcattcgcagtaatgataagcttggtgtcctcaacgatcccggattcatctcctgtgccgactccaaccgtagcagtcactattaaacaacgaatgacacaaaggcgaaagaaacaagttcaaagatggtgagtaatttgattacaagaaatatttaaagcagacgtacactcgtcttcctcttctgcgtcattcagcaatgtaggggtggcgaatcgatcattctcagttttgggtgatgagtcgttatggtcatcgaggcgatctgtgttgaacgagacgataataagcttttgtgtgaatctgattctataaggccagaaaactcgagacagagaatgaagacactcaccttcatcatcttgatcgtcttcgtcttcgcctgcacctacgatttcaactttgatcacctcatcttgatcactcgcaagttcgtcttctgaagaagtaagaaacgacagtcagatagttatcttttgttgttgtactcttctgttcgaggatcagtagaacacgtattgcttaccttcaatttcaggatcgggttggagattcacgtctgtctcatctgcgtcaccctcgatttcatcgtgatcaccagataggacaataacgttatcctcatcttcctcaccgtcatcatcttcatgatcttcactattgatctcctcttcgtcctgtgtatacagtatgcggaaaagatatgagtaaccactaccgatcaagatgtggaaaacgtactttagaagaagagtaagctactgaccatctcctgtctgatagcttggatcttctgaaaacgaagcatgaacctaggctgacccgctcgaaggaccagtcgtaacggagggggaagatcacagcactcgtagtgaagcctcgcgagatccgataaggatgtctgagaagcccagacattgtcctaatagagggaggatccgagtatagttcagcacgcgttgatactcatcaagaatagtaaaaagaaaccgatagaaaggagataaagctgacctctccaataacgattcctactttctcgtcctcatgagcaagtaaccactcattgttccctcctccatcatctatactcagcaatctcccatcagtggagaatgcagcctcttctctcaaagcgtcgaataattccagtaaaggagcctcgaacagactcgaattggatgaaagcaggactggtagagcaggcgtgtctagagcctcaattccatcctgatggtcagaagatgaagacgggataggattgaagagggagtagcttttcataaggataggagctgacgagggtgtgctagagcgaggttggtaactaataattgttgggaaaaaggtgctttcagatccgtcctcttcgtcgtcttcttcatcattggggtcatgatcctctatgtcagatgaggcgatctcgtgttcggagtgaaatacgatctgcggagagccataatcctcggggttttcttcgcgatgcaaatcaatagcctcggtcgcttgttcttgttcgtgttcgttgtgggtggtatcttcggttgatttctcaacatcgtctgttgactctgatacgaggaagaggtatggtatgagtaatgttggtaacgtgggtattttactaggacagcgaaccaacctggtttgtgttcagccagcggcagtgaggaagcgtcttgttctgacgatgggagatgaccattgtctgtgggtgtacaagtataagatagtaaaatagccatcaggacagtgacttcaaaagagaacggatgatatggatgggtttcagcatacctaacacagctattttagtaccagacccgtcaggcgaatgcacctcgatggggtctataccatcacccgttggtagagtctcgataggaagagtcaaagcagccggttcatcaccaaccggtgaagattgaggtgctaggcccaatgattgcacaggagtcgtgtcttcgatgacgcttccggtgatggctagggagtctggtttaggcgatgaagccctcgatataaaatcaatctctggtactgtctctacaggttgctcctcttttaggaatcccagcccatcagccacagtctcgctgacttctgtcctatctgccatgggatcgctaaggagatcgtcaagaaactcgtcggcctcttcggtccctatcatatcgatttcttcgacatgttcaccttgatcagagtccaatgggatcatcgtttcctcaggcacatctacagtctcgacagacatgtctacgtctgcctgtggggatgtggagatatccatatgtgtgtagggagcgggcgagatggatagggtgtatgt

SEQ ID NO: 589 - DNA, 12665 bp, Xanthophyllomyces dendrorhous
gatggatagggtgtatgtatgctggataggacgaaagagcttgaagagaaaaagagggaacagtttagaaccgccatctgcatgttcgcttagtcagcagccagtcggctcctcccttatgccgcttgctagctagctcgctgtgttcctccactcgtccactcgttcattccttctatcgaacatcgcctgtgagagagaccatcaaaacgaaacaataggcatggcatctagaacagcatcaaaggcgtttgattatatccagagaggtttctctgtggcactggttgtgctctccgtacgtcttgattcacaccagcttttttgattgtgactttcttggtcgaatgggtctcctctatatccaccaagaggtcagccatgcatcgactgcatctcagttgaactgaattctgtatattatatctggtgcatctaaaacctgaatgtcggatgtgtatagatctctggagccaccgctggatatatgattcacagcgagcggatgtcgattgctggcgaggttcgtttaggtcgttcctttccgtttcttcaattgttgcttggagactgatgctcgagtctcgttgcctcataacgtcggtgcaatcgtctccttcttccttccgtcgatacagtatgaaaaacgcttagcagagtacaacgtcgccctcgctaacgagaaagcggcggacagtgtggccagtgcgcttccgacaacgaacgcgccgacaccgattactccttccccctcttcgtagacatacaattttctctttcactctattaatgacgttcatatcgattgtctgcctgttcatactaagcgcggtgatggtatggtggtctatggagctgaccaggaagtcatgctggagcgattcatcagagaggacaacttgcacagcttttcaaatctctcagttcttccgcacttctgttctctctctcagcattcatcagctagctttaatactgtcctacatcgaacatttctcacaatgagttcccaagctgggtctaattcactgtcagccgaggagcaaaccgcccaagatgctattgccagagcaaaacaggaggaagaacaggctcaactgccttacaaatggacacaagatctcgacacaatcaccatgacgttagatctcccacaaggtactcgggcaagggatttgaatgtcgttctgaaacgagcagagatctcggtgagataacctttgagatgatattcttgtttcggttggaataaatcagagacagctgatattcgttcgtttgcttgccccattcgtcttgatttatacgactcaggctggactgaaggggaaagagtcaacatttgctgtaagccgatcaagcaatcatcagaatcgacctcgatcaaggtgttatactgagtccacatctatcttaatcccagggtaaactctttgcgcccatcaaagaggagggttctacctggacgatctgtatgtctctcgttatggagtctcctccggtttgaccaatcgttctatcgcttatgactgatcaatagactgaaaatcacatcgtcagccgactctgttttgaacgtccatctgacgaaatctcaaacgcaacaatggtggccgcatgtgctcgttcatcatccgaaaatcgacactacaaagctgacgccagaaaactcgaagcttgaggatctcgatggtgagactttggatctcgtttatgtcttttgaatcttacgaatctcttgatcttctcttgggagaagaggaggactacaaattcaaacaagtgccgtcctgattcctcttaaaatgatacgattaattatcaggtgaaacaagaggaatggttgagaagatgatggttcgtctttcatttgtttggttccatctatatgcacaagttctggttctgattgtctaacgatactatggtacattttgtcggagaacagtttgataaccaacaacgcgtaaagctctctctcatctgttctctctctgatcgttactgccttcttatcatcaatttatttctgctatctctatagcaaatgggtaaacctaccagcgacgaaaggaagaaactagaggtaggcctctgctgtttatctcccactccgacgatcatcgtcacacacagccagacgaatccgagattgatgttgtatttccccttattttcgtctcaacaaaccaacgaacgacttgaaaggcactagagaactttaagaaggcgcaccccgagatggacttttctaatgtcaagatgacctgatcgttctttttttcctgacaatctcttcctataagatcatgatgacccttctgcgttcgattgtccagacacggcgttcatcttattcgtgttgaccaagagatctattccatttggttcgagatgctctacaaactgaagttgagaaaagagatgaaaggacgttcttattctcctgttaccaagctcatgagacctacgccccctagcagagctgcgaagttcgcgatccaaaccgagtgatgtcaacgggatgagaaagagagagggagaagtaagcacgatgtcaatcttcgtgttatattcgagactttgtaaatcaacggaccaaatttgagctgaggataatcgttctgtgacaaaaatatcggagaaatagcagaatatctcatcagaacctgtctggccgtgcaaaataattatagaaaggacagtaactcacaactatatgccaaaggaataatgcatcgtcaaaaagttaaaaattaatccatgaaccacctaaagcatctgagataaagttttgttgttttctcacgtactagccgaaaagaaaaagatctaactgttagtgaggggttcaatttgaggtagaaaggatacgactatctcacaaattgttccataacctggaccgatcatgatggtagcccgacgtaacaacaaagacccatcagacatttctatagtggctatgcagaggaaaactaagcttgcactcaccgacgtaaggcaagaatctgaatgaccaaaggatacaatgcgcgattcagtgtcgaatcttccaaacgatgaagatgacacgaagaggaactcgagactgaccccgagacttttcccaggatgttgctcttcttcagccacagagaacccctatagaggacaatatcatctccggggttgctatcacctttggtcagtagtagttggtcgttgggtctaggaagaacgaagaaggcaagaggtacgctgagctcttatcgcgagtgagcgactgagaaaagtcaaggaaacaacaaacatgtcatggacttcgatcactcggtggacaatagggattgattctccagggatgttatacacggtgatctatgtggaaagacagagtaaaaggaatcagctcaataagatccctcctctgtgaagaataactctgaatatggacgcacatctccgatctcgtacttggctggtttggtcaaaaagaggacgtccccacgatagaatgccggctccatagacccgctgtcgatagaaaatgatcagtattggactgaaataaatgtgcttgtatcccaaaacgccttgtgaaaaactcacgagagcacgacgacgacgggtgattccgagtctgtcaacagcgacaaccccttgtacatcatgaggcctatttggaaacacatatgagtatgtatcaaggtcagatcaattctccaatacaagcgaatggatgtagagtatcgagcagtaacccaccggtagcggcaacggaggcgagattgagggcttgggtcaagcactatgtccagataggaatgaacgatgagctgtccaacatttgaagggcaagagcggaatgtgatgaggctactcactcctctaactccaagctttcgcatctttttaagttctgatccaaacatcgtcctactgtgtgtgattgtctatgtgtatgcgttgagaatcccgggagacagacgttgagcaagatgccagacagtgttgagttccaacagatgatgtgttggctgaaatggctggggcgtttgaccataaaaggaaaaagactacaaaacttctgtaatcatgattagagaaatcctgtaatctttttttttctaccagtctacttcttttctcttcctcacaccttctaacgttcggacgctctcacacgcatcattcactcactcgctcttacctggctcatcaggtcctagccatacagatcgaatcatgtcttaccatggaggatacgttccaccgtgggaacttcctagcaatcactataaccagacatctcctccgaatctacagccgccaccacttgtcaacgccgatctccggtgggacgacttcaacgtgagtccggcttgttcattcgatggagcacaagacaaagacgtcgataagcagcccttttacgcgttcttatcctgttattttcgttccatctatttgatctgaatatgatatcatacctttaggccactttatcgatgataaatactatcacggtcgccaacaagatgtcactcatcaagcagcttaactcttcgatgaatctcaacctgaaagcgacccaggcattgaaagcagaactcgtttccaggtaagcctatatattcttagtctcgagcatgatggcctctcgaccatgtgtgcggtggttagcaagaaaaatgcacgcgttcctattcagtcgggataaaccctgactggcaggcctggcacgagcttgtgtggaaacaagacgtgtcttttagtgctttctttgttggaaccaagagattgaatctgccttggccttcttctccgcactactttcttttgtccacaggctacacacatatcttcgaggtatcagagaacgaaatgatatcgcgtcctacattcgattcaaagagatagccagggcttatattccaactcgtaagttccaatatggctttgtctgtcaacctgtatctgtgactgatcttcgggacgtcaataggttggaatactacttctcagtacaagcccattcagcaatatccggtctccgctcaagacgcccatcatcctcaagcaatttctggcgcatccgggatgcctcattccaatagctggacagctagtcgcgctactccctctacgccagctcctcctcctaggagtcagtgatcctctcttcttttgttttcattgtagaccgagtcgtctacggcacctcgactgaacagacttccatcttgagtaaatctacagagccatacaaatggaagaactctcctcttttcactgtgtcaacacctctcacagatatgattctggtcaaaggcgagttggatggcatatatagagtagatcacgtcttgcaaacatgtgtctaatttatctcaatctactcttatcagagtctcaaagttcaaccgaccgggtagctgcaactgccaacttcataattcctgatgatataaggtcgaagatagaatcctccaagttggtcaactttcttggtagatactccaacctttgatttgcgctctgaccatagatcactctcttttaaaactttctcatgaaacagtgccaaccccaatagctcgcccagatactcggtccgactattttgtacttcaagcactcattattcgccatcctatggacaaacagcagccgcttcacaaggccttcctgtagaatttccgttgacctgtgaagtccgggtgaattatgaactcatcggtgccagtctcaaaggtcttaagaagaaacctggttcctgcccaccagcagatctgatgaaaggaaagacggccgtgcatcccttgttgagaatgggatcctcaaatcgactagaactcatacatatcaatccaaatggacctgcatccaaggtgcgctcatcggccattgaattctgtgttgaaaccaatccttgatagtgcatatatctgattttccatgagatgcgttcttcttatcagccgcgatactacatgcaagcttgcctagtcgagaccatcacgtcagacacgcttctccatactgttcaaaagggtcctcgacgacctgttgaaaaagttgaagactttagtaagtccatcagatcttgtggctgctcttcgagttcctcgactgacgatgccctggctttgcctaaagtacgacatatgagcgacgacgcagagattcagatgggagcttcagggttgagtttaaagtgtccggtatgtgacccagttgatatcatttgaatgcgtagctttcttctgacacgccctcccgtcttcaatattttctcaagctttcgtacgtgcgtatgacgacgccaatacgttcagaaacatgtgaccatatccagtgcttcgaggcctcaagctggctacagataaacgagcagactccgctatggagttgcccggtgtgcgagaaaggcttgacgctggactccatgttcatcgatgagtgagtagtgatgtctttcaattctaatgtcgtacaaactgttcatatcgaattgcatgctaatgatgggacatcaaactttctttttaaaatagttataccgattcaatcctcaaggcctgtgattcagatgtggatgaagtgatcattgaacctgatgcagcatggcacacagctgaccggaaacacggaacaccttcgtggttggaggccaaccctgtcaaagcactctcggatgcacctccttctcaccaatcgacgcctatgccttcagaggacaaagcgaaagaggctgagatataccttctaagcagcgatgacgaggacgctgatcatagtactactcattcaaacgacagatcggctactgcacccccttcagcggcacctccagtagctccgaccaaccctggatactcggcgcctacccatccagccacgagtaacacagatccgatagacttaacgttggattcggacgacgaagacgacgaacagcctacacaatcatacacacctcccttgcccgtatctgcaccgttgccgctcttacaacgattgagctcaccattgccatcgttacatccgatagtcaaaactcaggacagcaccgagttgtcatctttagggccgtctttaaagcggaatgctcctgattccgaagaaccgtcgcagccgcctgataaacggacaagagtggatgagaatgggacatcggaaggtacgctctcttgctcatgctttttctttctcaaccgatgtctataaaatttaactctgaactcaaaaagtgcccacgcacttttagatctacagattcgtggtcctgacccaatcgttgaacgtccatcatcggctcgtcgacgtccctcggagcaagcttcatctggcccttctccttttcatagtgttgtttctccggtccccgccccgccggcgtctaccactgcttctgtaccaccagcctatttatcacagccaattcctccttctcaccctcagccgcccgtctccaatcttcctcctgtattccgtcctctacaccctgccccttcatcatcatcatcatcatcatcatctgatcgaccgcgtcaaccacgtccggtccttcctcttatcacatccggtcgaccatccatccaatcacggtatcatccttctcgaccaactcacccctcatcagcccatccctcttggtctgcgaccaagcctacatcttcatcaagttttccgacaacctcgtcgacggatgctagactgccctactgtccacggtcaaattcacatgctgtgccagatgagcgccctcatcatccaattcccagacgaccacatccatattcgttaccgtcggacgagccaggaaaaccaggtgaaagcggaagtggaaacgctcccactcgttcacagccagggatcagcaccttaacagcggattcaaacaagtctcctcctggaccgaatttagattcaggtctaggtggaaatagtcatccatcttattcccacagtcgacttactacgactgccagaccatggttctacccggaaccgactgcaaatgtgattggcgctggctcaggaggaggaggaaatcattactctctaccccagcgtcctcctccgcatgtatctccgtattcatcaccgccgatgaacagaagcgggaatgagaatgggagctcgcatataaatggaaacagaaatgggtataacgataggaacggtgggcatggttggcctggtacatctcatgatatactccgaggcgaaaccgatcgacgatgatacaattctttctcaacatttcttctttcttgtggacgtatccctgctcttcgccttctcttttgctagtattaaccttcatcctcttttctttcttggttcatttatccgggttttctctctatcatcttcgtcttttccacttttttctcctaattttttttccatattttaatcttttctctttcttcccttccaaaatttcatcaacccttttcaacacacaacactgcgtctttctatttgattcaatgtatgcttgattgtgtttgctccaaaaacttcccgtttcttcggatcagagggaaagatcaaaagcgcttctctctttcattatgtattgagtttaaatgtccgacgtataccgacgtcaaggtcgagcttatcgggagactttcactctttcagtaagaattagccgattacacgagcactgtgagcatgtgtccttttgtctatggatgtttgacgaacaatgcaacgggtaaggttaaccgatgaaccataagttgtagcagaataagactccataacatccacaacgaaacacaagctaaacgatcggggaccaaagaccgaaacaagagaaacggttgaaaaggaggagatgaagaatggggaacagggggaaataaaagggaaagatatcaagattgaacataaactcagatcaaagaacgtatttatgctcctccggagtagacctttccgaacatgagctcctgcatcttgtcgtaaagggacaagactccggctccggcaactcctcgaagaatgttggctccagctcccttgaagagagacttgacaccctcagcggcgactgcagacgaggtaaaaaaaaaagaagattagtcataagatcttgaaaaagcgatcactacgctttgacttactgatctgggatccggcatcaatcatagacttgtagtgggtagtagatccagaggtcatcatcattcgtcgtcggatagtatcaagggggtaagaagcgagaccagctccggtggtgactccccaaccgagaaggaaggaggccaagaagttaccctcgaggggaccgacaaggacaacaggcttaagggagtcgtatcctccgaagtagagacctcggtagacaacgattccgacgacggagggaacgaatcctcggtaaagaccggcgataccatcagaggcaagggtcttcttgtagacatcaataagaccgttgaactgtcgggatccacccttaccggcagacttgttatcgttggcaagtcgggttcgggcgtagtcaagggagtagacgaaaaggagggaagaggctccggcggctccaccagaggccaagtctgaagaagagatggcataatcaggtcagcgaggttgcttacaccgcaggaagatctattcgccatcaactcacttccggcgaaccacttccagtaaccctcagactgcttgaatccgaacaaggacttgaagtagtccttgaaggcaaagttgagggcctgggtggggaagtatcggatgacattggcggtgtttcctcgccagaaagcggcaagaccctcatcggcgtaagttcgcctgaagcaatctccaagaccgttgtacttggaggcaagtcgaccctgcttgatcctgttgagttgagtgataaaaaaatatggttcaggaattttgatttaagatggaaaaaggaataggatggattaaatagagggaaaaaacttacatctcatcctggttctggatgaggagcttgattcgctcaatgggggcagcagcggtcttggagacggcctgttggtttgaaaaaaaaagagaacaaaagataagtactttgataaaaagagagatgaggaaaaaagacacttacggcagacactcctcccatgaggaaatcagtggcgaactcctggggcgtcttagctttcttggtggccatcttgaaaaaataaaaaaaggctgatggagtaggcacaatgagagggaaaaaaggacaaagaaaaaatcgagatgggagccaagaaaaaagcacgataaggtcatagttagtccaacatgtcgcttcccagataatattcctccggctcgaccaacaacgagataatcatgatgggaacaccagacggtcaaccaccactacaatcacgacgaaagatctgtactgacaaaagaggatgtgtggtcgaagggaaagagaaaaaaagagaaaaagagaaaaagaaggcgaggcgaaaaaagacccgctagcccaggcaccccagatgaatcgattagggccggtcgagcccggggaatcatttcaaatcgaacgcgacctatacacggaaccccgctacccggttactcccgaaaatacatctgcttaagtaagtcaagtcgttgtgtgcctatgtgcctatgtgcctgttgtatacttgggttcctgggtttctaggtccttgagttcctgagtccttggtcgcgttcgctgacgacaccatcagccttcgcccacactcgtgctcatcagcatgtgtgtctttacgcgtactatcagatacatgttcatacgaccgatcgcatacaaagaactgaaccatagtgatatgcgctggtaaatgtcaaacacgaagagatctctacttttgttttctctagtcttgttctaatacaaaatacaaagtatagaatatacaccatctgaactctaaaatggctggatctatgaaatattcaccagaacgctcgtcaaccttcttcgtcaaagctcaagagtcctttcttctccttgatcttcttttccttcttctttttcttgctcccctcagtgctttcatctgcatgagatttatcttcggcatcctgaccgaccgccatcgccttccgcttatttgtttttggcaccggggggtttgtagatgatgtttttgagccattaggggtttcagatgctgcgttcgatgcgcctaacccagattgtttactagagatggatgccgttttatggattggtggcaaacccttggctgatgagcgcaaaaatcaagcacagaccgaatgtaaggtaatggtcagaatgtgcagcaaactggtttgctctgaagctaaagaagaaagaaacaaacgcaggctcatcaaagcaaagcgcttataaacatagaagttattgggagagagtgtatttgagcgaacctatccgtctatcatcttcaatctcctctctcgacagatgtttaccttccttaaggacgactatttgaggtgcatcatcccctccctcaccccagcccagctcgtcaccctccaactctctctgccgttcctcttcttctctttcctcacttgtctgtctggctccccgttcgggaagagcagctcgctgatttccttcccccagctctagagctgacctggacgaagaatattcgtattccgaggtcgagtctggaggtggcccgccttgaagttgcgcctgaaaagcggccagaaaggatggcgtctttggagcgacgtaagacagacctctgcgaaaagcagcgttctctcgaccagaattattgggcttcgacatcgagcaggaagagcaactgaggatgcgatcaacaaggtggtcgttgtataggtagagcttgatagctggctcgttatgcctagaaatgaaacctatcccgcacgtgacgcgtctgaaattccgtcagcactcacccatcggctcgtcctattcgtcttgcctgtctccgtccaaccccactcagccctttacatcgaatctatcgcacacatcgcaatagtatgtgaacactttgttttgaaggtataattatccgattacagcctaacaacctatctctctttttacctcctcgctatcgtacttcacaaacgcagtggtggctgatacagcattctgtcagtcaagctcttctcattggcattcataaaacagtccttagttgtgtacttacgcacctcgtatgtgcttcttcggcattgctatttcagacgatcttcttggggtcgatccttcttgcactgaaactgaactcaaaaaggcttaccgagcaaaggcaagtcgtcagcttcgagttatgatactcatcctgttcatcatgttaaatattgttcggtgttttacatttgggatatagtctcttcaacaccatcctgataagaaccttggcaagtggaaatatgattctcaatcaaatagctatattcccctgacctatattattatctgcacccacagatgatcctgagggagctcaagctaaatttcaagagattcagcatgcgtatgtgccaatcatgtcttgtttgtaacagctagtctcgatcactcatatcgttcattcaacttcaagcacagttatcaaaccctctcagacccacaagatcgagcagcttatgacaactatggacccagtttcaacgatcgtcgaggaggaggaggaggagga

SEQ ID NO: 590 - DNA, 7241 bp, Xanthophyllomyces dendrorhous
ctttcctcctatctcctatctggtcgctctgtatcgcttacttgtgtcattttcacctcactggaactcgtttctcttccattgccacccttgtaggtccatcggctgaagacttgtttgaatccatgtttggagcaggtggagcaggcaccggccactaccactcgcgcaccaggtcgaagccgactccaaagaagggcaagaacacggtgatcgtgtatgatgtcactttagaagacctatacaatggaaagactgtcactatgaacttaggtgcgtttcatttctattcaatcaggaaaacaatgcaccgctcgctcaatggaaatcaatcgatgcatttttttgcttccttacaattcctcacccgcgaaaaaccaacagagcgacaaggaatttgtggaacatgttctgggtatgcctcttcttgcgctcttcttcatacgcacgacacgttcttatccttctgttgttcttccttgattgacaacagtactggaggaaagagaggagctcgttcaaagacgtgtgtgaaatgtagcggaaaggtgcgcctcatcattttgacttgtgactagataggacgaacgtgtaatctaatgttctcttttttccccttgtgactagggtaaaatcatggttaaccgactggtaaattcatcaatcacagtcaattgtcatcataagtcctggtctgctctagctgaccttgctttgagtaacctggtgttttgaatcagctttccggcgggttgatggctcaatctcaagcgctttgcccggtttgtgacggacagggaacaaagattcgagatgttgatcagtaagcttacagatgattttctttatctcttcaaagtcattttcatacttgagctgataatgcatattaaccgctttcctctaatcttgttgcttttgttctggattaatccaggtgcagaaagtgtaagggagaaaagacaacgaaagagaagaaaaagacaacatggcacattgagaagggaatgatcgacggtcagcgagtcactttgagggaacacggtgatcaatacgttcgttttttctcattttttgttcttgttaattgttgtttaacatcgcttcctcataattacattcgaatcccggctaccaacactaacaaaaactctgtctctcttatcccctttctgtagccgggcgcaccgacaggagatgtagtgtttattttaaaacttcagcctcaccaaaccttgaagcagtcttccgagtatgatctcttggcaacagtcagtatattatcctttgttgcatttcacgtctatgaatcaagcattaacttgctatcatatcctcttcctgaaccttctcaaaggtttctgtcaccttatctgaagcgctcactgggttctctcgtgttgtcttccatcaccttgacggccgaggaatatctgtgacggtgcctcctggccgggtgatcaacaatggtgatagcttcaaggtcgagggggagggtatgccaattgagcgatcagagaggaaaggggatctttggttgaaatttgagttggaaaaaattgatgaagattgggcaaagaatgtggatttggaggtatgtgtcattcgactttcatttctatctctcgagttcaatacgttctcaccgcttgtctctttgcttcaaactcccgtgacttgaaggctcttgctaagcttttgccttctaaacgtcaaaacgtggtcccaaagcctgagattattgatgacgtgactttgaagcttgatgacaacccaccggtgagtttctagatcataactttccgagaccagatggttagattctgtagctgactgttgatgtcatgttaaatcaaatctcggccgggttacgtacgtagcaacctcgagaaccaagaccgcaacagtcccattactatgaagaggaggaagatcaggtttgtcttatatgtcttgacttttcaccccctttgtcggcatacactctaatcgaacgcgagaaactgacgccgacaacttgcacgaattgatctcaacagcaagattattatgatgactcggacgatgacggaggtatgccagctgaatgccagcagcagtgaaattagtagcataactatcaatgaatgtgaatcctgccatcgcagtcaagaatgatagatcgatgtggatgtgaaagatcaaggcacaggaaccttatgatgccctgagaacatgagtcatacgacggttacacaggcacagagttttgtaaccatagtttatccggtcaggccgacgggctttcgcttgccattggtattccacctgttcttccgtccactactccgactggctagttcttttgatcgtcaactggatcttgctccattctgtatcgcgatctcgttggctcaggatggcttctgtaactgagcctatagtacctgtggaagagcactccaagattgttgacgaccatcgtgggatcagcctacaatcgcccacctcaatatccacacctcttctcattcctctgacaatccagactcaagccgacgatccaaggaatctccaagggcatcatcaggaagaactggtatgtttcttatttatcttgtatcttctgctacggctcagtcaagtacaaggtgttgcgtagaagtttgatggagtatgcacatccgagaaagaaggtggatgggatattccaaattcattagagtcctcatccccctcaatcatcatcatcatcatcatttactggcgaggcacttattccctctttttatgtctgtgcttcaaactatcctacagccagaactctcatcttcctcttccacatcctcgccagcttcctctcaaaagctagcatcctcgccagaaccatcatcttcgacatacatctcgaccaccgctccatcactacctccacctcgtaaaaaggccaaacggtcgtccttcgtccaaccatcgtttttctatccatcagatcattcagtcgatcgtgattactttgacaacataccaggatgcgactgggacaccttcgtggactcagaaggcgttcatcgaagatacatgagtcctgaagacgatgaagaggccaagagagggattccggttttcaagcctgatatgaaggtaagtctttactcttctggattttatattgagtctcatgaacccaatcagatcagaatactagtctgcttgaagatcactgacataactcttctttgatcttaggaatttgctgattttgaggtaagactgagaatttgtagaaaatatatgatcaggcagctaatctgataggacacctcgtctcaaaccgacaggcatatatggataggatcgatcactggggccgaaggtcaggtattgtgaaagtgataccgcccaaagaatggtctgtatatcgttcattcatttcacgaagttagatcctaaatctaagtcttaactgctcttgttcttatgctcaacatgtaggatcgacaaacttcctactattccatcggaagccctagccagagtcaagatcaagagtccgattcaacaacacatgaaaggaagagcagggttgtttagggttcagaagtgagtgctttcatcgtactttcgtatctgccatgtgatcaacgtgcattattattgatatttgattttatttaacagtgtggaaaggaagaaaccgttatccgtaaaagagtggtatcagaaatgcgcactacccaactttgcgttcgtcacattttcatccagccgtttttctataaaggaatgtgatgtactcattgttcctgatatcgtacgattcaattgcatagaacaccacttcttaaagagaccgaccgaagtgaacgaccgacgaccagtgtcatgaagcgcagacgcaacaaacaatcaggagatcctgccacagatgaattggcaacaaaaccatcttctatacctattgcatcatccgttgattatccggaaccagcaacactcactaggatggacgaaggtagaactcaacccagttcagggctgatagcggtgtctgcgtctgtcgcatcaaatctgggtccctccgcttcaagtcccacatcaactagcacgcaattaccaacatccaacttaacatcagagccagtacagacacagatcacttctgtggactcagagaacgtagcttccgtcgccgaatcagtgtcgcaaaaagaacaagggtcaaatgtaaacaacgaacctgtcgaagtcgatccgttctacgacactttgttgaacgatcagccatggttgccaagagacagcaagcaggaggacttcacaccagaagtttgcaaggagattgagcggaagttctggagaggacttgggctcggagattcagcttggtacggagctgatttaagaggtgtgttcaacgcatttttccatctctatccaagtcaaggaaatgggagtgctttgcgagcaaaagcatattgatacaactctctttccttttcatgatacaggttcattgtttacagatgagactaaagaatggaacgtggcgcatctgcctaacctgttgaatcggttaaaattgaagaaacagttgcctggtgtgaacacgcctgtgagttgatattcagtcgtcctgatattctcaacaagtcgacaaatacattgttatctttactcatcgagttgcttgtccctatgattgggtcatgtcagtatctttactgggggatgtggagagcttcgttcgcttggcatgtcgaggatatggatctctacagtgtaaactatcgtacgtcaaaagccctcaattcttatgcttctcacaacatacttaaccaaggcgcaagtccttactcatctgccgtgtgtgtgattttcatagttcactttggatctcccaaatgttggtatgctatcccgcaagcacgagccgaggcatttgaaagagtgatgaagggtaatttttcaataccgtgactaacggcagctatgttccagactacgtactgaattctgttgaaacacattttctctgtatcaggttattttcctagcgatcataatggatgcgaccagttccttcgccacaaatccttcactgcttctcctagtcgacttgctttggattcgtgtcaaccaaacgtccttgttcagcatcaacatgaatacgtctttacctatcccaaaggataccatgccggtttcaacatgggattcaattgcgcagagagcatcaactttgcaatggaaagttgggtcgagctaggaaggagggcgaaagtgtgtcaatgtgtatcagataggtatgtgtaacagttgtgtttgacttaatttgtctttgtcgaaaaaggctgaccactacaagtctcgaataaaacccagtgtcaagattgacgtggatgctgtcttggccgaacacgagctgttgacagctattgaggaagaaacacggcggaaagctttagcccgagaagagaaagcccggttgaaagtagaggaagtgaagcgtaaggaggaggaggccaagctaaaggttgaggcagccaaacgaaaggccgaggaacccaaaccacttaagaagagaaaaccgtcctcttccgttcctccttccaccaaggtcgaagatgacaatgagaatggcttaggacctagtccgatgggaactgcctcaaaacagaagcgggtcaaacttcaggagaatccaaagccgaaagcccccgtcgtggcaaaaccaaaggatatagagtacccgtgtattctctgtccgtcgttagacacggatgatttgttgcctgtcggaagtgtgccttccttcatcgctcacaagtcaaaagagagagaaaaggtttggtatgcacatacgtcttgtgcttatacaattccagaggttcatccattctttgatttatatttttcgcttcctgctgccatgtatgtgatactaatttgttccaacacaccttcgtcagacctattttgtggacgtacccaatgacgatatgacggattcgtgtgatcaatcctttacccagattgttcaaggaattgacctcattccaaaggatcgatggtccctagttagttcacatcaaagtcttcatttcagattccaatcactttcatcattgtatcctgacagtgcaactcctggttgaattgcttggtcatcgctagaattgtgctgcctgcacaaaaccgaatcttaagaagatgggcggcaaggttcagtgcacaaaggggaagtgccctcgggcgttccacgtcacgtgcgctctgaatcatccggatacagttcttagagaacaagaagttgttgaatggaccgttcatccacccgatgaatcgcatgtagctgcataccaagcggagactcgaacgaccaggactgagttgttatgctcgactcataatcctgtacgtacaccaatgtctccctactcattgggtttgctctattttcatgctgggagaaagattctttcataatcagattacacgactgataaaccatttcctcgactacctcaggcgacaagagagcgaaagaagctagaagcagctgctaaacttcgagagttaatcctgggcttcatgcctagtcaaatcattcgcgtaaaaggcaaatcgggaaacatatacgcggtttctttcctggcagcctcagaacaagctcaaacggttaccgtccattgggtcgagtaagcttctccctttctttcatcactgagtcaccttgtccatttctgacttctgtattatcctttttctgccttgtctgtgtcggctacgtattagtggtagactgatggacctcccatggtcttcggtattggatccgatagcttctcttcccaagcccaagaaagaacgcgccgccacaatatcaaacgcgtctagatcatctactccggtctctcagcagctcgtgtccagttcatccagaaactcaccaagtttgtcaatgccggcccctccttccaacccagcctggggtagtccgatcgtaattgatgagtctttgtcgaaactccttgagggcaatcccatcatcgcagacgccttccgatgccttggttggtcaactaccaagcccgtgccgcccatttcgaatactccttatggacagatatcgtccgcgatgatgtcacacccatctccagtgcaacaacctattcactcattctctgagttggcttagcccgaacatcagtcccatcaactagcccctcgtctttagggagttctttctaggttgatat

SEQ ID NO: 591 - DNA, 74264 bp, Xanthophyllomyces dendrorhous
  misc_feature (39864)..(39873): n is a, c, g, or t
tttctaggttgatatcgttttatatcttaataatatatatgttcctatccttgtggtatatcgtcttttacttcttcaatatcgatttcagaaggtctatctttgcctcaatctgtgtttaggaaacacgactcctgtcctgcggttagctatcgttctctcttttcttctgtggtgcgtatcacgtccgttcttgttatgtaactcttagggattcttttattgttttttccagttgatttcgcctttcctccatttccactgatggccttttatattcgggtactggttgtgttgttgattttctttcttgttcgtatcagttcgttgtttgcgagtgaatgtcaagatgtttttgctctatcatatagggaacaaaagccgttctagtcattatcgtcacattgatcgtaccgtacatgacgatcatgatagatcgatacatgaataaaagtcgattgtcaaaaggtcctattgaatgtcttttaccagttgttccatacctcgacaggcatgatttctctcatcgctaccaaccagaccgattgctctccaagaatcagtaacaagcttcgacacactcagagaagaaagacaagggacgaaggagaacaagagaaggacatacctttccaagtagccagcgctgcctccgtctgaactacatctagtctcttaccggcaaagcccctcctcaagaggccctgtgaggcagaatctccagtggaaagtctgtaagcagacagatcaacctcactgtccatcaaagttggcaagactttatgacgaagttgtgaatggaggagatcggccgccacatcgatatctcggaacgagattgatggagttgtgaatggtgtacagaagatgacctgccaaggttgtaaaagcaaggaggaagcgatatcatgttagcaacagaggtgataattgcgagagtttccttctttctatctattctgtcttggagtagataacacaaaccatgtttttcaaagcaccatcattggaatcttcactctctcccatgacatctctgaaacctcgacaagtagggaaggcgtcaagtaaggtggaaatgacgaggtccgccgatgttgaattttgaacgcctgcaaagttgaccgatagaacgctttttcaaagcgcgcatccacccacccaaaagaaagaagaagaaaaaaaccaggaaggggagagaaagtagtgagtatctggagtttgaatcgttgacggcaatgtcaagatatcaagtcaaaaaccaacccatctggccggaggatctgtttcaaatcgtcccagaattcctatcggccaccaacatacgtttcaaagttactgaatgccttctcaaatagactacaacgcctgaagacaactggagaaagtggcagatgaactcactaccgtgaataattcaccagcgatccctccacctgtgaatacgtcatgcagcacataatcgtatcctcccttctctcccagatctctcttggcgacggcagccgcacgctgaacaaagacattagcatcctcgatgaagactgcatccgaagaggggagatggaagtatgtccgagcagcatcgtacactgctggatcatactctacaatctattcgctcaggaacgaacgatcgaccaagtttcatgttcagtttggtgctcgaagatttccacgatcgaacatagttgccttaatagtacagacaaactacatacggtggtaaggcagttatgcactatcatagctcttgcggcgattcctgcaccaagaccgctgatgtgataagatgcgaacaaaaggaaagagcaggatgtttcatcagccaagatgaagatggtgagcaagtttgtaaagagttcgatcaggaccaacatgatcaacgctttctccctctccgaggaggaaacagctcgaggaggccggttaatgagtcgaactctattttgttttcccatccgaccgatcagtgaagagagagattcagtatccctcagccatgtcggatgaaacaccgtgcatcgtcggaaggggcaagtttcgcgcttttgaactcacgcttcctgcaagacaaacgccgagaagactgaatctcctatatctcccacaccgattccctcacctaccattcccctctcacctgcaaacctcgccgcttttccgatccatcgaccgcccaagagcgagtggtccgctctgagatacctgtaggtaagatctccgtctatgctctcaccaaccacgatcaaacctgagttggaccggactcgagacaaggttggaaacgaagcgagttgggccggggtggacaaggggatggcgaagatggcgagcgcaaaggagataacgaggagagtttgaatgaagcggcgaagagggtaggacaaagtcaagagagtcaggagtaggaaagcgatgcccttgagctgatccggtaagcgagttgtaaatagagaaaaatagaatatttgagtatgatactcaagtatgacatcgagctggaacttgttgggatgaggaaaagtatcacctggtcaaacaaatcataaactccaagcacgacagccgaagcagagacgagatcaagtttttgaagtcccagatatacgatacaagagagtaccggaatgagtgcacttcgagcaaggctcgagattttatcgagctccgttgaactttgtgttcccaattttttcttgttgataagggagcgcaagagatgattcaacaccgaatatgagcgccgttcgtaaataaggaagttgatgaccacttacaacgtggatcgcagatatcatagctcccagactccacccagccactccaactaatgggcccctgacgggtcctagttgtccgctctgagcaccaacaaacctgacccaccaacttgccgaagcgaacaatcctgctaaaagacttgcaagaccaacatctatcttccctcctaccggaacgccaatggatacgatacacgccacgagagctgctgtagaagtataacgatcaacgagtcgggaaccaaagagcgggtaaaaggcttcaagaagaagtttagagccttgggaggtaaagattaagacgaggatagttgtcagcacagatagagggttcgtctgtttgattttcttgttcgatgcagaagatttgatcggtcgctctttctctggagggcttggagattgctcaaccgacttggctcccttgggactcatatttcttttggatttaggggagggctcgaccatcctgagagatcgatgggatggttatgatggtgaagatcatgagattatcgaatctggacgtgtctcagtttgtgaggtttctctgacgcgtgtttctcttaaagtacgcgcagtcaactctgtgaacaagagcgttcatcaaacgtggcgaagaagaccagatagttttcatcatcattccatcgtccttggtaaagatcttacttcgaattgataacaaaaaaaggacaaaagaaaaagagctacgcgtatagaagattgaaatgacaatgtacactacaccggacgagtgaaagcctctggaggaatttgatcctttgaagcagaacaaagaagaaagagttaacatcacgtcctgagtcttggccagaatgaaacggtctttcactaaaagcaaggtaagcttaccttcaattccataaagtttatccaagccctatcaagatcccatccgttcccatccaggcattgtacagtaaacggaatcgtcaatcctgacttttcagcaaactgggacactcgaatctccttctcagcatcggtctagatggtcaaaagttggaagaaaagaaacggaatgagcgagacgtaggccaagcatatgtatttccaattgaattacgcacgagaaccgtcggtggggcacttcctgcaacaggtccgacacccaatggaacagccaccagcgtcgtccccggctgaacgggaagagaccctcctgagaacattttggatccactatacagcctgacagtgagcatatcggagagaatcacgcagggccaacctgctgcttgagctctgctcatacgtagtccatcaacgaattagctttttacaatactcaccgaacagtgagagaaagaagaaaagacatagaattcagcttacggagaatttgggggagaaggagagaggatgaaagatcgatcgaatgatctcattcccatggacggcactgatcggacaaaaacagcatgatgcacagaacattaaacacaactcaaagctgcgaaaaaaaggagaagtgtatcgtactctcttcaaactctccatgcacattgaccattaacagcggtgtggctccttccctttctatagggaacgaatccacactccacttgtcggcttgatcaatcggatgcttcgtaaacggtactccctcaacaacatccttcccattcttactcttgtccccaacaaatgctttcaagatgtcgtctccaccgacgtgcagtctggtgatccgatccgccagcttggacattcgcataagattccgtgagtgcgcggtataagccttccaggtgagggatttttgatttggtagatgatcgttcaccgtaccatacctcactcgatgaggcacgttggtagagattgtgagagaaaatgtggaagtgggaagatacacaggcgcaagagagatacgcgagttgtcgaacaaaggaaaaaacctaaagaaaagtgaaggtacgagtgaaagtcgatgcgcgtcagaaagcgattacacatgacacaagactgaggtgcgtcaaacgagcttacttggccaaaaaagcattgacgaagtctgcgtcgcccaagataaagttctggttgatgtctagagggaacgacggcactggtcttgaaactgcgtcttgcgaattagaagcggtagtagaggacggaggcagggatggtgcaaccggaacttcgtcggcagtgagatcaaaggtgattgaaaagatgggttcagaatccagcattcttaaaaaggggaagtgtgaagtcataagactattatgttatgatgatgatgatgatgatggtacgcgtcagaataaagacgagttcaagtatggccttgcgccagcaagaggaatgataggaggaagactaacgttcggtatccctcctcgcctctagccgttatctctttgtcccggaagggagtatccacagtgacaagctctcgaaggttatccagtccagacttgaggctgagaatgcttttcacggcttgtagatccctcaaagggtttttgctgatcgacaagtttcggacgctaggtagaaactggcccatatactccagcgactcaagactgttgaggccgttattctcataggagacagtgacgaccttgagaattgatcgaggaataaatacttcatgttcttggaaattttacataggtttatgattggattgaagaaaagactaacaggcggcttcaattcggccgcaagcttccagatgaccttggccatggcggattttgtacccttatggcctggaggaaacacacttcgctccaggaggtaagaatccgtgctcattttctgtgagatcaccagcggtcacgtatacctaacagcgaacgtcagtactctacctcacatacagaagcgagcatgcatgactagagtagagaaggggacttaccgaaaggtcaagcatagctgctccagcattccatctgccggccatccatgtgcgcaggatttcgactgctcctactctgggctttgcacctgccaaagggttggctctatttgatcccttgcctccctttccagcaccgctacccgatccggctctcccacctccgtcggaccgaccatgggctttgtctttatgacttcccgaactacctctgatactatgtcctccaggatcagccatcgttgtgtctgacggtttgttaggaagcgagccctgtaaatggttggcagcaacaggtgtcatacggataggcgggagaaatagtcaccggcgatgagggtcaatcgggcgcatttaggggcaagagaggagaagggagagcaagagattgatcaaggtacaaggaggagggaaggattcgaggtggttgagctaaagaagatatgcatggaagaagtaataaagagtgagtcaagaaaggggaagtcaattatttaccggtgcatgctgtaggtggtttgtgaagagtaccagacgaacccgaaagacgaccaagacaaggagagacagaggtaaagcagaaatgcacatatgattgattagccatcaccagtctcgattgagtccccttatatctggactgatgcccacggaaaagaaagaacgaacgtttctgccgctgacggctcctcgacgaccgcctttgcctcgtccggagggtctcgtaccagaaccagaaccagaaccagaaccaggaccaggaccagagccagaggtcatctccattctggcttcagcaatagacattatgtttctatccgaccaagttgtacgaagactcgactgttgagcctatccaatcagagaaactaggagagggaacggttgatgatggatgatggatgatggatgatggatgggagtatcgttggtggcaaggagaggggaagcgagagtaagcgagagaagaactttctacccagagcttgaatgtaaccaggaccggtggatttgagtaacaatgtagccatggctacagacgcgtggcactcaatatgtcgcgtggcgcgtcaatcgaccgaacgcgtctgagttgatgacgacacgacaaaagagtttcatcattgaactctcaaggtcccttgactccgtgttcttttgtcccggttcgttccaaagatgaatcaataggagtgaatcagggacacaggggaagcaagcaggaacaaagaaatcctacagagaaaacaccagcaacaccaacggcgatggcgacggcaacgataacgacaacgatgacggcagcacgacacaaaaccacgaatgcaggcgggaggcgggaggcggatggagccctccatggtgccgattacattgagtttggctagtaaactaagtattgatgttcccgccctcgttctaaacgtatgctgaccgactgggaaagatgtttgaactcttaccggctatttaaagaccgatctgatgctcgatgatattaacttttaccatggcgtcaaggcagacagactcttgggctgatttctcttccggagtttagttgcatgaatcggaaccttctaatatctgggtccctgtcgtttatcatttcgtccctcgttcatcgcgctgtagcgctgatccttcttcagatgatcctcgtaaattcagccacacctgaatttggttccctgcctgagaaaaatcctccgcgacttgctgtcggctgatcgtcagccaggcgaagagactaaacagatgaaagaaaaaacagctcacatcccacaggaacggaagcggttaggcaggaatcggataacctccacattgatagactgtgtagcagtagttttgctcttttaggtttccttaacagacgcaagaaggtaatcactttgaggtcgttctcttctcctatctttctcttctcacttgttcttttctctttcaaggtcttcgtctgcttactccccatttcatctttttcaactcaaccattccgcctatgccgttttcattgtatctcatggagggcaataaattatccgtgtcgaacccaatagctaatgctgactcaacgtatgctcaggctcacttcgaggcccctgcccaggtctccaaacggactttgtctaaacgatcgatcttgccgagtcccatctcgatgccctccagcattggacagcctgatccgtctttctctcgggcaaaggctgggaccgtcaagccagtttcgatcgattggcaagctggcaggccaccacatcaagagtttcaacaatttgacgttctggaccctcctcggccttctctctcgtcgcataagcttaatcagcttttgacagatccgcctaaaaaaacgttttgcgacacttccgatcgtggcttcatcgtgcccgtcccccgcgctgctacacgagtttcctacgccgattacactggtcttatccgtcttgcaggaacataccgttcgatctccgatggagtctctttcgagggccaggccaacatcgaacacgcattggaaccgggtagacgcaagagccatcactccagacgaggttcctctagatccattctaccagggagcactcggtctgtatactggtcctgagatgttatctctgactaagtgtggctctgtcgatatgaacgacatggtcgaggcaatcgaaaactgtcctacttggcttcctcgagcatcattccgagaccatgttttccctcaaggaagatctgctcaatcagaactatcgtcctctttgtctgtcttttcgttcgcggagaccgcgctcaatcagtatcttcattcacatcgccagccggcggacatggcctccaccgcctttaactccatccccaaaaaacgaaagagagaagggctaggattaccctgcccatacgatcagcacgcaatgaacacggagagtgattctactatcaacgatgctatcaaagtccatgaggacccaccctgggcgacgttcatgaagaaagaagaacattcagatatcaattttatagggggttcgctcggcagatcagcatatctacgtcaaccaaggagaaacggaaagttttgtaaggtctgtcttccgatttcactaccatagattctagaatcctcgcctgccttggctctgcgccgtcaaaacctgggctgatgatccatcttgtttgggtatctagttgtgacacaagacgtgccgctcatggattgaggggtcaaccttgtgaactcctgatgtcaatcctatccttcctctcctaaaaagggaatgcttaatcttctcgacaagtttcaatctaccttgcacaacccacctctttgtattctcctctaggtctcatgcgaccgacactccttcatttaatacgtttgatgtatactctccttttctcatacagactgtgtggcacgtaccttgatctttcggctcactttcttctagtccattgcattccatcatgacgaaccctatcacgttcttctttctgatgaagtatctcatatatccttcccgagaggataatttgggcagcgccttctgagccgcaacgatctcttgattgcgtgcatgttttggtttcgttttgtttttctcttttcttcagattcccccgtatgaaaagtgagtcagcccgtatatatagagaaagttaacaggaacgcatcatgtaatcgatacagataaaaaaacaaatgaagggaaagaatggtaagagaaaaagtagaactcttctctcgttcttgatgatcttgcagaacggaatagatctgaatgtttgaatcatctacttgggagtataaatgatacctgtcctgaaatcgtccgatcagacaagaggaagagacgccaaaagagaaaaggaaacgattcaatatgaggtcacatgagaagagaacgggagcgccgcgaggttcatcgagaagaggtgtacgcactttgggcaggtagatccagatccgacagatggcgcaggctggaatgatccatctgccacggatccctggactacatagtgatacctttacgatcccaaccggtcaatcgaccgacaagatcctttgagcttttgcaacgctcgcccgtgtttcgtccttccttctcctcctgtttgtggtatcgaacccagacagaaaaaaacttaccagagttcgttcaacttttttccttggcagttgatcgtaacgccacctccgtgtttcccctcgagcgcagccgagatctgagcaagcgtgtatgtcttggtcgggctaggtgtaattccagcagcagcaagccaagtgtaagacggaagcgtcttgaacaactatagagggaggatattggaagtaagatttatcacggtcaatgaacgtagtcttcaaaatgaaatgaggaggaaggggttcaggtcgactcacggaaacagccttgttaaagaacgtaatagcgtcttgttgagggtagaacttgagtcgacatggttccagatctcagttaggcatagttataagcgagtggatcaagattcgtcggagacatacattgttgaagcatttaggctgcagagttgagagacacgttctgattgaaaacgacaaacttttcgatcagctacagttgagaattcaggttgtggtagaataagccacctacccatgcttattgaactgccgcaccaatcggaaattcaaggtccagaattcggtcaacagagactacttgccaatgacaccgaagaaggatttatgagggaacagacctcatgctcccagaagctttcatcatcaccctggtaatctttccagtaggtccccatgtatttcaagagatctgtctgttttgccttggtcagaacggcggtgatattgttcaactgtcgagctggatcgcagctctctatgttctcacgtcaaacacacctccgaatgaggacagcgcaagtaaagaaggaggttgaagttggattgtgtcaatcaggtgcgtctaaaagtaatcaggttgacagaaataaatgtacaaacgttcaaaagtgccatcacacttgtccggccagaggccatggacagtccacgaggttgtctagattcagtgtgatcaagccaattcgtgtcaggttgtcgatctgcgcgcgatcaatgacaagagagatacatctagattggaggactcataaagagagatggatgtatacgcacaggtcctgtagcaggagcggtatcccagaactgagtctggacgatatgaccccctggagactcggtacagcatgtgttcgagggtgttccgacagagcaagagaccgggtaagtagctcctgagttgtttgaacagactgtaagaccggtagctctagattccaagggtgaagctccggcagaaatcccgtgaagcgcggagaaaataacgggcgacagggtgatggcggtaagtgtggaggtcttcatcttgttctgtgagagaggaaatcgacggggagatagaagcacgtgttgtttttcataagaatgtagcaaatccctgggaatttatacatctccaaagttcgctctgttctaacagagggacatttttttgtctaccaaagtccatgactcccatcaggtggtcacctcatgttacgttcgtttcggttgattccagacgatggctccgccgatggccggtaatgaacacccgctccctagactctgggtctcgatgaatgtccaacgtgtatgtcaggtcaagagaacaaaggaatcagtaccatgcgtctagaacgtgatcgatagactactatcagctcttttaagatttggcctaatgaccagaatgcgattgttggttctaaggctggcctatcgggtaagaagttagcacgaattgaataggccatgcggagattcataaatgggggctgatgacccatgtgtgagccaaaggaacagaacgaatagatgagtaacgggggattaatgttttattaagctatctcagtaggaacaacagtttattcaaagtttgatcgccgagatttgtaccattcagttgagattgttggaagatgaatgagatattcacgatcgcgtttcatattcgatggcaacaacaacagcagcagtgaagtgcaaatcaggagaaaccccccttctgctctctgcacgtttcctgtgtttctcttcttgcctggtggatctgatttagcacacatcataacccagtcacgatttgataaccaacgttcatcatacaatcaggaagacctgatgaacccaaaaatgacccaatgatctatacaaccaatatttcgcattcgctatcatgcgcagctgcttcaaagagttttgaactgcaaagtcaaaggcaatgctttgcccgctcctttgtaaatatcaactttgtcagttccggaaggaactttgtcggccgagaagacactggatcctccgagggtgagggatccatcggtgctctgcatcgtagaaggacgaatttaacccgattttgaattgcttgttaagatacattcaactcatactcattgaatcgtagacgtacgctgatgaggaactctccaggagtagccacggtggaagcgcaggtgaagagcccgttgctatcaactgcacaaggtcccttagagctggtgattgtgtaggctccaccggtgacgaaaccgagggtgaaggtagcgcaagttccacccttgtaccaggatcctatagagagagagacaagtttgatatcagcgacgaaagacgaaagacgaaagactcagagccggatgttaaagaagcgacagagacgaacccgcagagattacacaagtagaggcagggacagttccgttctgtgcggcatagatgtatcccttacccgaggtggtggtgtttctattaggaagaggggtgctgaggatagtcgtgtacttgggaaggtacttgatgcccgtgctgtgatcggaatgacaagtgaaaaatctcagtcagtactctggaaggcacgcttttgccgcttcatcctgttcatcagcgcggcaatgaaactgacgcagggcagctggaggcgcttccaaccaagggagcagggaccatgttaccgtcgacggcagatccttgggaaacgtagtgatacctatatcaagccgattcaatgaaacaattgagtagttggtcaaaccataagacaggaaccgttctaataaaatgtacataccacaactcgtccaattcgttagcgctcgtacactgaacattgacaccacctccgtgttgggtctcgagtacttgagtaatctcggccaaagtgtaagtcttgtcaaggctgggaacgattccagcggctgccaaccagtcgtaagatggaagagtttggtacacctatgatgcaaccaaaaggattttaagtatcgaacgctgatgtaaatttagggcatcaaacgtgtgtatcatagggagaggagagccagaacggacctggacagctcgcttgaaataatatacggcgtctatttgaggttggtactaagaagaaggctcaaggtcttgttagacacatcgactttaagaacagatgggcgatgatgttcaacagacaaacatacgtttttgaaacacctcggctcaaacccagagatacaggttctgtttgacaaaagtcatgatacttttgagccatcaactgaactatggagggatatgagatattactattacacacccgtgcttgttgtactatttccaagagccgaaggatgaatagtaagttgtcgtcacattagggaaagtggaaaggctgaattcgcgctcttacctcatgctcccagaaagtctcgtcatctccagaaccatccttccagtaagtgtccatgactttcaataattcagtctgaccggcttgcgccaaaacggcggtgatgttggtgagctctcgagacgtatcacaatattctaagcgaaacaacctcagcaggtaagcttgatttgatcccaagtatcgggaggaggcatgtggtacgaacgctcgtaagttccgtcacagttatcgggccaaagtccgtgcactgatcaagttggaagtatttcagcgccaaacacagtcgtacggagagtgaagatctaaaccaagccaacaaatgaaaaaatagatttacaggtccaagagttgttcggtccagtgctcatagatcctgtatcccagaattgagttgataaaagatgacctccgggagtagttgtacagcaagtgtcggtttcgcccgcagcggcagccgagcacgacaaagggaaaaaagatgccggctggtaggaacaggtagtgactccagtggcagccggtgcagcgctagaggaggaagaagtagagggagcaaagacggaggaagaaacgcgagcggaggcagacgaggccgaggaggccaaggacaagatagaactggtcttagaagcagcagagctggaactagagacagagcttggcttggaaacagcagaactagagacagagacagaaacaaaactctagatcgatcatgtcaagaaacatcaataaaacgccgtcaggcaatacaagaggagagaaagagaggaaaagacaaacgggagtagcggagacccgagagagagttgagctcaagatcaaggtagaggttcgactcatctttgatcaaacaaatcatgataggaaccgattggtcagatattcgatgaaaagatgcgcatatgtaacaaagccaaacgcacagaaaccgaactggaacttgaggtcgttccaagatacccaggcgggttacgtcctccgtgcagaagtctgtaccaccagagatcccaagcactccagaaattgttccaccattccccaatactggttgaggacgattctgtcgagcttgatgaagaaggggcagcagaggccacttgagggagaaccacaaggaaggcggccatggccaggatgaccgggatggtggcgaactgtctcatgatcgaaggatgagaatatacaaggaagaatgttacttgatgaaaaaggacaacgagaaagaagtctatcaacctgatggtcaacttaagtgaagtgcgtttatatatcgattagcatcggagggctgaagggtaatcaaacgatccggagagttagtttcacggagtcctccgatgtgagcatgaacgtgaagccatgcatccttcatcacaagaaggtgatggcagtcttatccatcgaatcttccttctcctccgagagatcttgcaaataaataaataaaacattgaggaaaacccagaagaaactcagaacgtttaaccagctgctatcagtaagaatgagttgaacttaaaaacggcaccataaggaggttacgaatgttgatcgataggagggcccatgcggtccaaagaggcaaacgtgctaaaacaatatctggtgtttcattccttgtgcgacaacacctgatagacgcagagaagactttaaacgttccccatgcaaatatttactctccaatcaaaaaagcgaataatcgtggcaatcacagagtgaacgttggtcggatggaggaaggaaaggaatcggaaagatttaagcggatgggatcgacatgaaaccggatatgatctaccgtgattatccgattagtaactttcggtgatcaaattctcttgcttagatttcagcctcggtcatgcgagagagagaagagaaagagaggaaacgccgaaacgctagaagagatttcatcaccatcgatacatggtacaggccatatgatctttccgatcccatcttcatacagatcggccagcagcgcgcgcaaaaaattcaattcggcttgccagtcatcccagcaaatgacccaggaatcccttcatcatccatcttttgcctagctaaatcgcttttgatttcgacctgacccaaacttcccacaccaggaatcacagtgaaagttgtgcggtcgtgtggctgaggctttagctcgcccgaccggaaggcagcttgtcgtttttccaaatcgaatgcccacctgaaagcagtcgaacccagggcgcacgtatcagtataggcagcccacacaataggtcaacgactgatcaatgcaaacacttacatggctgcaccaattcgattcgaaatggagaagaacatgccgatgaatctgtgagagtatggattcgtacatcagtcgatagtactcgttccaggtaaacacatatcgtcatatacgcacggtagagattcaagcaaggccgaggtaaatccaaaagcgtagtaatcatactttcgctcttccacgaatacttcctgttgctctagcgtcatctttttagaagcaaaatactttggtgaggtacgaaaggcacaaagagacgttgatttagccttttctctcaagacaccagaaatggcatcaattcagataggaacggcccgctcggtgacgtacaggggcatgcagataccgagcggttcccagagccttgacaccggaagatatgacgattcctacaaagggaacgaagttcaaggggaaaaggacaactaaaggaagaaggagaaaaggatgggcaacgtcaggctcttttcgtaagggatatttcgactacttcgacatacatttgtgtagtataaatttctagaagagtgggttcaagagtcagcaacgccaacatggatgtccgggaaacaatgagatctaggctcacccctacatatccgaccgcaaactttctcagccaagctttcttgcgagccttggccgccttgtccataggaggcgatacccactcttcaacgtattcgccccagaacgtgtcaggttttccacgagattcaaccgtcttttaggcaaaaataatgagacgttgttcagatgatcgaccgtactttcgaacatataagtgaatgatatgacgaagtttgttcatcacatacttgagaccatgcccttgctcgagcgatactgatgtttttggagagaaagaacctaagaactgtccgggtttcaatccaagtacagatgaagcatacaatcaatatttcggtatacacctagttttcattctttgttggacgtactgtaccagaattgcgacgacagaaggaaaatggttgcgtagagagacagagggacgttgtactatgaacagaaagctcagaatgacatcagcgtttgtgagaccaccgaggcaagcaagaatgaacaagagagggtctcactccaaaaacactggtgtccttgccagcgaacctggtcacaaccttagtgcccatcaagaatttctcgatgaacccttgttgagacctccaactaagaaacacccagaagccacctacgaggagacctctgatcgttccatgtttggtctttgaccagaccgcatgttgcaatcgactatcggtcaacaatcggtatattccaacgactgaataagtgggtgagaacgaaaggcggagagaacgaggatcctcgagaagagtcgtatgggatataggattggtaagtggatgagatggactgatgttggacatgctgatcagatggtgatcggttgaaggcgatgacgattaaaagatggatttatcacatttcgttcgacccagccaggtatttcgttcgatcttccatgagataccgcttggcttcacttcaacatccacctatcgtcctatcatatccatctctgtttcatctctcttctttctttgtgagccagttgttacatggcattggctggtatgcttcagcctgttccggccccgtccggtctgcctgcacggaagagctcgaaccagtccccacctttaaaagctagagagagcgtccggtcggtagataccgttggagatatcctggatatctactacaatcgagtcaatccaacatccgagacatcgcaaaaccctacagacccccagcctcctctagcttcggtcttgaatccggccaagacggtcgtcgatggatcttgtcccttgggccttcctttggatccggccaacgccgtcactcctcctgccgctactccttccaaagtcgaaagaaatttcaaggcagaaactcctgtggtccagaacttggcttgcgaagatgatgtcgaagaacggatcgctacgacaggacattcggatgacaatcctgaagggatttctcagagtctgacgaggactttgttgagtgacgcaagtcgagcaacgagtatgatatccaacggggggagtgtcagaggcaaagacgaaggtaagcgcccgctcgtcctgttctctgcactcttttgactttaatgtctttgcttttatgtgtctgtgaaattctgtcattgacctttcttttgtctggaaccaaccattcactttatagaggaagattcgtttcatgtccgttcgacttacgctaggctggagatatcaggggttgcaggagacgggtatgaggacggggtagaaaggacaagagaacgatccaaattaggcaggaccagtgtctactttccagctaaccatactgaaggtttaagtccagcagaaatggctgtgagaagcaagcttgataggttggacctattcttcttgaactcagatagggctcaccttttgaactcgtactgactcatccttctatctcgatttctatagatatgggttcttctcttcgccgttgtccacacgatcagaatcacgcatattctcgatgacatctatctctctgtccaatccacccacctctatgtctctatcaagaccgcgccggaaaccaaataatacacctcctttacctcagccattatctgatttaggcaaatttcccgaggatctgagtaaagaatcccgtcggatcgacaagtgggagagaatgttggataagaagcagaaagataagggagggaacaccttggcatgggagtgggcaaaaggaaaagaatctaaagttcgttgcgctcaactttgtctttcatcaggatattcgaactattatctcttgtaccgcgagctgactcgacatttttgggcaattacttgtcagatcacaagaagggtctacaaaggaatccccgatcgttggcgcgcggccgcatgggaaacactgatgcgtcacttcgacagctcgggtacgggcggtaaaagaagagctaccgatgaggaactgatatctatatacaaggtcagttgatctgatgttagtagtaggccggtagattacagctaatatttattgtttctttgcttatatccacaatcataggatcgcatagaccgaccgtctccattggatgttcagatcgacttagacgtccctcggacgatcagcggtcacacgctctttcacactcgttacggcatggggtaagcttgcccatcgcatactgactgctccagaatagtttgaactttctcttacaaagctctcttcctatgatatctcttagccaacgagcattgtttcatagtctgcacgcgttttcgttacactgtcccgactgtggatattgtcaaggcatgggctctattgctgccaatctgttatgctattactcagcggatgtgagttttcagccttctttttgtcagctcgttgactctatcaacaatcagctcagttacaattcaagagtccaatgaagctaaaagaagttcttagggccatgtggcggctcagaaaacgtgctgtcacctcattcggctacatgacctttatggaatgcacgatctgttcatgcctggttttccaggcatgcttgaggcattctatgttcaggaaagattggtggaggtcttcctgcctaatgtttttgccgctttggtacgtctgcatatcctcatcacctcctagcttcttctcgttctgtggttgtgccgactgacccggttgtattcgaggcttccacagaaaaaagagatggtgtccacgtcgtcttacgcgacgaaatggtacatcacgttgtttacaactacgttaccgttccatactcagctccgggtatgggatatcttcttccttgaaggaagagatagccttgtgatcgcttcgttaggaatcttgtggtctttcagaggtaagtgtcgagattgcttgaccttcgtttccaacccaatgagcgctgactcgtctttcttatcgaaatcatacatcagaccaacttacttcggccgaagcaagctttgagacgatgctctccctcctttcatccttctttgtcccagacaacgataacgtgtttatggcgttcatccagacgaccatgtccatcagaggaatccgagctcaaatgggtgaatggaggagggagtggaaggatctagaatcgaggggagaggcgatggataaactcttataattaatcatgatctagaacctccccagttctatttgctatcctctgtttctttcatcggttttgtgctgttatgtgtggtccttgtttttcatgcttttttattcgttttgttccttgttgctcatcgtatttgtattttatgtgattcttcaagaaagtaggagatgatttcatgatgaccacaacctaatatacaagcaagctgagcgaggagagaggagtggcatgtccgatatgaagtaacggcaagagtaaataaaactatttaaggatcaaaactgtatacaagaggttgtaaagcaaggctaagaacggtcaggtgtaaaacctgtaaggaaagtgatcttgtgtccgaaacatagatgtgattatcaggagatcgtacagaaacaagaacaagataactagaatggttaaaaggataatgtgtcttttgaggggcgagactgttctttcacatgcgtcttgctagtaaggtagttcatagctgacttggacatccctcgtccttgttcggtatctaatccgccggcagacaagaaaaaaaaacccggtcaattttagttcatgaaagtaagaattccgagatcccagtcagtcatggtcattgagcagggaacaatcaaggcaaaggacagactaggatagcaaaataatcgtcggagaatagtatcaggtacactatcgtcactcgtatcttcctttattgagcgaggtttcgtcgggatcggtggtggaggaatttctaagatgtccggaacggcagatctcagtctagaggcttcaaccaggcttcgacctagctcctctccactctagattctcgggcggagtcagaagaaaaacgccaaagatgactcttaaacgtcagaaccaaagactggaatagtcgaagggttagatttgacatacaactagcggctcttgagaatagatgaactcgtccgcttctgcttcgttcccgactctcccagccagcatgaagcgcagtggagaaatctcttctgtggtctcggcccagaagtcgtccatctctccgttgtctatcacatcctcttcataagacactacagtctttcttctcttggaggtccgcatgacacctgactctggggtagcaatgtcattgctggcaggagcagaagacatggcgggtttagcaagaggagagggcttggagagacgacgacttgagcgggatggaggtttttcaggggatatggatcctgcagatgttgattcattgcgggaagtggaaggtgggatcctgatggatttcctggtcgatagaatgatgacctgagacgaagaatgagtaggagaaagatctgaagatggctgaggtactgccagtgtaggatctatggcaagattctttgtcactccacgcatcacgaagtcagaactcagagaaggtgcacaactaacaactttgtggatatatcagaatttgagaaggatatctttggctcacagaatccattatctcgctcaaaacgacctctaacccttggttctttgccacaacggccattgcgtgaggagggatccaagtcccttgcaggcgggaaatgttttctaatcctggggtgagtttcccaccacatattgcttgatattcagaactctcaatctgatgatccatcatgaatcttttccgttgacctcgaggaatatcgaagactttcatgagttgggactgtggtaagagatgattgagtgagatcagatcatcatttggactgagagaacacaagtgagaatgagtatatacaatgttgtagaatctatagggagtaggcagaaaacctcagggttagtgtaccttgccatggatggtaacaaacctcaacttgctcacccatcagactttcgcctcagaaacggtagtccattcaaagtgaccatccagacgtgctcgttgtttatcacaagactcgataacggtgcggacaatttggatgcagcgagcgcgcttgcctgagggaacactctatacggcatctcgataactgcagatgaatgagcaaggtatcatgtctgaggttagtgagttgtaactgggtaagagacttctcgatcagagtcagcaagaacacgagtaacattctctttctgttgtaaaacatccagttctgataaaaacagatccctcttggcttactttctgcaaagtaactagagggtctagatgagaatcttctgttagatatcgttactctggatcaatcagcttttcgtcgatgttctgttatattgccgagagggaatgttcagtgacgagaagtagcggatatacgttgaggcaaccctaacagaaggtgtgcataaaccagttccgttggacgagttcatcaaacatcaccatcgccatcaccatcaccatcgccatcgccatcgccatcgccatcgccatcgtcaacagcagcatcccagcagaggtagttgtgagatcagaacgcgaagaaggaaaagagaatcatgtttgacgagtgcaagttccaagctgtttgttcctgtgtctttccgcatgcatgctcactcactcgtcacctttccatctacagtcgtagaacactcggccatccctccgtcggatcagccgttcgtctcaccttcggtcgctcgatacgatcaagtctcctatgaagggtttgaacaaagcccgttctcagatgacgacgagcagcgtccgccaggagtcgtggaacctgtctgtattgagctattcgtttcaccgctcgtctagtcgcaaggtctcatttgattcatttggtgtccattcattaatcacatcagatcgaaacaggctacatatccacccaaccaacatcgtcacaacccaatccaatctttactctaggtcatgttcagatcacactgccctccacacttatccaccttcgggtggcttccaacatcctgatcatggctctccatccttttacattaatcattatcgatctcgcccgcccgacagacttaattaccatcgagcttcctgtctcaaagcctaacaagacatcgtcaaatccttctgcaggacaaattacagtagaaaatatttggccagatgacgaaggaagacatcttttagttggatgctcaaatggagaggtctggtatctgtcaaatctgccggtcgtcgcgtctaatagctcaggaccgtccgggaacgcgggtacagccggatcagggactgggtctaccacaaccggttggaagaaacctaaaactcccctcaaatctctcaaatcgcaacggatcatttctgtagcatggtcgtccaatgcacgctcttcatcaaacaatatcgccaaggactgtttgatcggtacccaatctggccagatacattatttatcgctccagccatctgaagacctgttcaagtctcaggagcgcgaatctgctgttgtctattcattctcgagtggagaaaagattgagggagtcagatgggggctatcaaagagtcggaagaagggttgggttgtggccctttgtgatggaaagggttggatattcgagggcgcattgagagaacaagcaagctcaagcagtggaaaatgggcagaggatttccttcgaggattcaaagattctggacccagtatgttgaacattattttgccttcttcctgttgaacacgctaaaactcttcatgtacgcacactgcttactatctggtatctaattcgaagaggagtttcctgcctctcagacattcatcaagagcttgccaacttcatcttctttttcttcgagtcttcagctcatactagctcctccactaactcctacgaacctgtccaacgtacagactctaacttggttttcccgtgggtttctattgctttgtggtaatatatctgcgcgagaacctgatacctctctttcctatgtcgattgatagcaaacggagtgtacactgcatctctcaatccctccttacctctgcttactgcacccgacttgattccattcccgacgacatcgggagagtctgctggaatccctattgggtttgctagtacagattttcattggttgtttttgtggaaggaccgaataggagcagtgtcgaggctgagcggcgcgctcgtttgggaggaaggcgtctttgttgttcgtattaatttatacggcaagatagacatatgtttctcacgtttcccatatctgagatagaccactgactgcatcattcgttcgtctgatgaacgtcttatcttgatattttctgcagaaacccggagaaaagccaattggtctggcttcggatttgaacagcaagacaaattggctgtacacgaccgggtcaattttcgaggtcgttgtcgaagcggaagatagagacgtatggaaaatcaagcttcagcagagcgattttgaatctggattgaagtttgcaacagttcgtccctttgtatcactcagttacctctatcatacaaagccatcggctcgacgaattgataatcatgtttgttttcatctcaatagaccccagcacaaaaaaatgtcatactatccgctcaagcggactcattgtttgaccaaggacgattccatcaagcagctgccaaatatgccgcttgcacaaagagtttcgaagaggtggttcttaaatttgtcgacgctgaagaaagggatgcgcttagatattatctgggatctgttctagacggcttgaaaaaatcagtcagtgttctgtttctttttccccctttaaatattgcgaaaaagaaagttccaaagtcggagctggaattgatcacaaggcatgcgttgtttgctgaaacccgccttggccaataggatttaactcagcgactgatgctcgctacttggcttgtggagatgtatctgagtaaatgcaacactctggaggatggtcagtacctcattgcccctgactaatatcggaagttttacaactcgtgttgaccttcatgattctgtcgatcatagtggtcgcggcggagattgcttcccaagatccggaaagcttgaagcttgaaaaaacgatagtcgaggatgaactgaagcagtttttgctagattatcaagtatgtctttcgtccagttcaattaccactatcgcttgccttgactttcttacgttttgcgcttgccatctgcttaggaagcattcgatcggaaaacgacatacgatctgttccttagtcatggtcgaacggatttgtacattcattttgcgacaatcgtcagggactatgctagggttgtcgagtattggattctagaggaagaatgggtgaaggccatcgaaatgttgaatcgacaggttcagtcctttctatgtttctttatattgagtatttgcaacagggctgattcactaccatcacaacaattgtctgtgtacagaactcaccagagctatattacagattctctgctgtacttatgcataacgctcctaaggaaaccgttgattcttggctccgtcaaagctcactagatcctcagcgacttatccctgccttgttgcagcagcagcatcgtcgacgagatccaatgtcaacaaaccacgcgattcgatacctccaccatgtcatcttcaacaatggaaatgttgatccgacagtccataatctgctagtcactttccactgttcggacgccaatacggatgatggtccgcttcttaggttcctctcaacctgtccggatgatccggtaacggagaggccgtactacgatctagattacgcactgagactttgtatggcacattcgaggatacaaccatgtgtactcatctattccaaaatgggactctacgagagtagtgtagatctggctttggagaagggggatcttgagctagccaaggtaaacgcggacaaagtcctcgaggacgatgttctaaggaagaagctttggctcaagattgccaaatatgttgtgcaggacaagcaggacatcaatgcgtgagtatcccctacttgttcagccgatatacgctagagtaagatatcttatttatcttcgacatcttacattttccccttgacttctactagtgcaatgagattccttgaatcaaccgaccttctcaaaatcgaagatgtcttgcccttcttccctgactttgtcgtcattgatgaattcaaagatgagatttgttctgctctggagagctgtggtgcccgagttcaagccctcaagatggagatggacgaggtcacgcagagtgccgaactcatcaaacgagacatatccaacttgcaacatagatcgttgacggtagaaccggatgagacatgctcgtactgtcaattgctattggtgaccaggccgttctatgtattcccttgtcgacacacgttccatgcggattgtctgatcaaacaggtacgattgtcaaagatctgtgttctcgatcatatcatcctgatatcgcctgacaactcatctttctgcttttgttctgaacactttggaacattcgatagatcaaggaatatgcgccggcaagcacgctccgtcgaattgtccatcttcaatcatctctcgtcaagtcatcagcatcaccctcggccgaactgacctcatcttccaacacactctctttcaacccaggcggcgctagaacgctgctttcttccgcttatgcaggatcttcattgactgctctaaatccgttcgctggagcaggtgataaattgagagagctgatcgtgcctgatgcattggcattcgcgatgggtggcagcggaaacgaaaacggagcatccgggtctagaaaaacccaaggcggaggtgggaaaggaaggaaagacggggagaacgggccgttgggctccggaaaagggcgtcaagaaaaaatcaaagaggaattggatgagttgttggccgggagttgtgtgttgtgtgatgcagctgtcgttcaggttgacgcgccctttgtggctgaaggtgagaaggaggaacacgcgtgggcactttgagcccgtagactttctctctttctcttcgttcagctctctcgatcatttgtcaaagcctctctctcttctcacaggctctgcacaactctctgtgatgaactttctcttttgataccctggaggtccaaattacttttttcaaaactgaacacaccgaaacaagcgcgagaagaagtaggaggagagtcgaacgcatccaataatctaaactatcaatgaagaggactgtggtgtcgctcttttccctttctttcttcgtcttcagtttttatgcatttctttctactcgattcttgtttacatgacgctctcgagcgattaaccctctcgacgtctataggtcagtttccaaagaaacccaaaagagatgggattgaatgggaatagatgagtttgagtatgtcatactagcactcgatcagaacaatatgcggaaaagacgaacctcggtgctgccctgacgatgttgtccactctaaggatcatctccgccgcttcggacgcgctagagacgacctgtcgcttgagcttgtaagattcggtgataccaagctttcgcatcgaaccaatctcgccaaggttcatgtctatttacatacaggtggaagaatggatgagtagccgaaaacgatttctgagtttaataggacgacagggcaattggccaaagatgaagaaatgagaaacgaagaacgtacccaatccggcatcacttcggccctcgtagtgggcggctcgcaatttagaaacgagatcagccgagtcgtatccagcgttatccgccaagatcgtcgggagctgtctgagcgccctagagaaagcctcggtagctatcgccttctttccgctgaccttcctggattcctcctcaacagcgttactcatcaacatctctgagcatcctccaccaagaaccactcgagactccttgacggtttgggaaagaacggagagggcgtcatgaagggatcgctcggcctcgtcgatcatctgggatgtggctcctcgaagaacaacagtacaggcctgaccagcggcgacaccggagaacttgatgagctgttgttcgccacaggtagaagagaataatctagtcagtctctcgttgttacagtcagccatcaccacaatatgacaaagaacttactcggtcctctccgatcataatctcctcgatcaagtcacactttccaatttgaataccattcaacttgtcgaagctactcatgatctctcctccggtgacgagagcaagtcgctcgacaccttcgaaatcggcgtgctcaatcgacatgattcccttctcagccaacagagactcagggtagttgtagatcagctgtcggttgacgaagcaagtgattccgtgcgcggcgattcggtcgaccttctccttcatcttttcctgtgagcggaggaaggggttcaggagttaggctagaaatagctcagatagataaagaaacacattaacacgaaccttctcggctcgttcgagctcggccagtttgccggtcccatcaaccttgaccctggctccaaagatcttgatcttgtcggtatccatcgaggtgttggcaatcatgattcgggcgttttcaattcgcttcggcgagttgacagcgatcgacttttcaaggatgaatcctgttttgcaaaagagatatatgaaacaaatttagttcataggataagtttaatatggaatagacggagtaaaaaagtaaaaaaaaaggaatgaacaaaccctcatcaaggtaggaatccgtgagctttcctccggccttcttgatgatctggatgtggtcaaggtcggtcgatccctactcggccatatggcaagatgaagaagtttgtatcagaacgcattctggcaggcagtggaaatgaaaggggaagatcaaaccttgagtcgaaggacggcatcgacggcaaggttggcaaagtagtccttgttctcagaaagaaccttggacgagagcgttgttcgggcaatgttgacaagatccgttcggaaggcggcagcatccgacctttaggtgtttgcaaggattagaaattagactcgctacactctctcttactgaaaaggttgactagaacagaggaacgaacgagtgatcctgggcagctccctcgagtgcctcgagcgccttcttgctagcgattcggaaaccttcaatgatcgtctggggatggatcttcatgttgacaagtctctctccctctctcagaagctcggaggcgaggacgcacaccgaggtcgttccatctccaacctcatcatcctgaaccttggagatgttgactaggatcttagcagccgggttatcgagcgagatcgatttgagaattgtagctccgtcgttcgtcactgtgatttcacctgtcgtgctggactctatatggcgtggtcgggagtaaaaagacaaagaacgatggttagtcctgtgtttttatttgtgaatcgttgaagagatagtagagccagcagaggagctcacgaagaatcttgttcattccctatgaatgtgtaaatgcaaagaaaaagaagagaaagcatgacaaaggatagcacatagcaatgttaaatcattagtttcggatagcttttgtactctcagcctatggacagtgatcgtccagcctcgcatcagagagacatcatctaagtgtatctctggtcgaccagaaagatgcagaggaagagtttgagaatgagggaagaggagaaaaaacgaacctttggtcccaaagtgctcttgacaagatctccgagagccatggctccgacgaaactgctcaatcgagcgttctctcctcgctcttctccggccttatgtgagaaacaggtgaatggggtgtatatgacatggcgagaaagaacagatcgattcgatatgattcgacgaagtaaaagaaccatacgagttcaaaacaggagaaacaaccgacaggtgtcagcgttgtgtctggacatatatgcggcccaaacggccagctattccaacaacctggaaacaacggcaaagagtaaagaaactgacctcgtctgcgaatacgttcatgatttagatagcaaagaaaacaaagagatgggctgcaaagacaacggtgagggtggatgattcgaggtgccggtcagagaagcaaagcgagtgggattgatggaggagatcccaaaaaccaggcacgtaaccgtcggttacggcatgtaatagtggttacgatcacctccgccgataagattgtgtcctctcatctgagaccttcatctaagactctgagaacatcatcaaccatcacatccaccatgctgccacactccgttcttgttgccttgctggctggaatcacagttcagatagccaagggaaaggatgaccatcttgtgtcctcagactatctttcatccaatcttcacaagcgacactgggacgaccagggaaactatgtgggcttacagtctattttctttcccgtctacggcttccttcgctttcgtggatactgatctctgtccgttcttgtgttttattcgagtctagaacattacattcatccatgtcaatgatgtacatgcccatctggaccaatacagagcctctgggacagactgtccgaccgatggatctgtaccctgcctagggggttacgctagaatcatggacaaaaccagagagatcagatctcaggtccaggacagtctgctcttcaacgcaggggatgaatttcaaggagtgaggagttttttttttgtttgtgtcctgcgctatccatccggtagaactgttctgatagaagaaacatttcttgcctctccaactcgttcagacgctcttctattctttctatggaccccaaaagatcgccgagacgttgaacctgatgaactttacattgggtactcttggtgcgtgccgttcagaaattattctgttctcttgattgagtttcaagcttatttgttattgtcctcttctttcactccaggtaaccatgaatttgataccggaaacgataccctgcttggagaatatttatgtagacactatttagttttttgtttctcgagaatcataactgtacgaccgttctttcagcaagctaaccattctcgttcctttttttacatctcctttcaaacaagccaacctgacctttcccactatatcgaccaacatcaaaactgaaaacactctgcttcgttcccagctaaagccctatcacttgttccctaaacatgagctcgccgttgtcgcgctcacaactgttgatacgcctgatatatccaaaccaggaaagggcacaacgttcggtaaagtactcgaggttcagaaaacggttgatcaacttttgaagaagggtggagtcaaacgggtcgttgctctgactcatatcggttcgttgatgttcatctctcgatgacaaggtagttactttaggctgacacacgctcctcgttcggtcatcaatcataccttttgtgcataaaattgcataggctacgatcaagatattgaactggcgaagaactccaggtatgctcccatccatacaacccagacgtctcctcgttgtggtgctcatattagaaacggttgtcttctctgacgtcaggaatattcatctcatcattggaggtcactcgcatactccgctcggaggagaatcttggtattctcagggcccttatcctactatagttcgaaatctagatggagaagaagtctttatcgttacttcctataggtccgtcaccatcatgcttcttgctctcctcatcgtcaactgatcaatatctgtttcctatctattggccgatgaccccacgtcattcagatggggagaacatttgggtcgaatcgatgttgcgtttgagaaggattctggaaaagttcacgcttacactggaggagctatcaggatgacagaagacttcccgcaaggtaaggccagatattggttactgcgtcatgaagagttttcgtagtgaagtttgcgtctatctttgctttatcactgtttaatctttggaaaaaaaaaattaacataatatgatgttgatagacaagagtcttcaaaaactcattacgtcctggcgggagcctttcgaagaatttgctaaggtcattgttggacaaacagttagagacctcgaccagcctacatgccaggtcaaagaatgtgagtctattctccgatctctgctgctcgttgctaccaaattgacgtctttatacatgtcttggataaccttcgcggaactggcttgaaggcaatttgggaaacgccgtgaccgactccatgctctagttggttttgttttgcttcgctctcgactcgctcgaattttaagatcctgatttgttctactattctttcccctgcttccgtcttacaactacgcgacgcaaacaatagcggccgacgatctttgggagccaaagtcgacgcagcgcttcacaactctggcggacttcgagctactattcctgcacccaacatcactcaaggtattctaatgacgtctttcccgttcaacacccagctagtcgatatcaaatacacaggaaaagaactatgggagatctttgaaggtgtctgcagcggagtaaacagcgtcggcaaggtgtgtcctcggatatttcatgtatgatcttgaagtttcgtgctcgaaaactcatgtgttgaaggtattgggttttggggggagtgactatagacagtgacgtcttccgttcaggtcgctggaataaaatacagttggaatccgaagaatgcgcctggctccaaactgatttctcttcagattggatcgcccgaggtggaagacgtcgattttgaaaagacgtacactattggttcgttctccttccatttattcacctccgagtccctatttgtaccctctttcttaatctctttttctttctcttccttcttggcgcaaacacaaaacagtcactcttgatttcttggcaacaggaggtgattcgattcttcctcggcctttcgagaagtctccgccacctattgcttcccaggatgaggtttttatcgaatacattcgtcggttctctcctttggacgtcgatgttgaaggccgaattgtcgtgacggacgaggaaactccggaacatgagttaggacaattatattggcgagaaaatacagaggtagacgcagaggaggtcacgctgaagcagagtctgaaatccatttgggagagttggtggagggggagtatcaagttcgccaagtgggaatgagagagaacagatccaaagattatattcttgttctctctgttgcatgtgctagcacatcgcgtctcaatgttctttcattctttccctcgtcctgggttgctctgccgagacccttcttgttcaccattccacagcgggttcacaactggttttctatatggatcaccgggtgcgatgaattacacaatcgatatgatagcaaacggatacatgcatatgtaaagctcgactcccgagaacagagagcctcggtttcggaagaagataatagagaatggcagaggacatatgtacaaagccagatgagatagttaagaacgagaaggggaaacagaattaattcttgtagccgtctccgaactccccttttgttcaccgagaagttttgcgcgtttaccaagaggcaaaaaaacaaatagtcagtgtttcggccagtgacagtatcgaggagataagacaaagaaatcgacgaaaagaatctcacatcgataacaatccacacaatcatcctctctctccggtctcggtacaggcagtcccttcttttttcctcctttccctggcttattcgtaccagggtcaggattaccgtcagaggagtttgttggagggtctcctttttcgggaccgtcaccatcatcccagtcaacgttgaggatcctgttgatcacttctccaatcctgttatgtcgtttcaaaggaaggttatgagagagacagattttatcaacaatccactcgtcgttagccgcgcagctctcgtcgccgacatctcaaaacacaaagaggctctggtagaggaaaataaaaaagaaagtaagagcgacaggacacacctatgagtccgaatgtcaaccgaccatcctagtttatttactgtgtcgtagagaattgtttctcctagatggcatctagcttctaatgcgaagcccgctacatagcaagaggagagtttgcctgtgcaggttcccattgggatcggatctaggttgccacaaagatattcgatcgtcagaagtttaaacgcgagggagggaggaaaaagaaaaaagaaaaaaaagcagatagataatggtatgaattcgagattaaggatggtggaggactcaccagctgtatgatagacatgcgttaatgcgccgatctcgcctttcttcaaaggaggcggtaaaggtaagtgcaacctctcggccgccattctatctcctggactctcgtaagctactacgggtgctccgaacgtggtgccaatgagtgaagccaatgcgcctccaagtgagtggcctgtgagccaaatgttggcgtgtggataaaggttcgaaatattattgtataaattcgtcctatatatgtgtgtgcgtgtgtgttatatgaagaaaggacagtagttgagtcaatcgacaacaacagatataaacgagaggagaagaggacagacgcgataggatagtaaactgattcctcgatcaaggccttctcaacacacgtctgttcgcacttccacccaccagcatactgaaacggacagattcagtattcctgatcaggatctctattctaagaacaacagtctctgctgaaatacgactttgatgaatcataactcacgcagtcacatactgggaaccacgtgaaatcaacccgggcgcaacagcacctgatggaacgcagagcatagcttcagaacctactggccttttttatcgttctctgacctgatgtcaaagacagatcaagtgagaacttacgagctaccgattcatatccggatgaacaatcccaaggtgttgtggacatcagcagatgggtgtatatcaaaattgatgtttacacgagaagacttacaacaaaagattatcgttgaatcgatcctacgaccctcagaatgattccatgcaagttcagagaggtcagagaaatcaaccttgactgcaagaacctcaatatgaatctggcacctgtggtatactcacgttcttcgccgtcggtccgcctgaccccaagagtcctgcactcgttcctttgagagagatgataaccgtcgaattatcgtccgacgcaaagatatgacctcgaagtctatccgcatctggttcccagcccaccgggacagactgacaagccatgatcaacagatcatatttatgaaatcagtttcgacgcggatcggttgatacattgaacgttgagcggtataaggatacgcacggtattgtatccatcgataggaaaccattcactatctgaagggagaacatacctaatttgataaaagagccatgtcgtacagaaatcgatatcagcgctcaatacttcactttcgataataaactaaaggaaggtaaaggaagaaaacacttgcgcattcgacgtcatcttcgctagcgagctcagcgtctccctgtccgtcacgtctagttttgagcaagagagaattatgaaacgagtaagcccatcaatcagtctgttcggagatttctctccactcttgttcatcctttaacagatacacataggcggggtttgagacataccgggtccttcgacttctactccttcccactctaagtcttggtctatcctactcgtccttgttttaaatcgagcggcctgatacgtttcctgactctttggtttgtaaacttttaccttcctagttctgactatcaaaggatctctacttgatgttgaagcgaacgaggagggtgaaagagtggtagaaaggagaagagcagaaggatcggttggatggtgggaatgatgtgctcgaagtttaaatgatacatgtggggattgaacgcttgttgctatcggctgattaaacagaggcagatagctcaagattccttgaacaagcgatgaaaccaaaaccatcttgaaggtgagttcgaatagtgctggtagtgttggtgatggtggtggttgttaatctgactggatggacaagcttcgacgggcaaaggcgaaatgatcgtcatcaaccaaagtcacgtgtcgcatcatctttccataaagacatcgtcgagataatatctagtcgagacagatcagatgcagcctggtaggtcgcgcttgtgcgatgatcaatatgatgacaacatccatcatgtgaattcttgggaacttaatgaagaaagattcatgaataaacacgaacagtggaaagagaacgatgataaggatgaaaggagagaaggaacattatggtcgtaagaagaaaaaacaatataagataaatacgaaaataaaacaggtaaatacaatagaaagggaaacgaagtgtgctgtgggatgaatggaagaacatgagaggtcaatagtagcacagaattgatggaaaggaaaatataaacgtatggctatcgataatacagctgagtagtaaacaaaacaggaagatcattgtgggtgaataagtgttgtccaaagaagccaaactggtactcgttgcctgagcggtcaatgaaggtgagggaaatacatgctcaaaaagaagagttgtgaaatagaattcaagccctcagactgattgcggtccacatttcaagacggcctgacgtttcgatctgcatatgatgctcttgtgacttcctgatagtcaaatctgaaggcggaagagacaaagtgatgctattggttcactgtccgatactcttatgtcgggaaagaacctcgactcctgcacaaagcgcagttgtcctgcgcaaatatcgaaaagaaagaaaaagaggtaagacttcagctcgttctgaaatgttgctcattggaaatatgaagatcgaacgaacctggcttcctctgccaaagcatcttcatcctcatcatcgtcgtcgtcgtcatcatcattgtcatcctctccatcctcctcttcgtcttcgctctcgatctcgtcgctaaggcttgagcggacgttcccagctgcaccagtgatcggcatcgcgcccactgctgagtgcttacttcccttctcatcagcaacggtcgacgaagcgtggccttttccagggatggtgattgcctggattttatgcatgtccagggtcgaacccgttcgactgggccttggggtaaatgcaggcgtcgagactttgctctccaggattggtgtcattcgctgtccatccggagtagacgtcgaaggagagggtaacccaacaacctgctgaaggggtgtgtcgagaggggtcgccggagcggaaggtggagagaattcaatatttggagaaggagccaacggatcgatcgaatcctcgattgagctatttgtttgggtggccgctcgttggcgctcttgttcttgctcctctcgctctcgctcgagtcgtcgccgacggacccagcccatacctattgcgtcaaaaaagctggttcaagatctgagtcgtcagaaaaacagaaaagaaagcattataacttaccagatccgtcgtcgtcctcatctcggttgtaattgttattccccatatcgcttcgtccaccccactcgacaaattcagggccttttctggcttcttcgtcaacttttttggcaaggttcattccggcgacgccgtaaatcttcccgttcaacatcctcgatcctgcaaccgacgatcgagggctggtcgataaagtgtttctttctggaagttcgagcacgttggaagaggctcgtcgctgatgatcgaatttactaggtgaggatgtggcggccgaggcagagatcgacctggagagaggttcaccagtgttggatggtgagagactggcgagcaacctagagcttttctctgacaattgggtcgacggctcgtgagatgttcgcctggtcaaattcgacagcgttcgagcaaggtcaagactctttccaccactagaatcagactccatcgaggccgttctcgggacagtgttctttggcttgaacaggtttctcgtccccttccaggaggaaccgaggatgctacttcgacgtctgccgtttccttcgtcatcatcctcatcggtcagaccgctcccgtaggacgatctgacagatcgcttgtagatatcagcatcatcatcagtagatccgtccggctgagataccccgtcgtcctcttcgaatactgggttgtcgtttccgaactcgcctgagaagcgctcagagtcagtatagatggagtccccagtggagagacttcgggaatgccgtgggtttggtagcggagcaaacgagatctttggcttgactgacgatgggaatgaggctgatactttcgaactcgacggggatgatccgaacggctcggaaacggagggagcggtagtattcggactggcttgttggatgtgtacaggttgagatgcgaaagagcttccgtttgaacgtccgggattgaagatctgggtattgaaagatgaatggagctggcgaatgacgatcgggaatgattcttgggtcagcgcgcatacttcgaaggagacataagcatttgtgaagagaaccgagctcggtaaagcaggtcggcaaggaaggatgtgtttggtgaacgattcccgagagagattcccttctgctgtctaacgagacgatcgatagaagaggagatatattcactcacaaggattcctccctttcgaccatgggaagggaccgtccagctattagcaggcgtggccacagacattgacgaacgtaatcagagagagagttgtgctgagatctgagaggaggaggatagggagcaaggagagagatggatgatgatggtggtggcgaggacaataactgcaagcacagggctgaacgtgatgtagagagaccttttgaagggagatgacgagggtagatgattgagaacgtagtctaaaaagaagagatcgcctgtgctggtgcgaggcttaggatgccaaccaagccaagagaatctgaacagatgctgtggtctgggggaggtaatttaatgaacgggggcgatgaaggatgattaggtcgaccccagatatgtgagatctggcttgtcgataagacgaaaagagcaatcaagatgtcagctacacgagatgaaaccacgaaggcaagatggatgggtgctttgatgatctcgagtgttctgaaactcttgatctttgtccgatagactcatcggaccgatagtcgatcttccttccttcctcattccctcactcactcagtcactcgcataaataagaagactcacgttggatgaggtgctttgtgagatgtatgttgtgttctgtgtatgttctgtgtgttcttgtgttctttgtgtatgtatgtgctctgttggcggtgctcagatccataacggccaagcaggaacagggcggaacgagattgacgggtaacgaggcgccccatcaaggaacaaggcagaggaaaggttctctccccgttcctgtttcttctcgaaatctacatgtgcaagcggcgattaagcggtcctgcacgtcaacgcgcgagatcttgcaggtaattctgcataaatatagatagcttagcctggacttccgatcggtggccaatcaagaacaaagtgagcggacaaaatcgggcagtgctttcgagtgcctgccatcagacgcctctgctcgcgcgctctctctatgtctcctatcttctcctttttttttctttttttcttnnnnnnnnnncttctttttgattcttggcgctttgcccgaacggctctacacagacagtcctgctcgaccgcttcgctcgcttatcctcttgacttaatctagttcgatcaccgtgctcgtgtcgttcagtcagctgatcgacgaaacccgcctatttattctttcatttgtacatagatcttgatgaagaatccttttagagagaaacaaaacacccgagttcactcttgtttgtatgaacactgaaaaggaaagcgctaaagaaagagagaaagaaatctcaaggtcgctctgaccaattctatcccgtgtgcttcttgctcgcaacttggacagggtatgatcattaaatgctcagcaagggtatctaatctattcgtttattcattacagattctcgctgtcgccagtgtttagctctcgagtccgactagctttctcctttggacgatcgactcctctctagtatcccaactttggcctcggccgtgcctaataacctgttcaattcgagaaatgcatctgacacattcgagacctgttttcccaagatatcgatcgaatcaaaagccggtttgaatggataaaagagagagaaaaaacaatcgggaagataacagaacgggtacaaaacattagaagacatcgacgcctcatctagaagaataaggaaagttcaagaaaagtaaacactcgcatagtcatcataccgacctaacagatcgatcaatcggttctccaacaaactgatagattccgaactttcttcttgtctaggaacgagctcgcttaatcgaggtaacagtgcatggtgcgctagaataccatacaattttttccacaaatatgtaaacaaccggaagtcgggttcgatgttcgttttggttccgtcagttgatccctgggggttttctttcatggaatgtacgaaaagcaggaaaaggaggggaaaaagaaagacataaacagaaggaacctacaggataaatcaccagcatcgaccacgcctttccgatccagtgcttcaacctcttccagacctctcgagaccgacttaaagtcatcctcgctctccatcagcaatgagatctttgtgtctatcgataggacttttgaatcggctggactcgcgttcaggtttgagagtcggtccagggagaaaggtgggcttagcagatttgcgttttgctcgtcttcgatcatcaattttgtcgtcgatattatcccatcggtccacaagtcatgattatatgaatagaatatttgaggaaaagttcgagtcagatgatacagaatttaacaaccgaactgatagatgtatatgatggagaaagaaaggaacgtacagccatcgacaaatcgttccagactagacgtcccatcgacagctctgtccaatgcatcctgaacatccatcacttttctcatcagacccggtccagtccttccatttgacccattcaaaactctttgatttccgggcgaggaggaagaaccagaaataagatattcgagaagtcgaacccgaagctcgagtgtcgtcagcggagtgatgtcctcagctcgggcttgtccaatctcggacggatgatatataggtgtcgtactatctactgatacagaaccatccgaatacgtggtcatggcttctgttccttttgttttggagttgagatgaagatgtaggcgattactccgggaaactcgggtaatggtggtgatgatgatgatgatgatgacgatggccaggtaagatattggaggccggtgtaatcataaatggaaagcctggaggtgacgcgtgatgaagcgcaaaatgtcaatacgcgtttcatatcgtgtcttgctgtggttgactttcgtcttctggtcttcatggatgcacaaaacgatgcctctcctttctctctctctctgtttctatagtattataggagacgaaagaatgacatgatcacattataaaacacaaatataacctagagatcaaaaaaattgaactcaatgaaggaaaaccaatgaagcaaacaaccaaaaacaaaactgcagagcataaacgacataaaacgatatagaaataactgaagatattgatttaaaaataaataaataaaaaggtcaacattaagacacccaaaagaacacgcatccgatcaaagttcttttttctgtttttccctgatggccttgttgtgagcaacaatgtactttccagattcattttcgatctgcttcttcagttctggtcggtagtcgaaagccaggaacagcacctcaaagaatgtgaagaatggtgcaaggacaagcgctaaggttgggattttcgatcaggaacgatgaacatcatcaacgcatgaaagatcaattgtgggtctcgatgaaagatcaagatcacctaaaaaggcccaatatggaagaaagacaaacctcctacaaggttatcaagcaaagcaggcgctttgccttcaaagatcttatgcgaaacaatctgcgcaaccctacatgatacaatgaaagaacggatgttagtacgttcaacaaggtgggccaagatcccatgttcaaatctcaccaggaagcgacgctgttcgaaagaaagacataaaatcgaatgttagttgatcatgtgagatgctggacttgcaaacaaaactcactgtaggatcagcattggataaagaacctcgggcttgaaggcagctaatccggccgaggttcctcccataagcacgagcaggggtaaatacaacgtctactcaatgcagagatcattccgtttagagagaagcacactcgattagttagttaaggtttcgaaagaggacaactgtgacagatacatacggccgtctgagcatcaagcgcaaagtaataagctgcatagagaattgacacaatggatcctccgctgagatccaatcggaacggtaaggccatcccgatgtgattcattgtgtatggttctagtaggagcggtgagggaaagattctagacatgaaaaacatatatgtccaaaagatcgtaggcacaaagactacactgtgtagcgaacgaggatggatttggaagtgtggtaaatatgtagcaaacgcattatcaaaggcaaaagtgaaagaatacccactgaacggccacgtttcgtttttctgaatagtcaaaagatatcgagtttcgtcagcttctatcgaagcaaagggcacagaaacaggccgacaaacctgaatggtaagccccactgaggataaagaacacgagagggcaaggaggtaagaggtaccggagatcgaacaagataccatcagaacaagattcaaatagagggatgctggttctccaacaagagggagaagaacaagaaaaaaaagaaaagaacttgctagaatcctagttgcttctgaaggttgagaagatccccggacgtcatgtttgatcgagttgatatgagcagagtgtaagaagaggttgtcgtaagagacagaggcgagtaacgatgagcagcgcaatgcggtgtgaagtaacaagctgatgaagagatccagcacctctatgctttatagaatcaacctttgaggagggtggatgtgcaccttaacctcatacggtcatctgtcagctctctccacctccggcccgagagattggtccactgccggaggatgtttcgaaaggtgttctgattacgtaacacaccgcgcacatttcacccgacatggctacgccgtgcctgaacggacacaggaatctactgaaggcctggttacgccccactcgatttgccccaacgcataggatcggcgatatcaggaaaggcgggttcttgatttgatagcaaatttagataacacatttatttgaatgatttcatgaatatttaattggttttcgctccaattttccctcttccccactcttctcgatctcttttctttcgctggcggttcgttatttctcttattccatctctttctcccccttccttctctttccttccttccacccgactcccacgaacgcttgtttctctacaaaggcaggtttcttcctctcctcccctttctctctatccagttttcagccatggccgtcacccagcgtccagtcagtgcctccgatgtgaccgagaagtatgaggctacgaccgatatggagcacacgaacgagaacaccttcatcgttcctggctttactatcaaagagtaggttctctatcttttctgctctctcgatcttcgtatccatttatgatgtcttcaatgctcattgcaaacatgctgatttgacgaacctcctttcgttccttaatttttctctcgcctcaggcttcttggagccattccgtgagtatcggtcgaatcggccctgagtccttcttgttcgatttattcctcgaaaagtggccgccaagactgaacccaccgatcaacctttgctctatacagtgcagagtgcttggagcgatccgccctccactcatctctgtacatgtaagtttcgttcgacttagctttgtcggcagctcgattatctttctgatataatcttgcgttcttaattcttcttggaaccactcagcgttcaggatgtcatactcttggctatctttgcgacttttgctgctcacatcgacactatcgtccaagctgtgtaagtccgcacccatataggcttcttgatgttaccgcatatcttccagcattagcacatgtccttaccatacctctactctagtggtcttccccactacggctctaaagcgctctcattcgctttgtggaacgtttactggatagccgctggacttgccggaactggtatctggattcttggccacgagtgcggtcaccaggccttctccccgtccaagacgatcaacaacactgtcggttgggttcttcactccctggtcggtgttccctaccactcctggcgaatctctcacggtcgacaccacgctgccaccggacaccttactcgagacgaggtgtttgttccccgaacccgaactcagcttggtctccccgcgtttgatcccacacaagagaccttggatggatcaaacattcggaaggaaaagcagcttgagctacgagaggctattggagacgctccgatctttgttgctctgaacttgttggctcagcaggtcagcacatgagcacatccatacttactttcgtttcatgcaaaatctaatttgactttcgttcttccttctttctatagcttatcggttggcccatgtaccttattcgaaacgcctcgggacagaagcactaccccaagttcaccaaccacttctcgcccaactctgtcatttttgataagcgacattacaggcaaatcgtcgtttccgacattggaatggccctctttatcggtgctctgaccatctggacaaaataccgatcgttctccgaggtcgtatcctactacttgattccgtacctttacgtcaaccactggctcgtcgccatcactttcctccagcacaccgacccgttggtccctcattacgacaacgacacctggacgtttgctaaaggagccctaactaccattgaccgaaactgcttgagctgggtcggaccgttcatgcttcacggtatctgtgagactcatgtttcccaccacgtctccagcaagatcccccactaccatgcctggaaggcgaccgatgcgcttaaaaagttcctaggaccccactaccagtaccgagatggaaacatccttgtcgatctctacaagaactacagggactgtgtatttgtcgaggacaacggcgctattagattttacaagaaccgatccggtgtctgcaagatggtctccaagtccagcggaaacacttccgactcgggagtcgatgtttctgaggagtctgtcaagaccaaatagaaaaacactgaatcatgaacaactcccgatcaagagaaattggtcttatgctccctcctcgttccttttatccgcgtgcttcttcgtatatcttgttctcattcgttctttaaatattcatctatcttttatctcttggtctcgatttggtctctcctttttgtctaactttcgtcgcattcctttctcctatgtgctggtccgtttcttaacgctttttcacttataaatgtcatcacggtctccacacgtacacacttgtctgagtttattctttttatagacatggcgaaaacggtgaatttggtcaaaagtacatgaaagtagcctcattttcttgaatatgagaaaatatcggaaaacttagtaggagagaggagtccaacagttctcttgtcggatgcttgctccacaagtgtttcattttagcgcgattctgacatgatctaaacgaaacgagatgtgaacctcacgtgacagatgatggagcatctcatcatcttcacatgcataaagaaagagccattccctatgcacataacgaagagatagaaagagaaaaaacgtttgtttgatagacttgatgaatgggtgaaggaacgaaaaaagaagaaagggaataatagaaccttgaaaagaagcccggaagaaattgttgagaaagtaaaggaactgaaacaaaagaaaagaccaaagacgtttgcaacggtagatgaccggagttctaatcgggggaccggagacaacagaaagatgggttgagtttaaagaggagatgtgtcaagacgggagagcgacaaaagatgagtaaagacaagaagaggagaaaaaaaatggttcaatcgggtcgagtttggacggaactcgatccgaagtgataacgaaagaagaagcttgaatgttctatagattttcttcggaattcccttccttccgaaagcttctttttcttctctcttttacataacaattcgaggctcggtaatgctgctggagatctgttgattggaaggccaaatgtgaaaataaaatatggtcagaacgttcaacgactcaacatgacggttccaaatacacttacactcttgtgaggaaggacggaagctccgttgacgaagagctcatccttgatggtgacgtcgtctccgagaacggtgatgttctcgactcgagtccatcgaccaacaacagagttccatccaataatggagctcatgatccaggagtgctccttcactttagcgttagccatgacgacacatcgctgcagacgaacgccggcgccaatcttgcaacccgggccgataacaacgttggggccaatcaaagcggtggggtcaacctcggccgtagggtcgatgaggacgtttccaccgttgatccacttctccttggggtcggtaaggaggctcgacgactgagcggtcaagtgggagaggtacaagcaagtaccggtaaggtaatccttgggctgtccaacatccatccagaaaccctgaagatcgaaagcgtgaagctggtgctcggcagcgacctcagggaaaatttccttctcaatcgaggtaggcttgagctcaattcgatcgaggaccgaggggttgaagagataaataccggcgttgattcggttgccgacaaactcgacaggcttctcgacgaatcggtcaatcaccgacgagttgggcttctggacgacgactccgtacgcggagggctcggcgaccttggtgaccatgatggttccctctcctccgtgagcaagatggaaatctctgtagatggaaggccacatcaggtcagtatgaaaattcaagacaaactaaatctaaaagaccgttgaccataccggaactcctcgaaggggtacgagcaggtgacatccgagttgaggacgaagaaaggagaatcatccttcttaaggatctcccgggcgagagccaaaggtccggctgtattgattgtgacgaaagttccatcataaaggtaagtttctggagtagttaagacaccgtacatgctaaaggagaaagacagaccagttcccaacggctcactctcgacagagaaagtgattttaataccgtactgagcctcagtttccttgagcatggcaaccatgacctcaggtcggtagttaacagcaagaacaatatccttgacaccggccttgacaagagcctggaggcaagagacaggagaaacgcatcagtctaagatagcggagaacataagtaggatcggagaagcatggagcgagaacgcacctcgatctggtgaagactgtcagggcgatcgattcaagatggaaagggaacaggaaaaaagtaagttttggatcgtttgtgacgcggatcttgctatcggagtatgctgattcttacatcatagccttgttgcagactgtgtacaaaaagtgtagaaaacagtgtcagtgggatgctgatataataggcaagcgagatatgacggatggaaaaactgacactcgaccaagggcttggggagagtgagagtcaaaggtctcaacctggttccgaaacctatcgaaatgggatgagcatagaaaagttagaaaaggatgtttcaagatgcagtgtatagacaaggcaggaagagaccgtgacgaacctccgacaagaattaaagcctaaatgcgacagaacgttcagtcgagagggatcatcgggagggggaaattcaaaacaagaggaaaaaggtggggaaggaaaagagaacccgaggcgacaaggacgaattgcgattgcgattggatcggaagaagccaatatggagatggaccatccagaaaagcaaaaccaggttattattccagaggagtacgagtgtattagagaaggagatacaataaacaaagcgggaagagtattagagatgggagaggtgattgaaaaaaatagaaaaataaaagaaagccggcaagcgagattgaaccaaaacaaacaatgacaagcaacccagtgagcgttgatcttcaaaagcattccagagagtaacaggaacgaaccttcatgatgtaagagagagaagaggagtaaaaggaaaggaaagagaggaagaagagagagtgggtggttggtagatgtcaagaagaaaaagaagagaaagaaggttaaacctgcaaaggggacctacaaaagcgggagggaccgaccgagaccaagcctaccgggtggttacagagatcccgaggtacatccgcagtcaggcacagcagaggtgcccacgttcgccttgtgcctgtatctgtggcgttggtgtgcacgtgaagccttccgtcaagactgtgcaagtcccccccggggctctctctcccttccttcccccgttgcccggcatctctggccgcgtcggcattgagagaaagatctcgctttgatttttctttaccttggtcatcttttttcttttcttttttttctttctgctttctcttctttcttcctctgctggctcttcgttcgcacacacacactcaataaacctctcaaggccctccatctatccatcatgtcctacgcgacaacacttgggcatggccatgaaactatcaggttcagaggcaaagcaaaagagcccaagccagatgcagatggtaactttacaaagcctaagcgatgggtggacaggcacaccactctgatggtcgaccaagtcagaaggtaaattgccttctttttcgttttcgcgcccgtccgtgttgctaatcgctttcttgtcctttttatcgctccgacggtcggtatcagatctgctcagccgccatggattccgtcgctgtcgctcgcgttcaggatattcatcttcataagattcacttcggccatgtacactggaataactgattgcgacgaaggtaagtgtgacgtggtgttcgcgcggaagggagttcatgcatatatgcgcatatactcaatactctatatgcttcgtctagaaagcttcactttcaatcggtattgatctatcatcgttctttcctcttatctgtcttgcctctgttcagtcttcaatttctgggaaccgttgcattacctttcgaaaaataccggatttcagacctgggagctctctccccagtacgccgtcaggtcatgggcctatatcgcttcgttccttcctgccgcagagatcattccatactacatgaaccttggaaaggtcagtcctagttccctcctcctcttattctgggttccttgttttcgacatcggccgttcattccttggctgagcacctaccttggatacatcagcgacaagcatttttctgtgtccgaatcttccaggcgttcttttgcgcttatgttgaggccaggttcttccgagccatcgtccagcacgttaatgaccgggctggacgatactacctgttcaccatgctcttctccgccggcatgtggaatgctgctacaggtacatcttccgtcttggttcttttcttaatttcattctaccaaacactcagctctctcttctcgtttctatcatacagccttcttgccctcgaccaccactctgcataccactctacttgcctattcgttctaccttgagcccaccgcttcgaataacaaccggcgggtttacctagcaaccttcttctttgcttttggcgctctgtttgcctggcctttttccttgttgcttgctttgccgttcgtagcggaagagctgctccttggagggaacgatctggtgtttgccgacggaagagttgaatggctcactggccgaattatcagactcatcaaagctggtcttatagccagtttaattgccgtgagcacttgatcactcgacccgtcactcgttcgtacgccgctgatcaaatctccttttatcctttttcgagaatagatccccattgtactcgtcgattcgtatgcatacggtcgaacgacatttcccgctctcaacatcattctgtacaacatcttttccactactggcggttcccccgacctctacggaacgtctcccgcctcattctacctccggaacttgttcctcaacttcaacttccttctgcctcttgctcttctctcccttcccgttctcgcgatcacccatcggttcgactacaagcggctcggctctaaacagcgaaaaccccaggagggtgagaccagcgcttacgccctcatgttcggcaggctctccggcttttatctttggctaggagtcatgagctggcaggcccacaaggaggaaagatttatgtatccagcttatcctctcctcggtttcaatgctgcagtcacattattcttgctcagaggcttggtcgagagggcatacatcaaggttaccaagagtccctacagggtatggcgcgtttgctcaagtcctcttttaccgagacctcgctcatactcaccctctcttttccttgattccttgctttctctcgattaccttcacaacaggcctcagaaactactctgtttgcgaatttcaccttgttgttcactctgggcacgatgatcatctctgtctcccggatatttgccattcagacatactatgttgcgcctcttcgaactaactaccacctcgaatacaccgagcttcctcttctgctctcgtctctcggacatgttcccatccaacacaacggcacgaacgactgggacgagtgggatcttcgacctatccaagagcttaaccaaggtgccggtctaagattatgctacggaaaggagtggcataggtttacctccagctggctcaccccagacgggatcgaagtcagatgggtaaagagtgaatttgatggagccttgccaaagagatgggagccgagtcaggaagttctcggtggttggtggagaagacagggaaccagggctcagaccgaaggtcttaacgatctcaacaaggaagaactcgtccattacgttagtgttcctctcttactcttccgcccgcccgcgttctacccatgagtagatcagagactaatgtcatgctgttgatcttggatacaggtcgatccatcgacatgcgattactttatggactctaccttccctcttcgaaagacatcctcactcgagccggcgtacacactagacgccgagacttgggaacgactccactgcgcacccttactcgatgccgagaactcgaagaccatccagagagcattctgggccccgggaagttggtggggtgcgaatgatagattggcttggggagaattctgtttgttgggaaggagaaagggcagggacgcgttgagagtcgattgagggggaggttaacgaatcaaagaaaaaggaaaggtaggaacaagaataaaggagtagtagcagagctttgcttaggcgaggcaaaaagaaacaaaacctagaatcattgattcattccaagatggaaaccaacgaatgtgtgttatatgatgtaaacctcctgttctcctcaaacatatgtgatcggcagataaaacaatccattctgatctatttgattttggaacatgaacgacaacacgattgactcaaccgcaatcatatctcttgccgcaaccgaggaagacagaaatcattcctccatagtctcagcttctaaagcctcgaggtcccatcctacatcgtactttgagaactttgtagattctaactctcgtcccagttcgatccacgtttgatccctgttgggacatttacgaagaaaacaggaaagaagaagaaagcggagaaaacatgaagagatcagacgttagatctcggggtgaaagatgaatccagaatgggaaatataaaggggaaaaaaggcagggcgtacaactgagtttgatttatgaacgtgcaaagatcatctaaccaaatcttagagaacacgttgaaatcggcactatcgtccaggattctttcatgattgagccaacatcacgtacatcagtactttgcccgagaagagcaccgaaaggaagcgcgataaaagatggtcagagagagggagaaacacacttcttcattcctagtaagactcttagaacccgtcttcttccaccggacaggacgacttgcacgtcggctctgaccctctcagctaactcccaatgtctatatagtggccaggccaccattctcctcgtccctactcttaacgcttggtgtaccgtttggatagatccgaacgaaacaagggatgtaaagaagggcaggagggaagtcaacgtccatggtgattcgggagaagggtcagactgagtcgttcgggtctcgtaagaggccgagaggaggaaaagaaggactgtcggtaggagtggactagacggaagagatgagtctattcccaaagatttgttagacgtcaaccaggatagatacgataggaaacaagatgaaatgaagggaaagagcgaacaatcggttttcggaagagagaggatcagttccttttcctctgctgagaaatacgtctcgtctgtcaagaatctcggatctgattcatccatcaatggtgctctccaatcaatgatatatctgatctcatcgttatatacaaagtcgcctcttcatacgtgtatattccagcagcaaggatcagcaccagttgaggaaattgagcaagccattgtaggcaaggtaaaagactgactgatattggctagcgtcaaatttctcatcctctgccttcatggacctgctgaaccgctcctcagctgatacgttctcgacatctttgccaagtccgtcgagttcttcaggtagagaacttccatgtttgaacaatccagaataccggtcgttgaacccgtaagggtaaacgggtagaggtgctggcgcagggatgatgtttcccgttgttggtgtttcctttgggattgattgaggaagcctccatgagtttgcctcagctaggtagaaagtacaagcgatcagcgaccatttcagctgctcaatccaaaaccgaaagcaaagatccaaaggatatagaagagagcgacacctaccagctaggaagatctctcgttctttcttgagctctatcagcctttcactttcttctacgctcaacccttccagattaggcatctcaacctctacgatctttgcttcctttgcctttcccttgttcgcagtgtcctgtgagatttctcccttctcgccgacaccaaggagagcctcgatgttctccagcccaaggaacgtctcgcccttgttcactttggatagctgaacagtcaacatcccggacgaagagtcatactcagcagaggcactatcatcctcaagcaccggaccgggaagatgtaaccggagaaagaaaggttctatgtaaagcgatacgtcgttctctgtcgtgtgaatttcaatctcttccggctgaagaataagtagaaaagcaaggaaggagcaatcgaagcatacgtataacaggaaataagcgacggatatggcgcttgtaactctagattttaagacaacagtagctagctcttacagagatatctggacaatggacattggcgatcagaagctcatccgtctgtgagagagtgaaccgaggggtcttcatggtatgtgtgtcgtgagtgtaatgattttcaacgcgaaacccagtcaatttcttttgttgttttcctcaccatctctagagtgtgcatcccatcttgtactctttgacagccacccctggtctcttcatctacagacccgtacacacaaacacacactttcacaacagtcatgtcggatacggaggcctcctaccaggcatctcgtccaacggacagccaggacaatacattggatagcatggacacacctccagaagacacatctctcctgtcaaacgaactgcctccccaaggaacagccgaccactctcgttcatcatcttactcgtcggaacgagaaatcaagccgaatccatcgctcttggatgaacatgaactttcgtcctctcgtgatgctccagaagaagatcattccaacctggccgtatcttcttccaactccctttttgagggagaagttccaaccgagagtaagccgtcagcaggcgaggtcaaagcaccctcacctacaaccaatcaggcttctgctcctacagggaggccggctattagtagtagcaacggcgccgctccagctcgatctagagtgacttcggtcgatactgctaacagagctagaaaggccgaagacaagtcgaaagccggtaccacgatgacggctgctcaaaggcgagcttcggtcgctgtcggttcgactggatccggcgctgtcaagcgagctctcgatagtaagatctttggaggtgagtgttttgtacatgcttgatgcttggttgtgttatgcaaacatacaagatcctcaacttcttctctctgtgtgcatacaggggctacaagatcaacggcaaagacagctgcgactacgagtacgaccaaaactcctgtcctgtcgactgcaagcagcgctgccaccaggccttcagcatcaacatctgctgcagtgcgcagaccgacggtctcttcgactaccaggccagcctcaacggctgccacgactgcaaggaccgcctctgcagcgaccaagcctactacttctgctacctctgctgtcagaaggtgtgtcaatcataaatctaagcctgtcaacgaatcatagatgctaacaatttctcaatcacaccttccaaagaacctctgtgcttccttctaccaccactcggcctatctctagctctgttaccagacccacagctgcttcaagtagtatgactgctaccaaaccttcgagctctctctctccttctccttccctcaatgggacccgtaagactgtgacctcttccactgttccctctgcggctacctccgcccgtcgtcctccctccggctcctctgctcctacttcaacagagaccgctcgcgctcgaccgggtcataccaggcagagcctttctgtttctcatgtcggagcatcccggaccgggctatcaggcaccagccttacctcgagaaacgcaagcggaccgatctcttctagaacagccggcacagctcggtcggccgctaatggcgtttcgtctactggtgcagctaagccagaaggtagaaaagagctggaagcaaagattgctgcattggaagggacagttgctggtctcacgatagatctagagaacgctaaagcgacggtgactgtcagctcagagaacagtgatgctacaaaggacattcaggagcaactggaggcccttaaattggatttggccggaaaggaggatgagttgagaatcaagaaagacagggaagaagaggtcgaaggcaagatcaaggaagcggagagcgagctgcaggagttgagagatgagctcgagagagagaaggcggcgaggagcgccgaggaagacaaagtgaataaggagctgtgagtcttctgtgaaagataactatatgcgggtgagcagtactgaacatgtcataaatgtttgcgcgcgctatactagtgccgaactacactctcttcaattctccctgcaagaaaaattggaggctgcaacatctgctactaactccaacgcggaaggtgctgttgaacatgatctggatgtgttgcgtgagcagattgccgctcagactgaactgatcgaggacctcactcgaacatcggatgatattcgtagtgagaatgaaaaaaataaggctgcacttgaggtatgtgttcctaacctatccttctttcttctggttcatgtacgtgtcccgagaggagacaagatctgaactgagagagtgcgcatgtttgatctttacaggctgcccagcaaaaagtaatcgctgctactgaagcagcggaacaagctcgattagatttagccaaaatcaatcaagagatgcaggtaaatcactctcaactgcctgtcagcaaagctgtatatattgacttggtggctgttttgttactcatgacctcaggccatcaaggaagaaaccctttcactcgaaacatctcaacaggcactagtcgctgaactcgaatccaaaatcgacgttctcacagcagaattggcttctctgaaggataaggcagagagctccgagcaaggtcacaatcaggagctcgagacacttcgacagcagtacgaggaccgaattatatcgtttgaggaacagcgagaacaggacagacaagccttggtcgttgaacatcaagttagtcccgttttggaatgaacttctctctctttctgcccgccattaaacgtctcctgttatggtttgtccggatacgtaggctgttcttgatgatgctttagatgctcagcgatcgacacactctgatgagcttgataaactacgatcgactcatgacgactctcttcagcaagcgatctctgctgcgcaagaccaatctgttaatggtatcatggtcgaatgggaggagaaagaaagccagttgaaggctgaattggaacaggtcttggctaagctcaagaaggagcacaatgaaaaggatgcgttagagcaacgattgcaggaacaaaccgaggtgagtcttgtatctctgtctgtgaagtttcaactctgtctaaaccgagttgtttgattgtacgctttgaaacgggttggagctgcagaaattgacgctgaagcatgcggaggagttagaatctgttcgagctgctcatgcttcggagttgaacaaagccattgaaaatgcaaaggtttgtagatgtctgcacactgttgaccaaagatacaactccattgataatgatgacttcgtcttctctcaaagaacgaggcaaacagtgaacatggccaagagcttcgggcgctaagagtcaaatcggaggagtcaactgctcgacttcagtaagttgctgtcttccatctatagtattcatttcttcctctcttcgttttttcacactagaacgttcataattcttgttggtatgacacaaaacgatagtcaatcccatgaaaaagagattgagtctctcaaaacatctcatgaagatatcgagaattcagttcgagctgctctttctgctgaactctcaagtttgacgtcagatcttactggtgagtacattttcaaacttgataatacatacaatacttcagacgttgacgatagtatatcgaaacgacacagctcaacgagaagatctagccagagccaaggcggacaatggtgttcatttgagtgaactcgaagcacttcgagccgaactcgagtctactcgatctgctctcgacgaagcccgagagaagttaccttcgtccaatgaaccatccagacagcaactagaacagcagatccttgagttgagggacgatctggaatctactcgaacgtctgctcagctgacgaagcagagtctggttgaccagctagacatgctccgagaagaccgtgatagggcaatgacggatgctagccaggcacgaatagctgagattgagcgtatccgaattgaagaaagaaaggagagagagaaaactttggaggagaaggctttgttggaggaagaggtccagaaggaacgtgaagcgaagctcaagggtttgttcgaggaatttcttggttctttgcaagcatttgattaagagatgatttctctaactcgttttttgattcgcttcgtcagctctcgcccaaatttctcagatcaggacgcctcctactagccctgaaaaagctgccgagttcacttctccaatgcgcgatctacacgagtgagtagtgtattccatggcttgatccatgtggaactggctcatttatcaatgttttggctcaaccgttctctttcttcctttcctcctctggtcagagctcatagtaagaagtaagtgtataaagtgttgactaattgaatgactgatcgatcgacttacctacctgatgttctgacgtgttgaatttaattttttgacaaccgtttattctactcagggtatctgatctgcaagcgttagtaacacatccaattgtcatgtttccactgtttcctttagacttttttgacggtaacatccattcttcatatatagcgagattgatgatacaaaggccagacttgatcaagcgaacatgaaggcagaccagctgagggaggatcttgatcgtaagacatccgagacgagtatggtgtatgaagagagaaaggtgagtctctcgccctctgaccactttgatcgttttggagtgggaagaaaatgaaggctgagatgaacgcgctggttgattatttggcagagtttgaaggaggacgttgacggtttgcgggaacagcttgccaaggtgacggacgatcttcaccgtgctttggttgaaaactcggaagaattctgagagcatcctgttgttcaaagcattgtttgatgctcgctcctctcgacatctttctgtgactgtgcttgcgatctgttttcgttctgtcttttttcgtttctcatcttctcagtccattctctctcgccacaaccctccttgttcttttgtcttgtccaggatgtatattccgttaggcataccttttgatttaccggcacaaagaattataaacaagactgttttctcttgctctttttcatatgtccgttgttgataccgttaaagatgcggggctttttgtgtgttacgtaacgcgtttctcgatcattcaacaagagacgatcagacttgagcagcagcagcaacagcaaacaaacttgtttctactccatacgtccatcaagcgagcaggtagacacggttttgactctatcgcccatacgctgacttccattcaatcaaccttgacgtccagctactgcccttcacctgaccaagccttgaaatttgaagacttgaatcccaaagatggctggtacgtgaagtagtccgcgtcattagattagccgacatccaacgcaactttcttcttttcttcctatcctctcgtgttttcttgttctcctttcttcttgcttctgtttagcgtgtctccgtggtattgattctgttctgctgtctttttgtttgttctttgttcatgttggacttgactcgcctatagctatctacactgtgttcacgtcgccttaccatgctccgataccggaccatttgcctactcttgtcgtcactccccacggttcgtccgtttcaacgttatcaagagtactcgtctcactcatcttggacataaggacatgaaagagaagattcttgtatctctttggattgatgctttgtcaaggccaggaaacgatgaagagagtagagcgcgagagtggagcacagggactcaaccgttgtgccgtgttgagtcgcgtgatgttttgttggcttcttgttgtccttcttctttgatcttttcatttggattcacatacgctttgaagtagaaatcggtcggtataacaagagtttcgttgactgataattgggtttttcaaactttctctctgtgtgtgtatggattgtcgtaggtcaacctagccatgtgctctactcgtacctacataccgattacgtatgtttggtccgctttccttgtggcctctacatggatgttcaaatgctaacagtgtactcccttgactcgactctttttctgacacagaacaaggtcaactacctcttgacgccttcaccccaaggcgatctctgcgtagccaagctcttccctccttcggccgcactccgagcagcctccgacctcggccatggtggtccgccttcgaacagggctgttcggtgtgaagcctcgagagagctcaaatggtcgatcgagaatacaggagtcagatctccgatttacaagattgtcaattcggacgaaaccccactctaccagattagcaagccgaacccgaatgcagatttctggacaatgttctatttcgcgtacgctgggcatcagattcctccaaaaagagccgaggtaagcttctctgttctctgtcttccttatgttgtcctaagctgatttgcttgtttctgttggacaaccttgttgggcacggacgaaattagttcggaaagattcaaaagaacccagccgagaaaggaggaggaaccagaatcactattaccggtaaaacagaagaggagaagaaagtttggcaaacactaggcgaagggaacgaagattgtgttgaatgggtgatttgttgtgcggtattaaacctgcttgagtatgttctatttccttccttttaggatggtatcttctttcgtacgagtttactgatcatcttgaattttgtgacccttcaccaaacgtatcgtctcgagcagtgatgagatcttgaaagccgctgagaaatcagtccctcggtccgcggtctctccaactcccgctgccatatcccctgcgtcatcctctggtccttccgctgcttcttcagcttcccgaccgagacctcctcaacagatgcatcagcctcctcctcgtccaggtcaaactccaccggcgccttctcctcggctggcgaacgctcagccaaaacagctaagagaccaagggccagtgccttcacctaatgcttacccgtctcagcaacaacagagagcagccggtagtaatcctgatcctagatacgacccaaggtatcagcagcagagggggcatgacccgagatatgacaatcaatcacctgcttccagtaaccctagacagggatatcctcagcagtacgcgcaacctccacagcagaatcggggaaagttttaacaggttgaagggaatgtttctgaagagcgagaggatgaagttgaaagtctttatgtttctttttctctctttttatgcccgacatagaaaaaattgtactaggagtttctcttctactcgctccttttctacggcttcatttattcattcatacatgaaatatgttcatcctagctcctattagttcaagctgttctttataaatcaatctactcctagataatctcagtggacttcccgtctccttcctaaatttccctcctttctttttctttttatatatatttcacttcgattcttcaccccttactttgttcgtctcttcctctgctcttgtcttgcttcatcgtttcccttgacgtgaaataatactcgagcggtacatcaaatccgatatgactctaccaaaaaaaagaaaagaaaaaaaaaagtcgacaaccccttgcatgatgaagaaaccgttgtaaacatgaatttgacaactctccttcttgtcctatccggtctctgtttctttcttgttcgaatgtatccctctatcggctctgtgtcccatctttctcgagggtaacgaacgatatggagaaacctgagtggtatcaataacgataagaaagtcaggagatttttcaaagactccctgagagctctatgacctgttcgttccacccccgagttcaaacccaagaccagggttagtcagaatagctcggttgtagaagtgaatctcacgcgaaggaacttaaagttcgcgaaggatgaacagagacgaaccaccggtacatgatcactaggtccaaagatctctctcctgaatatcaagagaaaaagagagttcccccgataatctttcgttaggggagcttattcgaacatagacatcagaaagatgggggagagagagagacggacctgatctcgcatgctttcacacgttcttgaagtcgtttcgagacgacaaacctgttgttccggattagattcccagcaaagtgatttccatcgaggaagatggcaaagtaaggatcatggttctgatcgatggtatttgtttgatcaccagaaacgagaaagagagacgaacgtgtcgagcctccatccgagacctttttctcgctgtaacgaccgcttggagtctgggaaacggatgtaagtgcacaatgagactacttgagagatacgacatgaggttatagagagagggagaaaaggcatacgaaatgaatactggacttcatcaggcccatgtatttctctccaagcatcaactagaggttggtgaccgctttcagaggacggattcaactgagacatgtatccatccaactcgtcttgtgtccatccgggtagctgtcaatatagtgagttccgacatagaacgcaagaatataagaaacaagaacatgactcgtgagaaatcagggcgcaggaacgaagagtatgttggaggcataccttgttccatcctttagcggcattcgagatatcgttgcctgacgcactatagatgttcaaccagatcgtctaattcagttaacttttgatgtcgatgacaagaccgtcaactcacacaacgtttatatcccctccccagacgacctatggatcacaaaaaaggccctcgtcaggccgttaagaacaagattgagatcccttttgagatgtatagataggcaggcaggaaagattaaactcaacacgtaccggcttgatagcgtctagttctcgaagtttcgcctcgaaagcaacgttccagtctttctttccctgcatgtttttcagtccttcacttgcattcggagccttcatttacccggtttgcggacaacaggagacaagaagggaaaacatgttgcaataaggcagtttgaactatcagttctgatatattaaaccaagcaggaaggaaaaggagaagaactctcacataagtacctataaggaacaacgaaggaaactccatttgaacgattcgacctgtgattcgttctcctttgaccaccaagtcgacctttcctcagtttgtttccagcaaagatagacagacacctttcagctgacagttcacggtgagattcaaggggtaaggcagggcatgaaagacacataccgatttagtgatcggctttacttttgagaggacagccgttcctgcgtatcctttcttactacatcaccccagatcgatgcaatttaccaaaccaaggagattgagtgcggcgctccgtcctttcatcacagcaacctcaacactgataaaacggcgaaccgcgaagggagaaagaagataggagaaggtgaggagggaaggactgacgagcagaacgcccattcctgaaacgggtatttctctttcaggaaaacatcctctgggattgggctactgtcgttcctctttgtttctgtcaagatctactcaagtgcactcatatgattgttaattctatcagttcaatcacccgagtgaggaaaagaaccaaaaaggagaagggaaaggaaaggaaaggagagaacagaccatgatatcggcatcttctttatccatgtatcctctgaaaccagaaccctgctcaagatttggatcacccagctccgaatgagtactcagataatcgccttgtagcaaagatgagagaagacaaagatgaagatctcaagacagacatgtttcttgtcacaagcggatttgagcgaggtaatgttccaagcagaaatcttcacgtcccctgtcttgggaggtaggtcgtacgacgcaggaagagctttgttgatgtattggatcgaagggaacgtcggcgggtttgtcggttgaggataggaacaggtagttttctgttccggtagccctcccggagacatagagatccagaaagatgttaagagcgatgacatcaaaccctttgtagcaaggcgttctccttaccaaaagtattagagggagagaagtacgtacggacttggtcgtctcaaccttcgccttcttcactgccgttccattctctccgtccttctcatcgtccgttttcttcacagacccactctgttttctctttggagccatctctacgagattttctttgatcagcttacgagccgtaccgatattttctaggaaagtagaggagttggtgttgatggtataatttctacgttgacggctatgaacagagtgagatcggtcgatcgagccagttgatctaaacagccaagcgcgaattgatgtgtgagcgttttggtcgagaacgatcgatctcgtccgggtcagacgttgcagatggagaaaggaacgagggtatagatgaagaggaggactcatacaggcaggcaatgtttatccagagatgtcgtgtcgctgttgcatctgttgcatgtcattaaacaatttttctcaaatttcgtcagacgcgtctcttcggagactttggaggacgcgtccagtttgtttcgttctttttgactttatcaagcacattcagatgacgagcgttttgtttcgttcttcgaacattgatatgtatagaatccaagtgatagcgcaaaggagaagatggatgagaaggagggaagaattgattaaacctcagtctttgtggggacaagaaaaagagatgagtgatgcaagaaaagatgaagcaaagaattgtacagagaaagacaagcaaactagattgctgatgaaatccctttttgaaaacagaatgtccacttagacgaagagtcgcttagtgtaagagttcaagccgtgaacaccaccctcgacctgagcagaagcagttcggagctcgaatcggacggatccgtcgagagcaccctcctggagcaaggtgatggacctgacaccagaatcctggagagagtgctggagaccggtgtgaaggtaaggaatgaacttctcgacggatcccttgtcctgaacatctccagagacaccctgggcgaccttgacggcgtcggactcggagaagtatcgggaggtggcagcgttctcatctccgacggccttgacgccggaagaagaggcggaaggcttctggtgctccatagcgtcgatggaacccatacctcggtaggccttgactcgcttaccctcgtggtagaagtattctccaggagactcggtcgttccggccaaaagacctcccatcatcacggcgttggctcccaaggacaaggccttggcaatgtgaccgatgtttccaattccaccatcggcccagacgggaactccgaactttcgggcaaactcggcgacggcaaacacagcggttccctggggtcgaccgacggccatgacctcctgagtgatacagatagaaccggatcccataccgattcggagaccgtcagcaccggcagcaatcagctgggcggcctgctctcgggtcacgacgtttccagcgacgacatcaatgtcggggtatgtcttcttgatccactggagcagctcgatctggaagatagagtttccttgggatgagtccaagacgacgagatcgagcccggcctcgacgagcaatcggagtcgctctcggtcggccggtcgggtaccgatagcggctgcacagtagagctgcttggtagacggcttcttggaagcgagcgggaagtctcggttcttgaggagatccgatcgggcaagaagagagagcagctttccttcgctgtcgacgatggggagcttaccctttcgggagtctcggagaagagcattggcctgctcgaggttgataccggcctgtccgacgacgaggtcggttgtcatgatggtgttgagcttctggttgggctctcggaactgaacatctcggccagtgacgataccgagaagctttccaccgatctttccgttatctgtcaacgcaagggacaagcggttgaatcagtatttagttgatagccttttgcgagtcacaagtggtgataaaaagttggcgtcgaagggtggttcagtggacatgagtcaagactccgcatgtacagactccccgctagggagcccgataggcagaacgaaggtaacagttgatcattttctcatcaggaagaaagagtgatgggggtttttgatgattatcggcagaacggacagggtgaaagccgagatatggagagcaggccaatttgaaaggaagaggaaggaaaagactgaccagtgatgggaacaccgcagaatccgagtcgggccttgatgttgagaacactgaagaaggcagatgggtgttatcttagggttgtgatagagatggctgtgaagaatgaagaaagaaaacctactcctggacgacggcatcctgtccaaggacgacgggatcagtgatgaaaccgttctcgaacttcttgacctttcggaccatggaggcctgctcctcggcggtgttgttgtggtggatgataccgagtcctccgagaagctgtttgatatatgaaaaatagaggaattgagcacatgcggatagggtgagcgaacgacgaagacagtaacaaatgtagacgtacacctagggagatagccatcctgtcctcggtaacagtgtccataggagaggaaacaaatggagtcttcaaaaccactcgcttggagacactgcagaatgagagattcaacaaaggattagggtcttgtctctgtcttttgaatgaaggccaagcctctaccggtcggagaactcactgggtctcgagggagacctcagaggactggaagtctacgtgtccgggaagcataaggaaatcgttgtaggtgagtcctccgtgggtagtggagtccatctgtgatgcggttagaagaggccgacgatcatagatgggttgagactttgaactttctttgctatattttattctatctgatgacaaagagaacagaatcgaataggagaaagtgaatgctgaccagttccctgaggctgagaccatcccctcgggggtactttgcaagctcggccacggcatcagcacagttcaaaacggaaggagacatgttcttgtgtgtgtatgtttgtttgtttgtgtcaaagagagaagaacgatagaaaaaagacacttcggtcgaggcaggtgggtgggtgttcccccccagaaaaaaatgaaaagaagaactgggcaaaaaacttgacgaggttttaagggctcgggtgatgggctggatcacgtggtttgtaaaaaaaaattactggtaccttaatgattaggtaagccggatgctgcggtgtcagctcctaaccctaacatccatccatttcttccggtcgttccggatgtttgagcactgaacagataggaccccgactcgttgtgttctctgtctacgtccgacacggacggcttcttggtttaataggtagaatgatctgataaggctggatgatgttcagatagagtttcgagatgggctgatttctgttagcttgaaataagaaatccaaggtgatggttcggtgtgtcgtgtgtgtgttgggtctgggtctgggtatacataagagttcatctcgggaacacagagtcgatccgtctcttgactctgtatctctctgtcctccgtgttcggtttaccgtcatcgacaccatcacttctttttattataatactcaaataaaaaaatccgttgctgattggatcacaacaggataaagtctcttccatagagaaagatcgatatttcaaggcatgcatgcacaatagagcaagaattcgaccggacggagttgcaaagacaaacatctgaaccgaccacaatctctggccacggtctcttgtgttccatctcgtccgatctaaagaaactcttttggccaatcatctgaagagctcgtccggttagacacggttatgaatattcatgcccatcagacaatcaccactaccaacaacccacgagcaggtcagccggcgtttgctttcttcgtcaacttctttatctacatctttatcctgtccaagggaaaaatggaacggaagacggcctgaaccgtggagcgggaaggcatctttacttgataaggtaaaagaatctgaccgattcgaccggatctcaacgttcttgagcgtgggtataatctatttgacggtcgaccccgtcttgatagatagagaagacatggacaaaaccgttaggccgatgacgtgtttgtttagaacaagaagagctcctcttttgatactaaatttgttagggttaccgctgtactccgaccaaatcgcagtcgatcagtcagtttatttttagattaagcctggtcccagctaggaaccaagctctatcttgaaaagaccggcgctcgtgcctgtcaattaatcgccctccaagctgcctccgaagatgtgcctgacggaagcgcgcccccttcaagagttgccccgtccagttatctcgctatcttgcggataacgagataactcagaagaaagaatatgatatcggcttaattccgttcaaagtaaagaaaggccaagaagatggatcggacgacaaagcttcaaaagagcacccgagatctgttcttccgttccttctcattcattcagccatcccgacctactcagatcttcataccctcacccactccaacaatggatctcaaggataacgagaaggacgtctacggagtgtccgaaaaggtctacgaagtcccatccgatcacgctatccagtatggtccttctcagtcttctcaggctcctccttgtaggctgacatctcatcaccttgtttctccttcatctacctcgcaccctatagcaccaacgcacatgatgcagatgctgctgccaaactcgtcgccggattcaccggagagttagacccagtcgaggccaagcgggtgcttggaaagattgatagaaacatgttgcccatggttcgtaccagagatcatttactctgtgtcgtctcagtcccataactcaccagaaaccttacatcctcgtctcatatcaccccttagatgatgatcttgtatctcgttcaattcatggacaagaccaccctcggtaactcggtcaacctcggtctcaagacggacaaccatctgacctcgctccagtataactggcttggaacgatcttctatctcgcatacttagtctttgagtacccgtgagttctttagtcttgaatacatatgcctttgattcctcttcccaatcttcccaaagaatccgtttgctcataattttgtctggtttcgtccaattcgttctgctagccaaaacttggctcttcagcgattccctgccggtcgatggatgtcgctcaacattctgtgctggagtatctttttgatgtgccgtgagttgcttgcttcctacaccgatcttgttacgcctcgcgactcttactaaatcccatcgtttgcgctcctagatgccgcctgccacaacttcgttggcttgttcatttgccgtcttggtttgggtatctgtgaggggtcaatcaccgctggtttccttgtcacgtaagttgctctgtctgtttgtatattcatcccttgcaccaagcgtcttccttatcattgtatgtcctactatatccagcactaccatgttctacacccacgccgagtcttcccgacgagtcggtttctggttcctcatgaacggaacggcccagatcgtttctggtttcctcgcttacgtacgtctcgccccgttcttcaaccttccatctcgaaccgactccttaccttccttcttctttctgacccattcagggaatattgcactccaaatcctcctttgccccctggagaatcttcatgctcaccacagggctgatcactctcgttgtcgccgtctggttccttctccgattccgtgagtttcattcttcagactttatttcatttcccaacattcgtcctcctcttgctcgatctgactccttcgcgttgtctcaaaccggattattcttcatcttctcagccaacaaccctatggacgccaagttcttaagcaaagaagagaaagtcattgccattgagcgaatcaggtccaaccagagtggtgtagagaacaagcactggaagaaggatcagttcatcgagacccttcttgattggaagacctgggctttcttcttgtttgccgccctcgacaacgtgcccaactctttgaccaaccagaactcgatcatcattaaatccctcggatttactgctttgcagaccaccttgctcggttgcgtctccggagtgatcgagatcatcactatgtaagtatcaccctctcttctatcccgcgcgtgttcaactttcctgaccgatcattcctacctttccccttcatcagttacaccggaacgctctgcgtcaagaagtacccgaatgctcgagcgatcatcggaacgatctactttatcccaaacattatcggatctgctctcatccttggccttcccttcagcaacaagaccggacagctcatcgcgctttacataaccggtgtaggaaccaccggtttcgtcctctccctcgcttggatcaccgctgtcaccgccggccacacaaagaaagtcaccacaaacgcaatcatgctcatcggttactgtctcggcaacctttgcgcgcctcagatgtggaaggccgagtactcacccaagaacacgatcccgtggattgtaattcttgtttgctacaccgcatgcccaatcatcatgttgtgcattgcttacttccttcaaaaagagaacagaagacgagatactctccccgagtcggaggtcgcctcgcaggacaactacatggacgagatccagacggacggaacggttatctccaagaaggtcgatcttggtttcatggatcttaccgacaggcaaaacttgcgattccgatacgctctctgagcaagcctatactctttgtattgcgcaccttttcactttccacttctcacttttcactttccctttttcttctcggtctttatgtttcggttgtatttcttctttttccctcctcttctaattaagtttactttatccctttgtgtttgtgctccgacgtcgttgtaaaagttttatagaacctttctcctctctttcgtactgtttttttctaggaggttgccttccctatttgttgctcttatctcacctttactatcagatcttcctacgaattttaacgctacacgtttcttctttgtctctctttgatagatatcttttagagcgtgtgttttcagtctcgaacgtgttgtgcttgtggcgatgacgatgatgattgtatgttgtgagcaacaatggaaaagctagagaggaagcaaggactacggaaacattctgccgaccggctccccctgaaagaactttgaacagaattgtttatcttccttacgcccgcgattcgacgaatcttaatcctcccatcagactacgaccatccaaacgcccacgccctcgcccaagctcatcaatcctctttcaagcaaactaatcaatataacatcgtccctacacacccgaaaaattagaacaaagatgagctcgtctggaaagatagatttgttcgatgaggatggagcgttgagggaacctgtaaagaatcttgttcttttcgtctttacctttcgctcttcatatcacttcaaacttgactgaacctgactgactggctctaactcggttcacaacaaaatattcacaaacagctctacctggcgctctgtcacatattctcaaaatacttgacacctctcccaccaacgaatcccacggcccaaggttccctacaccccccacctccaccctcatcctccctttcctcgacagcgctcgatttgttcgcaaaggacaccaacggagcaccgttcgaaaagtcaacgaaggacgagatctttacgttcttcgacacagtcaagattaacggtggaaaggaggaggggctgacgatgaaagggttcgaagagatgatgacacttcagacagaaaatgacgaggaggaaacttggaggtatgtccacagtctttttctctccctctcttccttctctcccttctctccttcgtcttttctggtctggacgtcgttctttcacgaaacagccgtccaattttggaggatgacgggtctctggctgcggtctgttgatatcttctttctctttcttgggtgaccccgcacagggaccttgcagcacacggattcgaccgatccctcaatcttgttccgtccaaaactacaacaaattcagacggaaagtagactctgatttccaatataaaaccaacacaaatataaaaaggtttttcctcagacacctccagtcgttattttttgccaccagttttaacacgaatcttggaaagtgtcaaacgacacgactcggatttcaatcgtttattagataacaaagtggatttttcaaaactatcattttcgttcgcatctatctacacctaccactagtcctctatttccctcttggtccaaaagaggaatagaacatagaaccagaggtcgtccctgtatccgcgcacttttatcttcccttcctcatcagatctttccgtgcaggagattcttgatcatctcccttcctgtcagccgaacggtgttgtacatcgttgggaagtccaaggtggaagcaaagtctgcaaatccaaagggctagaggatcgagcgcatagagaatcagaactcagttttcggtacagttgacaacgagagagaaggaatgggatgtagaacaagataaggagaaagacaaaggaactcacgagcatcggagggatccaaccttgggcgagctcaagagcccaaccaccctcgtggaattcttttgtgcgcggaaagtaagagataaagaatagacatcaaatgtagaacagaatccgagttcagtgaaagtttcaacgaagaagggaggcgacgatgatgaaaaagaagtgagacaggccggaactgactgtactgcttggcgtctcctcgtcgcatgtggtgaacttgaccagcaacgtatcgctacgtggtccaagtgaaggtcagataggaggaagagaagaaagaatgagaaccagtttcgatcagcaaacgaaaccagtcgaaaacaacagaagagatagacgaaacagatagatagaaacgaacctccatctccatggacccaggggagaaagcccactgttcacctctcaagatgttgaagtagtcgtccgcggtgtgtcttcccgagtgaccttccgttcccaacggcgttccgaacacgatcaagtactctgtgatagaagcatggatgatgaacatcgctcccatcgctccacctgcgttattgaacacccactcggacgggttcgagatatccgtgttaatagtgtaggcagggtacgttgatgataggttcgtcagaatgtgagccgtcagggcggtgatgtttgttgggtgaagcgcgacagcctcagcagagagggcgtgcaaggccgggggatcaaagatgaaccatcgctcctaaaagacgacgaagaaacgaaaaatcgagcacatcaagataacggagtaatggtcagtctcgataaagaagacaaacgctgtgtatgtgcgcgagccgcttactttgataccatccagaaagctgcatgcgccccatcccaaggcgacgatcagaacaatatatcccaagaactgagctcttgacgacttggcactcgtagatttagttgccatgatccaggagagttgtgttgatgaacgagagtaggaaaagaaaaaaaaagaaaaagatcgttcgagtttctgggaagaagacataaacaaggcagttaccaaaagaggagtcacgtgagatgcttatatg

SEQ ID NO: 592 - DNA, 30209 bp, Xanthophyllomyces dendrorhous
atatatataatatttgaaacattagatttactctcaatttcagatataccttaggtaaaacacgatgtcttcaatctcacctcctctgccatcttgggttcttccatctgttgtctgcccaaggtttctctctcatctctcctaacaatgtccagccttagcaaagctatcccgtccactctgaaggagcttcggtttcacttgtgccagacatctccagcttcagccggtcttcggtccgttggttttcgccagctctctcttctcatcttctccattgatggcttactttgttcttccttgttcaactcgatctctcgaccgggctctctttctgttttctttgttgttttggctgggtgttttttttaaaataacaaaatacaaactagatcatacatcaactcgaattacttgtctctcaaggcagccaatccagatctgaaggtgctcatcagggaagcagccgccgttagcccaagagcctttgctcgatttggttcgttccttcatactactctattttctacagtcgttctggagctactgggaagcaaggccatgaagttggaccagttcaagcattagaggttgagcaatgagaaaacgtgatgtgggattagaagatcagaggctaaccgatggatgtattcatctttccactctcatctctaaaaccggtgccccatattatcgtatgctacccaaatcctctttaaacctccatcggccgttatcgtgctatcaacagaacaaggcgttgagtctgaagtaggcttggcaaacttgacggagaaggacgtagtcaagcaactcgagacgctggtcaagtcttctgagaatcctctttaatttcctgctctggtctcggttccgtctaggaaatctctgttatgagcagaggtggttgtataaatataacagtggacctggaatgagctgtctgctcgtttatttctttgtttgtatgtggacgtgtctgtttgtatgtgaaaaaagagaggtcaatgaaggaaaagagaaggggattgctgcttccttctttgcttaaacactctcttattggttgtatgttcttttcatgttgcatcccaccctcttgatcgttcctatgacgtccaacgatctttcaccgatacacacaaacacagttagtgggaaaatatgcagagtaaccgttcatttaagtgaggccgacggtgaaaacaaggaggaatagaatggaacgaaaaagcgacagaaaaaaggaggtaggaaaaaagaaagattatagacacagaacgacggtggcggttttctttttaggcggacgaaggagcgaggaggggagacaaagatcagagtgttttgagatggttccagatgatgacttgtttagttgactgtgaaggaaggaattaggcagagcaaagagatgtgttacaaaattccaatcagaacacaccggccaagcagaagcaaggaagaaagggcccagattgaagggaaagaaacatactaggcttgatcttgaaatgcaaagcgatcaaagagaatatcaggcactgttaaagattcagtgatttggaccgggtcgtagaagcatgtcgaaaagaatccaatcttcagtttcggaaccattcaaagaactcgaaagcgaaagacagagtgacaaaccttgaggtcttgaacgaggtagtagaatactcggagtccttcaggatcttcggaatcttgcacatccgccaaagatcccagcttggcggtctattgtccgacatgaggacgcaagaatgagtattgtgtatgtaaagaaaactaatgatctcaaatgggggaggaagaaacacgaacctcaaaagagatatggtcgtttccaattcggatctcaagctcctgtttaccctgctgacccttcttcggccacttggcatcatcctccctgtttcattagattgtcgttagagttcgtttgagcgatcattgaagaaaaaggggttgtgtccatcatattgacgaatagataaagtcgcggagaagagggagaacaggaaaggaatcgggagttcagccgactaggcctgacagatctaccatcactcgtgcaaggctcaagaagaaaacagaatgcatactgacttgacaacatcggaggcctctactatgcgcttgagctccttgatgagcagagggctgacgaacactaagaaacgggaaacagagatcgcgaaggaaatatcgtcgaacaaaggattgagagcgaccggccatcgtacgcgtcagtttcttgttgttatctgatcaagatcgatctagctaccacaaaaccttggctagtgctttgtcaacggttgaaactgactttctttcttaatcagactgtcatttcggtagtttgagttattggcatatcggagtcggccttgggagtactcaaactcgagaaactcatgtccatgaagaccaatatgtccggtactgaggtaaagagaggtagaacaagagcaaggtttcagtagctcaatcagcgattgatacacggagagaaaggaaccgaaagactagacacactagtatctgtagaagcgagaaagagatgagtgtcagttttggacgaaactacctctgacaggggtgacgagtgaaaatcaaaagcaggaagcttctgtatagaaaccaagacgataagatacgaacctgaggtaaaacggatccttttcgacagagttggtggccatattaacagagatgattgatgtagacgtgatggataggggaaagggtgagcgaatctttgtgagagagagaaggtaagcgagtaaagggaagagaaggcgaaatgcgtaaatggttacagtaacatgtaacccggaacacgtcgacgcgtcgatgggccgacggacacgtcgcgtatccggctgtgtggctatgggtaagaaagctgtgtctgccgcggaagctgtgctaaatgtagccaaatcgtaaccatttcataaccatccaccccccatcagcccatacacgttcgctcttcaaccttttactttcctctgcgttcatcactgtgtctgtctatttcttgggttagcgttgctctccgttctctcttctggtgtctctgtccatcactctctctcagtcagaccagtcaaattgtacgtgtgaatgtcgtccttcagttctgtatgtttcctgttttgcaaaatgggcagtccatcggttgtaccagccggaatcagcaagcaaaggtgtacgtgtcgtgcacaggactttgaagaacatgtatcagtgggagaagaacatggttgagctcttgcttcccttcctgttcgaatcccatctctctctcttattagcacgacttgagaacgctgctccgtcctccgtatctccctcgtcccaagcatcgccaaactatcctatcccggtcttctttgtataaaggtgaatgcacgttggctgactgatcctacgggtgattatcgccttttctcttctgcctactggcctcgcctcagtctatctttccatcgaaagcagacgcatacagtgcacccaagcataagattattcacgactcccgtcgtttcttctttcttttccgttgcatctaccatttgatcggcatctacctcgtcgctcagtcgaatacacaaggtgagtattcattatctcgtcgctcaatcggttcatatccctttggtaggtgttcaccaacaggttcatcaccctctttcattgcctagtccgggccaagccgacaaacagccacaaaagtcaaatctcatatggctcttctaccgacacctcttccttcaatacctgccagtttccctccgagttcgcctaccgtattaggtccagagtccccctctgggactagcacctccggtgctgtcctctccgatcctcaagctgtcgctcccaaatctgtctctggccataatccgtcggattcgatactctccccacctcggcctaggtcggttcctccgtcatcctttcggtttctgccccttcgtgataaccttgtcggaggtatccgagatctggggtcatcactcaggcagagtttggacgaggttttaaactctggtcatgaattcagcgtacctgaaggagttgactgccgggtgctcgagatcggacccagagacgtgggtatcgatacgaatgatgtcctgttagatgggaaaattggcgaagatgagaatgggactcaagatcctgctacaggcgtcgtgaaagagaaggaatccaaaggcggtcggaaagtcagtctcggccttggccttttcaaagaaagttctggcagagaaaaagagaaggacaagaaggaaaaggatctcgtcagggatatgtatcgtgaattcagtgagcttggtggaggtgcggctgtcggaagcgccgttgtgatggaggaagacgaaggacatcatcatcatcgacacctccacagtcttccacaccttctttctgatgtagaaataactcctaaacggtccaaggagtctaggtccatgcagaggactccgtctgatcggccgtctcgtcgaggttcgatatcctcttctaaacatgcgttcccagtcttggtgtcctccaactcggttactacaccgagctcttcatccatgacctctactccttccgcgtcccccaagattagcaagcatcactcctattcgcatactcactccatctcatcatccacttcacacgcccatcatcgtttcccattgacgccccaagcacctcgtcgaccagctctcgaccttcagcactcgtcgacctcctctacgttttcgccaacctcgtcgttctctaccacgtcgtcacccctggtcgattccaaaccggccttaccaccttctccattagagttgcctccgaccccttctatctcttctgatgccggagttttcaacgtgtcgggtctcacctcgtcaccggtatctttgtccaacggaacagctccccgaacgccctcttcctcccaaacgtatacaccttcatctattccttcatcgagtggaacccatgttctacatccctcatctcatccccaccctcctctccacttctctcacctacaccgttcccgtcgatcgtccgttgctacagaactctcttcaacagccagtatcccctcttcgtcctcccgaccattgccagccatgatgggctctctcttgaccgatcgaactggatcaagcaggcaatttgatttcgaatatgatgaatcaccctcagtctcctcggtcgcctccccgatgcacgagcccgaacgaatctcgttgataccatgttcgtccaacccatccgacggtgaggaaggaagctacgatgaagaggaatggacagacgcgttcagcagtgagggtgatagtacttcggagggaggcatctcggactaccgaaatggagagcacgactcgtattattctcacaataaaaaccaccaccatcattcttcatatcagcaccaccattcgacagatctatcgggcgaacaggagagaggtcgaagagggtacagattcgagagtgtactagatagtgtgcccgacggggcggaaggagatgtggacgagcagggagttggttggcgtgaaggagatgatgacgaggcggatggaggagacgaacgagtcgagggagaggacgaggatgaggacgaagaagatttcgagtcggacgattctttgcctactgttccgcttcggccgttctggaaccaagtcggagggcattcagccatttacaagttcacaaagcgagcggtctgcaaggttcgtacacataccctgatatgttctctggtcaagtcatatcagaagagctatgtttaggggagagcgcgcggctcataatttgcgatgttatgtactaattttgaattgtttccccccgaaataaatctatgaaaagccgcttgcctctcgggagaatatcttctacgaagcagtcgagcgagaagctcccgagttggccgggttcatccctagatacctaggtgtcatgcttgtcaactaccgacggcaaccccgtccgcttcctacgtctgcagttgttgagtcgcctaatggcaattcagccgaagccttagatgggtcgtcgcccatgcctcagccttccctggaagcatctgccccatcttcccctatcggatcttctcgtccatcgcttcatcataaatcagcttcggcttcagcctctgtcgtcaacagtcgcccaacgcgatcttacttttcggatgacgagattcctgaggtatctcttggtaggaaccggcacgttgttccagaatggatgttgaagaatggaatcaaccgaggtctgaggaagtcgagcgacgatgagcggtcggcgacgttcggaagaggtcgagctagaacaaaagctggcctaggactgagtccgttagaaccagcaaccagagagggaagcacaggagacgaaacagacgccaagcttcagatgactggtaaacggacgggcaagaggcgaagtttgggaagtcttcattcagagggtcgactcgacttttgctcaggctccccggtcgataaagaaaaccggcggagaatgtctagtgccgacaaagaagatccaggctcttcaccttcttcaagcttcaatcccccgacagatcgacactttcccactttaatcgccgatagattcgccctcgatcgatcatccactccacaaagactctccccgtcattctcaaactcgagcttaccatctcctgcaccagaaggaatgggctcgacaatgatcaacacaaagctgagggatcacgtgtttggaacgattgctagacggtatcttcgaacgaaggaacggtcgcattggcatgtgcccggccaaccttcgaatggtcatcctgggtcgggaccttctagtcgttcgccgccacatttccttggatcaggacacagatcaacaacattcggtggcattgattcgcccattccacgcgaaggagcagacttggacactagcctgttagggaccacctctttgccaagttcacctctacacacccccaagagttcgcctcagcccatcccagaggacatgccgacaccttctcgtcacaccgctaccaatccccccaaccctgccttgtcccctctttcatcattgacgacacgttctatcccagagaaatctctttcccgtccgtctcttcccccagacactcaccgatcatcccctgcagtccctatatcccattcggtaccgcctctggaggagaacgctccggtaaccaggcaggcctacttcattctgatggaagatctgactggccgattgaaaaagccatgtgtgcttgatctgaaaatgggtacgaggcagtacggttatgatgccacgccgaacaaggcaaagagtcagagaaagaagtgtgacgagacgacgagtcgagatctaggagtaaggatttgtggaatgcaggtacgatcatctttctctttgtttggtcgagatgaccacctaaggtgcgagtattccttactaaccggtgttttctcgttttttttttcttttctttctcggatgatgatgaaacaggtctggaactcggccaaagaagagttcatctctcagaacaaactgacaggccgaaagattaaaacatccgaattcaacgacgtcctcgcctcattcatctctgatgactctcgactgctcgtccaccatatccctaacactcttcgcaaactctatcgtctggcttcgatcttgcacaaactgcctggcttccggttctacggttgttctctgctattcatctatgatggtgatccagatcttcaagagcagcttcggttgacgacggaagattcaatcccggtttcgtacaaaccttcaatggacactggtccgggaccgaacgtcacgaccggaggctcggttgaaaggagtctctcgcgaccaccagtcagacatcatcagcatcacgaccatcatcaggatgtgccagaacccgtccggaaacgaagggattctgagacgttccctgaacgtcgatcgagatctgctgaaccgggcaaacctcgagagatctctacgaacctacactcgaaccgaacaggaggaccaaacccagcgactaaaggcgagctcaagatcagaattgttgatttcgctcatacgaccaccggaaaggattacgtgcctctccatccgtcgatggacgatgacatcgatccggattcgttagggaaagggtacaagacggtgtttgatgcagagagtggaaaagcaatcgctagattcccgccgacgcatccagacaaaccggatgaagggtttatctttggaatcaagaacgtgtgtgactcgttgattcaaatatgggacagagaacggctggcaagaaggaagacgctcaaggcaaaagagaaggaggagagggacctagctggtgctggcgtaggcgtaggggccaagaccgagtacgctaccgtctctggggacggaacagaacaagggaagaaggccgacgaacgcaggctgatacaactaccaaagttggacctcgaagagggaaagaaagtctgggatcgagtcttaccgccaaaggagattacggaccaggattacttttctacctgatcgttccgcctgcccggcctcctgttcttttattgattgttacttctgatcttccttcagcgttttgtttattcatgattgtacagaaacatcatcgatacatgttttcccccctttatagaaacatatcctctttgaatcaagatcaagcaattcccattctgttctctttcactcttcactttttcttttactcttgaatttcagcgaaatttctcgtagtccgttgtacaaaaactctctacctttcttttacctctccgcttctactttttacgacatatagatctcattctcactcttccaaacctttctctttgcatttgttccttttctttgtgtcttgttacatatcgaatgaagcttcacttctttgcttttcttctgtctgctcttcatgttctatattaatttaacctcggggttccaagatacagatcaagttacaaagaagatgaaaaagattcttgagtaaagggaggatggggggtatgataattacacgtagtagtacagcgtattcgaatcccagacaacagatgatagacaacacacaaacagccagaagaaagaacttcacgaagacctttccgcttggctgaagtccatcttttgcaggagagccatcttgataacctctcttctgaaactctcagtcgtttcgaactctaaattttctccttccttctctctctctttctctcttgttttgctcgatccttctacttctcgttgtatggcgggccctatcgaactcatgttcggtccagcgtctgctgtacgagctcattgagcgtcggccaaatctcatcgctcgtctcgcctttgagggtatgagtgatactagggaaggaatctccgtagtactttagtaaagggaaggtttgttcgttgtacagatcaagtcgacgggaaaacacctcctgtttaagggtttttttttgacacaacaaaagtaagagattggttggtcaaacggaaatttctctctttctctgtttttcaatgaaggaacggacgaacaggtgtgtcatccggtcgtttagtgagcgcctcgccagtgatatcgtctttcccttccaccgcaggcttgttgtatgtcgtgttgtaaactcgtccggatgggatgtggatccatcgatctgcagaaagcaacatggtagaatcagattgagcgggcgggattgattattcgatagaggtatcgtcgaggagacacagaaaaagacaacaaaccttcgattcgtttcaagatcacatcatcactcaccgctaggttgacgaccatgttcaaccctttgccctctttgatgagcgcctcgtccaacatctgaccctgtgcaactgttctgggaaatccatctagaatccaatgcgcatcattcaagggccgaagagcggagagcgcgatatcgagcatgatcttttttttttaggtacacaattaaagtagttgtcagaacgatttgaacgaagagacaaaaccagaatgtttagaaactcacctcatcggacacaaattctgattgcataaaagatgggcacggcaggtttattacaacgatcagcgctccgctagacaacatctcttactatatgggctgtcaagatcttgtcccaaagagttccatctaactcacctcctcgagctaccagaccctcggctctcttgcctacttccgacttgttcttgatttccttcctgagcacatctccgactgagaccaagttgacgtttgggtacgagtccagaaccatctgactcaaggttcctttacctgagccctgatagtttacagacaaacaaacaaacaaacagatgaaacgacgagccggtttatgagtgacgatggtagacacgaagcacgaaactcatgatgcgtccctcacaggttttccgaaaagaaccatgcgaagaccaggctgagaaacgccttcgaatgaactagaaggacctatcggggtgtatgtcgtttccgatgtgcttggcgtcgagatgatcgttcgacacgagtagaactggttggctgcacctgagcaagatattctaggagcgctaccgaaccagctggccgacgggaacctaagcatggacgatctcacagaagctgttgccatcctgagcagacgagctaaagggttgtgcaaacgaagggagaacgtatgtaggatgaggaaacgagattgatggtgagagggaagatgaggaaaagaagatggggagggataccccaaatgtggcgtttaaaatcacgtgatacaccaccgctttgggtcagattcaaaatcttagcagtcccatcctacggccggccgtttctctttctctgtgtcataacatacccaagcacacacacatacacatacacacacgcacgcgtacagcatacaggaagcgtgataccatggctcctacgtctaagaaatcaaaattgaccatgtcgtcggcttctctcgccgggggatcttccgccaaactaaagtcgaagtctagcaagagggaagaagaagtagaggaccggctgagcgatttggataggtcaggctcggacggagaggcaggtagtgactttggaggcgacgatgagttcgacctgggagaaatgagtggtgaggagggcggagacggaggaaagatggacacggacgatgagatcgaacaagccaacgagcagggtggaaagagcaaaaagacggcaagtgagtgtatttttcttcgtgcactgtaagatctgtagaaggtgatcatcatatggtcttccaggttgaccgatcgactgactgattgactggtgttcgtgcccttttgcttccttagagcgtaaaagacgagcagcctcgccatcgacgttcggaaacctcctcaccaccattcttgacaccgaccctgttacctcgttcactcaaccttcttccctccgaccttcgaaaccaagctcaaccaccgcgaacgtctcggcctctgccgtccaatctcaaaacattctttcccttgctccttccgtcaggaagacactctctgccagaaagcttgagtccagagcgaaacgggtcttacagaatgccagagtcgagaaggaagatcgaggtcgaatcagagatgtcttgaccggttggggaggaaccgagaacggggtaggaggacaggattgggaaaggtcgttgagaaaggttgctcagaagggagtcgtcaggttgttcaacaccatccttcagagctcggcccaggtcgaagaggccacagccggaaagaaaggtttggccgctccggagccgttgccagatccaagaaagggaaagaagaaggagaaggataacttgttgggcagaggaggcagagaacgtgaaggtgccagggtcactaaggaagggttcgaggctttgctcaagggaggcgcatgatgaatgcgaggtatcgtttgatcaaaatatcatttacacactccttttgcagagtttagggaaaccgctttgcgcttgtccttcctcaatgtcttcagacggtcaagacaagagaatcagaaacaactttgaaaacatggacatatatcatccccatcctgaaactcgttcgactatctatttccctccaatcttgtatgctccgtagtccttctccgggtcatagacttcccagcgcgacgctatcagacacggttgtgaggtatttcaaggaaagataacgaaaacagagttcataagattaatttttttttggaacaaggcgaacaaaaataaagctgtctataaagtggaagacgaacctgggaagatgtgttttgatcgattgtaccatgaacgctcgacgactttaccagcgtgagactgttcaagttttcaaatgcatcggggaagtgtcagaacaatagccaagaggtttataggcttgaaacacgaagaagagataggagaagaagaaaaagaaggctgacctcatctttctctacagttgcatcgtgaatcaatcgaacatcgtcgtgcacatcaaagttgaacaacggcccagactttcctctagctttgttaacaatgaaatcatagaatgtataatgctgcgaatggcacacaatcgtatcgatacgattcaagaatatatcaagaggtcaagatcggtcatcagctcgaaggaaacggggagatcaggaagagatgcaaacaaggacaaatttacatgtgggataatgagatcttcctatagacgctcgaatcatgatgccagtgaaagccaaaacagagcaggtaagcggccgtcaagtagaaaagagagagagagggaagaaaactggtcgagaatagacttgccttaatgtacatcagattgtccacgctgattcctctcagctcagggaactgcagccgacatttttccaaaaaggttgcgatatcgtctcctttcttgcactgtcgtcgcgtttgtaaaggtcagtacagtgatactcaacgatcactctcccatcgtactttcttctgagcaaacaaagggttagctggaaagatgaaggaacgtacagagaccacacgacgatgacctgctccatcccagtacgaataagtgatttctacctcctcattcttgagtttctcttgatccttcagccactgtacccgaagctcctctcgttctaatcgctctcgggcctcacggtctcgatcgggcaggaaagatgtatcgactgtcgggttcttcattactttactcttcttctttggaggggctgggtgggtggaccaagcacaatagagatttgcataggaagtagatggaatgaaagggaagagttcagctttctctcgcaaggtaagatacagtgagaaaacaagaagagaaacacaaacaatctccgttcgcagctccatcttcttcgtcatctccaaatgacagcttggccttttccttctttttcttcttgatcttcttaacctcttcaacactaagaacacgcgtcggaaaacaagcaggtcttgttcagcattcattctgaattccacattgctgcttgatcaagcgattgaatcaaggtaacgttgttcaaacagacgtacagtgctccggtctgagcggtgagcatcatttgttctgcctcgagtgccttccgcttctcttgaaagtctttcaagttgaccagtccgacggtagactttttcaatcgctcatccatggattccacatgagccacaaatctatccgcgccggcattcttcttctcggtttcctgatgaggtcaaggacgttgttcaaaggatcacatataatcgaacagttctgtctctatcagcccggaaaaaaaggaagaagactagaaccagaatcgactgaccttggccatggcggccttctccttctcgaacgcctcgagcatttcctttcgcttctcctcgaggagagcctgtcttcgtttttcgctagagtgccaaccaaaacaaacctgataagtctaaatcttaacggctgggtttaaacctaaagcacatactcgtgagaggaggacatggctaaatgaacagaaacgacgatggtggtcaacacgatcaacatgtatcccagaggtttctaggcgttctcctcaaaaagaatcctgtgggaaccccgcaaaataaatcattttattttttgccttccgttttctctccttccttccaacatccatcatctctttccaagaccatcagttcagcttgctcgctcgctgtctttatctacactcactcacccactcacctacacttactcacactctaatcagtatggccggaaaaggaggtcagtctgaaattggttttcatcggtcagcgtcgatctgcgctagctttcttgctatttccctcctttttttttttatcctccttcgtctttatgctacgtgtaggaaggtcattggctgatgcattctttttcattctcttccattttctcctcttcccatcgtcgtgccttcgaccactcaaggcaaaggaggaaaggccgtcaaggaggagaacgcgtaagtgtattcttacctcgaacattcttgttacactatgctaacgatctctatccatttacgtcatcttactagcaaggtgaactcgatgtatcctgaaatctggcatctcactagatacatgttctgacgaccttgattatgtccatatcttgtttccgttctcaaggtcaacgctcagaaggccaagtgagtttaaatcatcgttgtagtacctcacacaggatctctactgaaccattcagcctgctcgttcatttctttccaaactactcagagaagccgctgctgccaaggaagctgaccaatggaaggccggatccaaagtcaaagatacctccaaggaggaaaagcgacttgcagaactcgccaagaaggaggagcgagctcgactgcttgctgctgtacgtttaacactcgacccgtccagcacgttctcttcaagaacatgaacactgacgaaattgcctaacgtttcttggcacaggaggaggcctcgatccctaaggccaaagtgaagcccgcgatggccagcaagaccaaagcgtccaagaaggtcgagaagccagccggaccaggagcgatcgccgccggcggaggaatcgcttctaccgtgtttgttcccagtgtggaggtcgagaacgatgatgagacccctgttgctgtacgtcttatatctctttgcctaccaatacaatgtatctgttcgagtgtcaatcactcactcggttcgagtatgcggattacttcttatactacagcatctacaagctaccggtatcgacgagatgtgagttgttgcattatgtgttcagaccaaaaatctctgaaggctgatcgggatatgttctgcgttctcttcaaggctcgaggcgcttgagattgccaacgctaagagtaagctttcagaccttgtttgtcttgacttttacgatagttttcgtggactaactgtgtaatgaacgggtatttttttgttcgtgtaatcaggcgacaaagtacgttcatgtcgctacatttcatactgatatcaatgctcaaactcaagtcttcctatgatctcttgataggctgctgttggtcaaagggcggctaacctcgaggctcatcccgagcgacgatacaaagctgctttggaggcctacattgaggccgagttgcccgtgatcaagaaggaggtaagtctttttcttttgtcaggcacagtagcttctccgattcaacccgtctagcgcatggacttaccgttatgaattgcgtcggcggtgtttcagcaacccggaatgaggctacagcagtacaaagagaggctcttcaagcagttccagaagcaccctggtatgtgtatcatctttctttgtagtcttgtttcaggtttactgattcgctctctcctctcaacgcaatctttactagacaatccgttcaaccaggtctctgttaggtacaacgccgataaggaagagaggctcgacgctctcaagggttcgtagtgtttcgtcatgtctatcttgaccgactcgtcgtgttcttttcaactaattcctgatcttctctatggcatctgttcacagctgcaaacgccgcccaggagaagcgacttgccctctaaggctctttttctagcctacatcccctccccctacccccttccgcccttcttccattcctcgatctcccttcttccgttcgatggaagaaggaacagaaaaacatcaacatctccctatgccgtcactcttttcaaacccgctttccaattccaaaaccccaccgctgtatcacgccgagtctgatcgttttcttgaactctgtctagcttttcgaagaacaggacagagcggaacgtgaaaggctcgaacggagaggatggaaatcaggcgaaggaagacgaaagggattttgtgttcttccgacttgaggatagaatcatcttggatgtacttgtctctcgtcttttctctctctctttctttctgtttttctacttctaatttcctattctctgctagcgttcatccatgatgcagcttaaaagttttatctatcgctattcgtgatatatgaaccttttaactccactgcatcttgacggtcaaatttctcttctattcttttctacccatcgtttcgtttgtgattctttctttttcatatgattgaagatatcagaaggcacctatccgaactgctccctcatcctggtcctctagcctcaacctatccaacaagctgtctttccctaaaacgtccttccagatctgagctcttccttctggactctcgagcaaggtccgagatttagcatctttgtaggtaagatccaggaggatatacggtgggggcttgagagcatctgagagaccaagagagtatggttaacaaggcgatcaatgaagaaaggaaggagaggatgcgaaaaaagaagagtgaaaaagacgaactggctcgaataagttcaccgactcgatgaggggttccaactgccagagaaatctttgtcgtcgagagatacgtgatgtgctctgccaatttgaaatgtttggcgaacaactgtttggcgtgaacaacaaggaaaatgagcacagtcggccgattgagatggtgataaagtttattaaaaaaagggaatgtcgattaatattgatcggtcacacgttcttcaaaaggataaagagaaaagataagaactatcaaagaaaaagacaaaccttggcgatctctccgttccctttggagtctccagttgtttttccttttccttttccgttcgtctttcccttcccgtatcctttagccgaaccagtcgagtcttcgccttccaccacaggaacaacacctgattcctttgcgatgatatctcggagttcacgcacaaggtctgcgcatcggattccagaactggcgagaataagcacatgaggagctccgtttactgtgggaggactcttagggaggggcctaggaaggttttgcagcagagaggacaatgttggaggcgatggaatgctagtggatagttgaagaatggcagattcttgtattcatgaaagagatatattcggtgatgagcttgcgaagggtattggtcgcatagaaagatacacctaccaggaagttcccaatcatcccactcaagatcggataaggcgctcaaggcgagtcgttggttctttcgcaggaggctaagcaagccagacgtcgaggaagcctcggaggtcgagttgacaagagttgcttttgtcaaggagtcggtcattcgaagtttcttttttgggtatgaatatgaagattatgggtatagatacgggtgattatgtgtgcgtgtgtgcgtgcatttttgtagtgagacaagagatgaggatacgaaagatcatacggtctaggtcagctaagcgacgtgttttatccttcagtctttcttccgtcgatgacctgagagagagacaacggggacacatacctttttctccttaagcttctctttgtttcgcctctttttctccttcttcttttcctcggccgtcatgttggacatgtctactctagcagatgcacctgtctgaccgtcattctcgtcttcgtcatcctcgtcctcaccatcctgaccgccagcttttcgtttcgaaccggctatcggcttagaggtaggaatttctgggatgagtccctcgccttcgatatcggctgctccttcatcatcgtagacagatccttcaccctcggagagaaattcgtcggctccctgcacgtagtcgtcctctagatcgtcggccatggtgcaatgcatggtgaacagtcggaggtcgagagaaaagaaaggcgaatgaaattccgtgtggggcagaaatttgggggaagggtaagcacgttattttggggctgtgttcacgtgaccaacgcgttcaaagttcaacgccacaatcatccttcaacataccattcttcccttctttctttctctctttcctctttatccatccacccatccatcacccatagcattccttcctatcctcggcacccagatctctcagactcctctctactcttatgtctcaaaagtcaggcgcaaggccgtcgtcaacagctgatggtccgctctccagagcgtcactcgccaacgctcctcagcctaacggaggtccttcccgacggcaacaagagttcaatgcgggaaaacaatatgtgccgttttcgcacgatccggccaacaagggagcgtgagtgttagatccctctcagaagtaaataagacggctgttgttgtttgatcgtgtaaggaatgactagtagagatcaacgcggttcaaacaagaggcaaggaatgtactggcaaggagacgcgtctgtgaacctggttggtcagctagttggctagctagcccggccaccttagcaagagaggataaacgaaccaaatatagacaggcgagtcaacctagagattctctttaggttgctattgcactggaaacggatcagagttggttgtcttcgtgcagcttgaacaacttaagatcatgactcgtcatttcctctacgacgcgctccttactaatgccatgatgcctcttcgttttttcttggaaaatatatgatggttcatagaatcaccggaaagccaatgcctcaaaacgtacctcgtcgaggaccagacaactttgaggatatcgatgagttcttcaaatctcccgccgcaaatgcctcccgattcggcggtataaacttttccgccttgtcagacacgccaggaggtccgagtagctcgccgtacttgagtggatccatcacccggtcaggtagaagaagctcaatggatgtgaatgacgtggtcaaccaggctctgagaagggacatgagagaagggatgggagagtcactcagtccacaagagaagggttagtgctttttgctcggttgatctcgcccactaatcgtcaagtacgaatgagtatgaaaaaaccgtccgcgcggtgaactctggggtatccaccagaagattccgtgctctaaggctcattctttttcatggtcttcgttttcaacttgactcttagatacaccgtcgaagagatatatgccggtcgttcggagtacgtttatctaatttctcttcttcaccggatacatttctaatcgtgaatctcatcgcgctcttgaaactcttttttcttttttccttttccgaaaacagccgcatcagcctccacctcgttgacctctataacatcatcccgaaaacgaagtgaacctcagatttctgctgtcttccaacagtcctacgactcccttccttctcccaaccgatcccagagtcggaaatctagtcgaccatctcaagcagtttcccagcgaactatcgtttcagatgaagctcaacttactgagcggggtgatgatggtgagatcgaggccttcagaagaactgatgcccgattatctcaaggtcggcgctcgtctgctcatccggcgcctcggacgttcagctctcccttgcgagatgagttgacaaagccggcgcctgcgaatgatgcgtcgttcgcagccgatacaacggagtacatcaatggcgaggactttggaggcggacaagacgtgtattcggatgatgggattgaaggcgccatggacgagacgatcattgatgagggcgatagcaatttgtcgatgccccatagtctcagtcccggatcaggtcttggtcaaaaccaggtagaagaggaagaggaagaggaggaagaggaggaagaggcgcctgtcagaaaatacaagagtaaaggaaggacttcgactggatcaaacggatccacaaaacgacctcgggtagtcactatggacgaagatgaggaggaagaagatcagcatgctcagaatgaacaggatgattaccaaactggagatgctgccgtagacgacgtttttgatgatagtatacagtacgagaatgatgagtctgatcatgaggaggccccatcgcgcccgctccctgtccagaaggtacaaccgaaaaccaaagaggtcaaatcaaggaagaaaccgaaagttacacctgcccctactgcccgtcatagtaagtgcattctctcagtgctctagataatcttcttctgcagctgactgaccataatcgttctcttctttcatatcttgcgctgtatcagcattcgtggatgccaactctgatcacgatggagaagatgatggttccggtcaacggaaatctcgacgtcgtaaattccctgtcctcgagtattggcgaggggaacgagtagtctttggtcgtaaagaacacggaacggccccggttccagtctacaaaggaataatcgatccacccaaaccgcctccgcaacatctgagtcgggtcggccgagcaaggagtaagaagagccgggcggggtcttcagttccgagaggagcgagtgtcaagcgtgagggagaactcccggaggagactggttgggatcaggacacgagcgagatgggtcttgtgatggattatgtgaccaagactgacgttgagcgacgtaggtcctcccttctccttttactcaattaaaacggacctcggagatgtttgctaaccgcctgatgaattgcacgacgttgtatgtcttcctcaaatctacaggaattgcctatccatcgcatatgctcagctatcgaacaatgcctggagatacaaacggattcaagtttcaaaaggtcttgggagacgcaagctttgtggcctctgggatgcttgagattcctgtggggagtgagaaacctagcaaaccgacaaaagacaacacctacgtgagttgcgtttcttctgatgttcacggttggtgttgtgatatctggatcgagttacccaagctgatgtattgtttggttcaatagctgttcatcgttttggaaggagcggtcagcgtgaagatccatcgcacgatgttcaccatggctccacttggccaattcatggtaccacgaggtaagcgtcagaacattcgatgactgaattgatcttttttcccaaaggtagctaaacatcgttctttcattcttcatttggctcgtgtcatagggaatcaatactcgattacgacaatctctcgtcggcccgccaagctgttctttgctcaggcgagaaagatggcagcggatgaggatgaggtcatgccgatcggtgcgcctccctcatcccatcccacgtctaggaaaggagacgttagaaatgcagactagatagaatgaaaccgaggagcttccatgacccttgcgcgccgtgctctcctttcttgcatcgtccgttctttctttaccatcattgttatctctagcatctttatcacattgtccatccgttatctatcctttctctctctctccccatttcttcttcgactttgtttttcggtttttgtgtttcactctattgttcccttgtacttctccatcatgttttcctctttcttctttttctcgctcacttcctatcctttttcgttccttcgtcagcacgaccaacatacccttttacatgctctactctactctaataacttcacaccgttgccgataaagaaaatcatatgcattgtctgttttcgaactcatctggacatcgctacttgatcgacacgcgcgctcttgcaaaatcgcgtcggtcgtgcatatgaatctcccggccgtgtctgagacccgactcgctcctcgcctcattaccatcaccatccatctttcgacgctcgccaaacagctcataccagcctccacaagcttctgggttgtatttgtaccacacgtcgtgctcaggcgttcattgagcttaaaaaaattggcatctgtgtatgttctgtcctgaccgtgtcgtctttctttcgctcactccagctgactctatacattatcgaattcgcttatgctagatcgcacccggacgtcatgaccaacatgttctcctctggatctccttcatcttttctcctgtctcttctcctaatcctgacgattatcctccagatgatcaaccccactctcgcttcacctacaaacggtacctctcctgtgttgatcagaggaacgaatccacgtcaagtggattctggaccggcgttccctacgacgacagagttagctcagaacaaaccgtcccatcaagatttcgattgtcggccgtttggagaatgtgaacgatgtccggcttcgcaggtttgtctgacactttgtcttatctcggtgttcatcggtgttggcctcgtcctgagtcgttagctggttcaaactcaagacgctaaccaagctcattcacttgcgtcgttcggaaaacgatttcggatgccgtcatgaatagagacacgaacctttctgtcaaccgtacgggaatcgtagattactacactgtgtgcctaaaggaagccttcatcaccctaacaacccaggtggagatccgtctaccagtccgagttcacatgagctgcacgagaatgagatcccggcttgggaggcatgtgggagggttgtttcgaaagaacgaacagattactgggaatttgtcgtgcgtttctcctccttcttcttcttcttcttcttcacatgtctcatccctcaagacaaaactaacgaaaagtttcttgaaagacggtaaacatgctattctttgtgctagcaacgactctgatgctcctccgaggtcgaaagctggcgacacttcaataccggatgttggccgctcggatcgggatacctggtacaggtggaggcagtcgattccttgggttttctttatagagtggtcggtcgagatgaccgtctatgcgaatcagttgggaaggagatttggatctcgatcatatagtatttaattgccaaacttgataacttaggatgattcacaatgtctggctgccaaaggtaagttacgtgggtgaaggagcacaacaatctttcttgatttttgttttctcgctcctagtcgagtttctttcgtaaaaaacaagacgggatctcatcatacaagaaacaagaacaaggaagaagaacatacaaactataagaaaaatgacaacaaagaggaatggcaagacaacagaggattcaaaggaaaagaggttgatctctctgcgcgttttggtcggaagaacccattggtcgacaccgttcgcactgagaagaaagcatgatacaaccaagccggcaagaagacaaaagaggagggaagaaggaaagaagtgttcaagacaaagaggggtcaaaaaggacaaggaaggcctgaaccatacaaggatgaacaaaagatctctagtggtgagcgtcagaatgttcctgttcatatcgaacgccgctgtagattgttttgattcagttggaaaagctcaagtcgatgtcagcggagatcctgacaagtcttatttcctgggcagagagaaccttagataagactaaccagtaaccgcaactgtagtggttttgtatttgaacgtttcaggagaggccggtgaggttttgatgaaacgaaggcaaagaagcacacaaaagtcaactttactgtgaggattgctttagatggggttaggaatgagatagaggaaatccgacacgtacgatcttgggccgggctgatcgagattgatgtatactttaggatgaccaagggctcctcctcctattcaaaccagtaaaagtgttcaaaacatagacattcagatgatcgggttcgatactgagttggacgagtaggatccaatatgagaaagtctgtttcatccatttgggccggggcatgtctggtcggcataatctgcccagatcctcgccttcctgatacagtgacatggtctgtatccctccatcgacacttgtggttcgtctatccatccaaacctaaacttcccttccatccgtttcgttttctttgcttgctttgatcggtctcgctttacttgatagaaggaagaaagaaagagaagatgaactgaccaccatcacacacggccttcctgccgtgaaccatgatgaccgggacctgagagatcatctccatagcactctccggcttgggttggtactcgaggagagtctgctcgaatcgagccccagtgaatgcaaggtttcgaggtagctgagatggcgaccagctggatagttatcatcagacggagacgacaaaaaggaccagacaaacaagagtagaaagagtcaatagatttttcgagggcacacgatgaagatgaaacaagaaggaacgagcgaaaaggctaaaggatacactcacgtcgtagcgtagttaggactctgggcgacaagactgccggtgggcgtgttcttgttaggaatcgtgagaggagaacccgttgcggtgtttggggtataatcagccaaagagtttgccggaggtttaggcgaaggggactctggggtgtccaatcggaaagttgactgagagaacgctctggaaagagggacggatctacgggcgacgtatcgagcgagcatccttgctatagacgagagaaaggagagggatgaaagagatgatgggatggatgatggatgggatggtcgtttgatggtctttcaacagaaagacaaccaaccggaatcgaagcgttttagaagagatctctccgagttaaccctaacaggccacctgcgtggagcccatcaccttctatctactgaccactgaccgtctggtgctcatcttgtacccatcttgtacccatctgttgctcacccctgaccattagacgaccgttagagaccacatgagttcaaacaagtttgtgaaggcttctgcttgttgaaagaggaagggaaaaggagatgttgtgcgactttgtctaacaacctttttctgttggactaatttcatcaccgcttggccatctcatatcccttcttagtcgcatccgactcgtcctatttgacgcattcgacacgctcgttagtagttgtatatagccccgttagtttagataacatgcaactactcactccagtaacactctctcgattagctcacaccgagactgccgattcatatccagtatgcccaagaagctagacgggcagatctggacttgacggaagatgccattcgaaaagggtttcagactggtccggccgttccttatgattagatttcacccacccaagctttctctcgcttgtcaagactgaaacgatcgattccgactcttcgttgatgtgtcaacattccaaacgaccactagcatttccggcgttgaacaggcgattaccgctgtacggcgttcgagcgaacccaccgatcacatctgcagattggtggacgttcttgatcagatccaccttggtagatgccggagttccacctgatcgtccgtttctttttcttgctcctcttgtgcgtggagtatttcttgactgacgggcaaagtgatggaccggatggccgttttcctcattcaaacgcaacgctgcacggcgcgctacgaccgtgtgagacagatgtctcgaaagcgctacccacactcgcaccgcggttgatcgacaggttcagctcttcggaaggatacagatcgttcgacgatacgatcccctgtctgaccgcgctctcacagatgggtgtccgaactggtgtcttgtcgaacgctgatgatcggatctgttcgccttttcttctccttctgtttctttccttctttgacttactctcctgacttgtagaagggcaaatggctgtccttttgtgtgtgtgtgtgtgtgtgtctcacagtgatggttctcgactctttgtctataagcccactcctttcgagccccccgacgctgaactatacatcaggatattcgaagcctgatgctcggatctttcatttcgcgattgaccaagcccgagccggccgtcctcttgtctcttccggatacgagggtacaggcgcaggtgccaaccctcactcaggctgggcaggagtggcagagacagacggagaggacacgttgaaggatctgaagccggaagaagtcttgatggtgggcgatgagctagaagcgtccgtctctgtctctgtcttctcttttccttctctttcctttctcttcttttctcttcttgtcgtttgcttaccgttatttcaccctcgcttgctcaccggcccggctctctccctctctaaaagagactacaagggatctcttgaagccgggctccgatctctcctcatccgacggccgaccgaaccttcagatggcgctcatcgatctctacctgcccatgaatccgctgaattggagcgtctcggactcggttcagattcgggtgtgattgactcgttggatggcgcgatagactttgtcagacgatggaacgatccgcaggcgaatgcctagaccattttcgtagatcatttcacaacgttggggaacaacgcatccccagttctcgatctctcgtctgtacttcctcttttcttttcgtcacattatagaagaaccggttcatcaatatgaacgaacgagatagtagacatctatttagtggtaaaagatcaaagaaaagagaaacacaggtagcccaataaataattaaagataatgattaaagatgacagttcgagaaagagaagagaaccatatcaaggttaaaaagaaaagaaaagaggaaaagatatgggcgatagctcaatagataggaactagataaacagttgaagaccttgggtggcgcgttcggcgttccaaccgaaatcatccgtcgagtgtccatcgcaaggggtgtcaaagtcatcgagtaaggctggttggggaggagtgacaagctctgggccatcgtcatcgtctgacagatcatcgaacggaacgatcgaggtcgggcgtttcgccaccgggagcggcaggaacaactggggagggggcgaatgacgaggcgaggccggtcgagaaggaggaggcgaggttgtcgggtaggcatggttatgctcagtgtcttccattgtgaaagagagcagactgtccaccgagcccgttagggacgacatctcttcgtcgtctagatcgctttcgtcatcgtcatcgtcgacctcttggacttgaacgatagccgaggattcggacgagtgtgccgacgccggcgatggcacagacatcgaaccgggagcgatctcagagacgtcaccctcgtcgctgtcgagctggccgagagtgttctcgaaccattcttcctctcgaagtcgctgggcattgccggccgactcggcaacttgaatggcgttaaagatgaggactgatcggagtaggacgggtgcgtcgaccgggaggtacgacaggtactcaagcttctggtgggacagagctatcaacctttgggaccctccgtgggagtctttatagggaaagaagaatgaccaggggcttgataagcaaacagcgtcaaaaggtggagataagacgagatagagaagactcactgggttgtgtgtggaacattcttatgatgtaaacgttggatgtacaaacgagatgatacttgaggtgttctgagtttttttctgtgtgaactagaattgatttgtgtaggtgtttgcagtgttcttcagggaccacaagctgggaaatgatgccgtgtatatgggatttaatgtgaaggcaacgctagatgcttgatgtcggtagaggtggatcgtgtgcaaagttttcaacagaaggtttcggactgaaaggcatggtgttctggggaaggtgtctgaaggggtttcgaaaaagagatggtttcttttgtggatcgtctttttgttttggctgacagcagttggggttcaagtgggttcaggaacaggaacaggaaggaagtgaaggcgaaggaagtcgaggcgagagtgacgggaggaacggtgacaggaaggaagaagagaacaagagagaacattgttagtcaacgtgttcgagggctgagcagtatattcagggcaccgagtgaagtcagaacgaccccagagggtgaccaccttttgcaacagccacccattctcggagactatccagcagcaccacgtattcattctgccagtactcacctttctttcgtgtttgtctggttcgtgttcttagtttaacacatcgtgggcaaagagtatgatgatggggatgggatgaaagtagtttgttgggttggggagaaagaaagaaaaaagaagagaacgggacaaggcacggcctgtgggtggattatatacatacctcggccgagacggacctgtagagcacgaaaggtgactcgatggcgaaaaaagacaacaataaacgatcgaaacacgccgcggggaggctcgggcagggcggagatggtcaggcacaaaccggcagggcgaacgttcctggccagaagacaacgagtcaggggcgattaacccgagttaagcttgagtttatcttaagtgttggatttgactggattcgtatggggctagactgttctcgcctcatttattttttcgaattaatttttgattccttttccaatacaatcctctagtggactactctcaaaagatcagtcatcgttctttcgtctgtcgtattggctgcattccctcgcgttagttcatatcggctcatactatattattggctcatactgttgtatcgcttcttagattagagttgtctcttgctatttcattgcccctccccattgtatcagcgcacacaagcttggtcatttattctgttgccatcggtcgtcgttgatttggaatacaccctgaaacgttccttcttaatttgccattcgcacaaaaaaggacaaaagtccatttccgaattccgaccgttcatcccttaaacgttctgcttgccctcttttacatcttctatatacttcctatacatacttgtgtacatccctaatctctttcagccgccggtcttgccagccaactctcgtttcttccgggtctctatcttgatttggtcaaaccgttccctgaactttactagtgatgtcctctatcaagccagcaagaatgtagacacactcaacatcagtatccctgttggacattcttttggaaaggaagcccatagacactcacctgccgctcgttctccatccggagttgtagcacttgtctctcgagttcccgaatcttctgttgatctgtttaggaaagagaaaaatgacgaaagaaaaaaggagaaacccatctgtcagtacccggattcgatcaaagacaacactccaagaagatggaaaggccgaaccagcaggtaagctctctgtgccaccgatcaaccgactagcctccatcactcgttcttcctcatccctccatactctctcgacctccttccgtaaccgagtcatatgaaccggactgatactctgatgaagaaagcccgaacgaatacctaggttattcatgaccgatccagagtcgcctctttgttcttgctctcggtgttgccgttgttgttcttgttgttgttgctgctgctgcaacccataggcatgcgaggccaaagcatcgagcgatagacgaagtgactcgttctctaataacaattcttctctcgtttttgaggatggcctgaggtaaagggaaagaaaagttgtctcgatccgtgatctgtctacacctctatatatatata

SEQ ID NO: 593 - DNA, 88035 bp, Xanthophyllomyces dendrorhous
atataagagtacttacgctcggtcctctatctcaacccttgtcttcccatcgctcttctccttttcctttccattcgtgctcgaataagatgaatggtcgacctctggcagcaggcagaaagaatcctgactcgatcgggaagacgaagtagatctcgaaactacacacacatatacttgatctttttaggacacaagtacattcacgcgcatacaacattttctgccctcagagaactcaccttttttccgggtcgactttccagtcgatcgacgaccatcactactactgccgtccggtttgctcaaaggcaatgaagaactaggcgaggatgaaggtagaggcacagatagtcgacctgtagatggatcgatgatagatcccagaggcgcacttgcgaatgctacagccgggttcgaaaattcttgcagcattcctttcgtcgtttttgttgatcaagagttttatatttcaaagaaaaatccgtcagcaacagagagagatgataatgattcgatacaaagcacaccttcgactacgttccaaaaccgttgaaaaggatcggcctacagaagatgaaggatatgcgaagcgagagagaaaagtttatcacaccctcagcgcacagattttccggatggtgatactcatagatttgagactaggcaagtcccatagacagtgctaaccttctgatctttgagaaccatgaaagagcctgagatggccaaaagaggaaaaaaatcggaagaaggaaaaaggttcaaactctctatcgtttacggaaaatcgaaagacaaacgaacccgtagtaggcgagccagaaatcgattcgctctcctctcggaacccactgccactgccactccccgtcgcactcgcacttccagtcacacttccacccgaactgatcttggagaactccagatgccgctgaatggcagctcgctcagaagcctgcctcattagcccggtcctacctaccataccggtcggactgggaggcactaaagcaaaaggaggcgtgtttgggagtgaatttccattctcgcttaccgatgatctgcttccctgtcgagctcggggtgttatcggcgaggaggaaaatggagaggcagccaatcgatttggactagaacttggtccagaactcacactcggaattgacactctacgagatgaatccaaggccagtcgatcctgatgtgctttcaacgcccgaagcgctcgtttggcctgttctccgatacacacaaccggaaagagaaccaaaaaattcatcagaacgcaacgtctccactcatccggaaacacatcaaatctcaccccttcatccttcacaagtcgttcggcttcggcaaataatacagctgcttcttcgtgggccgctctggcttgaacgtgttggttgagtgacgtataaccttcggcctccgccgctttcttgtgagctcgaggtaacggcggtgattcagttggcatttcttcttctcctatcttctctccttgtcgggaagaattcgtacgaagcgaggatgggtcaaaagctagttatctgtgagtttaaggaagtggagatggaaatgtgctcaagatgaatggatggtcggttgagtgtgtggcaaaacgaaacggattcatcgtcatcaaatgatccgcaggcatgtttactcttaatcacaaccatgaccctcaaatccgttccctctccagagataacttcaaccatagtcgaagcaacgaaagaagaggaaaaggataacaatccaattgtgattatgacatagatagcgtatagagagaactatcataaaacgtatacatcagatgaacgatgtaagggaatgaaacatacataaggcataggggaccgtacacgcaagtcgatagtcaaactcaagaatagaaaaaagaaaagaaaaagcacagcgcatccttccgattgggagagaagaaaaaaatgaatccacaacggtagctcaacccttcaaagtccctttcaaacggctagtgaggtcttacatgacctgtgtcatcagataagaaagagaagaaacaaaaatcagatcagctactcgagagcgcagatgtccgaaaggtttccgaatgaagaagctcacccctccaaagccacctcctgctcccccgaatccgcctcctgctcctcttccgggtctaccacccaaacccatacccccgattcccatgcctccgatcccgcccatccctgggttccctccaccttgacctggaaacctcacacccatatccctgttctgtcccattccaggtggcataaactcatcgttgtccggctccccactccatccaccacctacaggcccgcctccaccaaaaccgccacctccaccgggaatacttcctgagaacggtgacacaggatcgaatctcgctccttgtggatgaccagggaacggaccaggctgtctttgggatcgatcggacgacggatggaacagtggatgagaaggatccatgtacatccctccttgagggttcatcccgccagaaccgagaccgccgataccaccgataggagggaacgtcgataccggacgataagccataggcgaagcagctagaggatccaggtcagcagcgccgatgctagctcgggacggattgtcaaacgtttgttgaccagtgttataaggaggagcagacggcattgatcgttccaagtttccgacaggttctgatcgtgattcttggagcgatgagtaagggggttgctgccttgatgaggacatatttccactgatgcccctttccttgctgtcgtataagaaagaaagaaaactctgatcacgtcagcactcatcgtttgtctaataagagtacatcgacaccaacctatcctctgtagattcctcttgatcttcgccctgggaggaatctaacttggaaagaatgtccttttggtacagctcaatcagtgtttgaagcttggaaggagacacaaagagcgggccgatctgatcggcgttcgtcttgtcagaactttgcgaagaatcttcaatggagaacggaaatgagtcaatcgatgcaatgtactcggataacgggatagccagatgatggttgttgtccttctaaagaatgctagaccattatgttgtcaataaagagctatcagtcatcgaaaggagaaaaactcaaaccttacctccacgtctaacacgccgaccacgactcttccacctcttccggccagccagaccttgaaagtaccgggaccttccgctcggatatattccaacactatctcccctggcgcgtctttggaccaggcagaaggaagaacattatcagccgaggaagcgagccggaagcctgctctagcatgtaaagtatggatgagcacgcccaaagcttcttgtggcgaggagagcgtcaagctagtttccgaaggcaggtagcctcgaatggaatcgtacacatcagagttaactgtcgaggacatttctgtaagcgtgagtaagtggatcagtccaatgagcaagaacgaagtgatggttaaagacacagatcgttgaacccactcatccatcaccaccaacaccaccaccaccatcacgatcgtcatctcttggttgatgttgaacgtggaaggttgaagcacagctttgttgaattatcaacagtgacgtttcttccggcacgttccgggctacagcagaaaaaaaaggaaaaaaaagttgaacaggtttaatcaaccctggttggaggattcgccagactcgtccaactcttcaccatactctcatccgccttgacctcaagcacccatgacgaccaagcgatcaccgtcaccgatcgataacgcggccaagaagctcaagccgagttctgcaagtcaaccggcggacttcaatcctcacctgtttgacccggctcagacggctactctcgctaaagaatatcagtccgccggaccgtacaaacactcggtcgtcgagtctctcttttcggatgatctcctcaaacaggtcctgactgaagtcaactctaaggatgatggaggagaaggaggactgggtggtttagttggctggggaatgaaggagaccgatatctacaaggttcgcacgtctccatccgaatcacctatactctcactctttccgggctttgcatattgaaatctaagctattgccctttataaaccgtcagatcaaccaatccttcgatctctcttctctttctcccgaacaccttcctcaagaacggctggacaagcttcctgcgctctgccaacttaaggaggccctgtactcgtccaagttcagaaattgggtgagagaagtcactgggtgcgggccactgtctcagaagaaggtggacggaagcaccacccggtataccaaggggtcagtctcaaattgaatttccatcttgaaaagacatccattatctgttcactgtctaaccgagtcgcttgcgagcttgccttcacagatgtcacttgctcttgcacgacgacgtgatctcaactcgacgaatctcctggatcttgtatcttccttcctcggcgtggcccacctcttatggcggtgcgctcgagctttacccggcgcttcctactccggacgtcccgttctcacccgaaaatccgcccaagacttggagagaggaaactgggtcggatgttttccctacgaaggtgattcccccaaagtggggtcaattcgtgttcttcgaggttcagcccggaaagagttatcattcggtcgaggaagtcgttgctcctgaaggcgtcgtcagacagagtatttcaggatggtggattagttctttcttaattactttctcttgagacacttgtcatcgtttgtaaagagtagaagactaatgctgggaacgtgatcatgtctttaggttccataagcctattgagggtgaagagggctacgaaggacccgaacaagaaggtctagcttcttctctccaacagattgtatgtatcatgttggacatcaaccgattgaggaagataggcgccaaaccattattgacactgacttcacaaaatgatcaatccattcctcttggtcttactcgaaataaattacaaataaacagacccagtcgcccctctcctctgtcttgacaccttacccagaggactctgaagtacctttgcccggaactcctcttacccctgacgaaatcactttcctcaagccttacttccatcctcagtaccttcaaagatcaacactctcgcttctctctcagcaatttggtgaacagtctttccttcttctcgaaaagtttttgcacccaactctggccaaagaactcgagggtctcatcgccgcccgagacaaagccgatgggcttgatctcgctagtcggcaaggcggacttgttccctctatggcggtaggggaaggtgtcgaaggctggcacgtcgtcggcccctcgacgaggcaacgtttcctctcactcgacgagccggaaggagccacctcattcgatcctacgggcagtccatcgagttctcccagtccgctcttgtcaacattattgacgactgtgttgcctagtcaagcgttcagaacttggttggcgctcatcaccggctttgttcctgtggctagacgactggaagctagaaggttcaggcctgggttggactacacactggctagaggagaggacgaggaggttaggctagactttagactaggcctgacccccggagagaagtgggaggacaaggaaggaggcgaagaatggggcgggtgggaggtcagtcccctcttgtaggttttgatgatcaaatctgatactgaacgcttcaaacatggccctcttcttgtctttacaggcttacctcgcccctccggacgatgatgatgacccagctgtttatcaatcgtccaaagcacaggccgcacagcatagccatgccgacggagaagaatgctcacacgaccactcgaaagatggagagaccaatggtgatgcggccgaggatgaggaagatgacgacgaagacgatggacctctattaacttctcaaccatcattcaactcggtcatgatcgttatgagagatgcaaaggtcatgaagtttactgtacgtcttcctaatctcactttccttgtatacctgaagtttgatcggtgaggatgctcgaactgactctccacaaaatctgtttttactgactggcttcttcagaaatacctcagcgccgctgccccaggttgccggtgggatatcggtggggagtgggaaattggtgctgtcgaggctgagagtgatgacgaggatggagaaggcgaagaagcttcctcgcaggacgcttaaccgcgatagataaaataaaagttttcatatttctcgttctggttctgtttcttccactcaacttatgatatcatcaaacagacagaaatcgcatacaagcttcaagaagacagaaagagatcacaaaaagaacaccgaatgacactgtttcttgctcatcccctccttcgctcttcctctagagctctttcaacgcacagccgtaccaatttatctatgccaggcgaccactcgtttacctctacaatctcccttgccgtcctctccgcgcgaatccggtcaagagttggtggccacgcagctagaagtcgagtgacgtagccctctttaatagaccgtgtcaggttatccatcaatgttccaatccgatcctgtcgagttgaaatgttaccaagatgttaatccggacaagggtgctaggagcttgcgcacgagatataacggactgaccaatacaaacgcgatatgggggggctcgtcctctctctctttttcttcctttccatccgcagatcgcatcaagacggcatggacgatgttagatcgaagtttcttcagttgaggggctagaaaggcgtgaaccattgcagtctatcgagcaccacgggtcagcacatgttggtcgttgagccaagagcctagataacaaacaactgacatccacagacatgcccacgaacaggttggctacaattctttcatggagctcgtctcgaagtccggccatgacttcttccaagagagtctgtactttaaactattacatgcatgtgagtatccggcagatactctgtatcagcctacagcatacagctcattacggtatcgatgcaagaaatattcaaaacgcacctcaatcattcgttccagctcttcatcaagagtgacacgcttctcctcgaccgaacaaattcttttctctactaagtcatcttcctcttctttgagaacagattccgtcagtttccgctcatagagtttgttcttagcctggcttttctcccccactttctctccgtcctcattctcatccacatcgtccgatctcttcccttcatgcatgaccttttcctcatcactaagatcaggttccctgtccttccaatacgcttcctggactttatcttgacactgaataatcaacatgtcttcagcgtcatccgccaacggatcgtcgcttccacaaaagctggtttggctaatcgttcgcctcataggcgacaatgtccatcttcttcctttgctctgtttctctttggatgattcctcagaagccgtcactcgaggtctcttcattggcgatgagtatgagtgtgtgggtacatcatcagcgcttgctcgtggtttaggagctggaagcaagggaacgactgtaggaaccacagcgatcgaggtagctcgacgggtcgagtgttgtttgggtcggacaccagttctaccgacggagactgaggagtgtcgtgaaccgggagaagagggcatgtcgctaagtaaaagaggatcctgctcgattttcaaataagaagacattgcggttgtttgaagaaccaaggacgcagagatgtatgtttcactatcttataggggaggaagttgacaggatacgtttgacagatttaggtcgttgaagctgtcagcatttactcagaacactgccaagtgcgcccaaccacgagattctcctttcaagagtcaagacaagaaagcatatattcatcggtgggtatatggaatggcaagataggggtaagctcaaaggacgagctgaagatagaaagtcagtctcagctcaaacaaccagaggctaaggatgggtcagagacttcgccaaaaattaggcagtagcagcgatggcagcctgcatggaaacacatcatatgttagctatagatacaagttaaagatttgcttaataggaatactgacctgagcgtcagcagacaggtggaagaaaccacaggtgttgaggagagcctcgacgctgacatcagcatcgacgtaaacggcagcctcgagagaggcgacgacatcaacaacggccgtggtggatttcgggacccagtatccacactatatccaacaacaaaataggaaaagaatcaacattcgcgctcaagaagcagataaaaagggcacgactaaccttgcccttcttggtgagatcagcaggccgagaagcaatgactccagaggcgacagcggcgacagtagcatcaatgtcaacaaagagatcgacaacgacgtcgagaccaagctacaaaacgatcgcaatggtcagctgtagaacgataaacagaaagatgaagaagtcgagacgtacgtggacatatccttgaacggataggtaggcatcgacggccgtcttgtcgttgatccagacgccggtggtagggtgccagtaaccaaactcgtaagcaggaggggccttccaccccttggtggggcacgtgtagtggagcgagtgatccttctttcgggaaagaccgctgacagcaagctcagctgcgacggtagcagagacctagagtaaacaaatacggccatgatcaactcatgaatgcctataaatgcgtctgggaaaggagctaaataggcttacatcgacgttggctttggcactcaaaagaccaagggcctggagagtggcagacacttcagcgtcgaggttgagatcgagaagatcacggttgtggtaggaggaggactaccaagaggaaacatcggaatgtgtgtcaggacgagatattatcatttgaatttggccagcaaagtgaacgtaccgcagatcgatcggagccagtaagactgacgacatcaccaaggatgctggcggatcctgacttggagctcgaggaagagtgggcgtcgtacctggcaaccatgccttcggcgttctcctgtgaaatgagagatgttgttcaagtcagaacgttcgagacgggcacacgaggaaagcggaaggaacaactcaccgagacaggggcagcctgaacggcagaagcgaaaagagcgagaccgagagagatggcggagaaggcaagcatgttgatattactcacaaatatggctgttgtcgaagttgttgacgggtggtagcttgttgttggctgggctgaagaaaaagttgaagcgagtgtgggaagtttagttagagaacgtgaagaacgaaagtagaagaaaaaaaagagagaggtcgaggtcgaaggcgaggaaaggttgttgatgaagaaagaatgagagagtggaaagaggacgaagaacgcaagactttataggacttttccttctttcccaaggaacatgttctgacaagcaaagacgtcagcaagcataaacagacataacaacaaccggggttgtttgcaaatatatcagtcgaggtgagaggaactgagctgaacgaggaacgttgtgttcccctcaccaaccaaaaccggcctggaccacacaagaccgaccttgagggtaaaggtccaagggtcagtcagttcccgttaacgggatcacatcctttgcgctcgatcaagtggaaacagatggatcaggtccggtcagtgtacggtcagcaaacatcgcgttgatggtgagtggtcaatcatcagttgccagttgttagtggtcagtcgttagtggtcagtcagatacagatgtatacgatgattcccttgaggatagaggagtatgcaagtcaacagacagacagacagataaacggacgtcagttagaatgaagactagggggtgatgtaatacgattatgtaagcaagattctaccacgtccagcgcctaacttgtgcccatcatcacccacctcccaccttccacctcccgtcacccatcctctgtctcgtcgcctctactctagtcatacaaccatcatcaaacaccatgcagacaacaatctcgcccatcaacagccagccagtgaaggagcttctgttgctttctcactcggaggtatgtcggttgtcggctcttctgcccctcgttacggtccttatatcttatcaggcacattttgatttgtaactaacatccttatttatcctctcactctatttctcatcaggtcaactctgcggtggaggcttcgatcaatgctcagaagtcatggaagaaggttcctttggacgagcgaattgccatctgtgaaaagttcttggttagcattccctgggttatccgactgaatcttgctcttctgagtctatcacagatcagatttaaccgatcgcatactctttatctaggtcgaactaaacaagctcaaagacgagatagcgtctgaattaactcaagagatgggccggtgagctctcgaatcgtcatcctcgataaacataatccgatgtgattcttaccatcatccttttgcgcagacctatccgatataccgccggggaagtcgcgggtgctatcggccgagccgaacacttgatctctatcgcccgagattccttggctgatgtgccagccgaacaaaaggacggattcacccgatacatcaaaaagaccccgcttggggtcgttcttgttatcgcaccctggaactatccttacctgtgcatgatcaactcggtcgtccctgccatcctcgctggtgagtcggcgctttctttctttgtttactggccttaacgtattaattcggcaacatccttgacacatatcccccacaggaaacactctacttcttaaaccttctcctcagactccttcttcagctcttcgacttcagcaggcgttccaagcggcttcgcttccagaggatgttatccagactctcgttctctcccaagacgacaccttgtcattagtttcagacggaagaatcggtttcgtcgcattcaccggatccgttgctggcggtaagggagtcgataaagctgctgccaacggacagggcttcaagggggtcggtttggagctcggaggaaaggatccggcttatgttagaaaggacgctgacttagcgtacacagtggaaaacctggtcgacggagcctactttaattctggacagtcatgttgctctgtagagcgaatttacgttcacgaatctctcttcgatacgttcgttgaaaagttcgtcgagaccaccaaggcttatgttgttggtgacccgacctcgtccgagacccagattggtcccgtcatctcgcttgcctcggccaagcgaatccaggctcagatcgatgaagccgtacaggctggcgccaagtcgctcattccccgagagcatttcaagtcagtcaaagagggcacgacctacgtccccccgcaggtgcttgtcgatgtctcacacgatatgaaggtcatgaccgaagagacctttggacctgtagtgggcatcatgaaagttcgtcatcattcatggatctcattgacccaagggcagctgctcctctttgatacacgcattgacattcgattctgttgaaataggtctcctcggatgaggaagctttgaagttgatgaatgactcaccttacggactcacggcgtccatttggacaaacgccgatgagcccagctctgtcaaggcttttgagacttttgttgaagacctagagagtacgtcgttttacctgtctcatgatgtctgcgcatcaagatcaaataaccaagctgatgggtcctgtgttgatgtctcaccttgtgtattcaccacgtacatcagctggaacggtcttcttgaacagatgcgatgttctcgacccggcgcttccttggacaggagtcaaagacaccggccgaggcgtctctctcagtggtttcggtaggcgtcatcccgattcttttctttcctcttctctttttgagggattattcacacgtagagattgactgacacttttcatgatggttctgctctcaggttttgaccagctcgttcgactcaagagcgtgcacatgaagaccaagatctagaacgccagataagcagaaaggaaaagatatcatatagacgattaatcatcaccatggccgatcaaagaaacgagagttgagttcggggttgggatgtatacaatgcatttccataatcaagttaggaagcctttatacacagaaggatcgtacataagtctttgtggtgcaaactcagttctttctcctttcagttcgctaccggcacaacccttctcgtctgcttttcgctcctctaagttctccgtgaagacttttgtttacattggcatatataaaaggaaacatcgctgccaaaaagcgtacagtagaacgtgaaaggaagttgagaaggaaaaggtctttttgttattattttatccgatttaatcctgtttacacaaagaaaatcacaagagatgagtacacgaagcgcttaatcaaggatataagacgacgaggagaaacgctgaggaaaagaatggacaaataacgactgacccagagtttcatcgtaccatcccaagaagcggtgatcaacttgctggattcatgaggtaaccagaggtgagagatcaccacttgtttatgagctctcaatcgtttcatcaactttccggtcttccagtcccagaagaccaggtttccttcagaatctcccgatgagatatctgtcaattgagaaagagggatagaaacatggagcgaaaataagggaaggggaggtgatcagattcgatgggtatagcgaatacagcgaaggatcacttacatcgaccatcaggggagaatccgacgccacaggcgtatccagcgatcgtatgcccagcaaagcgctattcccagagaaaatgaggaacaagggcaaagataagtgtcgacccagctttggacatccagaaagaatatttcaagttagatgaaagctggcgaaaagattagcgacgtaccttctttctgttttgtctgaatccatcagtcgagtagaccaagatctggttatccaagctctgagccgccaaccatttacctatttcattcgtttggatagtcagtgaggaacgtaagatcagtcatctatgctacatagatcaggataagaaaacagacacgcactattagggtgtaaagcgacagctggcatagaatgcatatcgggctccgctatcagcttgatcaccacagggatatcgtagtccctggatttttattcggttcgttgcgatagagaagatggaaggtcagctccgaagaaacaaatcgatcatggatgacaaattggggacgagacaggacaaataggcaaacgcaccaagctcgcattgacttatcgtccgatgtagtgacaaatcgtctgttctcatcaacgaacgtaatcgtgttgaccggtccgagatgttgatcgtactcctgagtgatagtatccgagttgatgtcgtactgtaaagatgccgtttcgatacatatataaagtcagacgtgcaaatctctgaagaaagcactgatagacgcgaaaacaagaaagaaaagtaagagaacgaatcgaacctgaatgattttcttgtcctgcataccagcgaggaagatgtgctgtttatcggcatctgggtgaaacgttaccacatgcggtcgttttccgttcgagaatgccttgatacattgtccggtctcagtatcccaaagtttcatctgcttgtcgtaagatgccgtgaggaatcttgatccgtcgttattgaaagcaacatccttgatggcttgagaatgacccataaatgtccgaagacagtttccatcgttgtaaacatcccaaagctatatcaaaaattcccaaaagttgatgatgatcagaaagagaggcatatgcatggcgcataggcataaataagaggagcgaggcgacgtagggtaagagcatataagaaaaagaccataccttgactttggagtccatacttccactcaataacaggtgaccagacccagggaatagtttcatactggccactcccttggtgtgtccggtgaaggtgtgaatgcattccttcgggaggaacgagtctaccggaggtgcgtccgcagaaagagagattcctttgtccgttgggacgtgcatgtacgttcgaccagcgtagtcggtgagcgatttgcctgtgaaagacgtacaaaagagccaacaaggatagatcatattaggatgttactgctcagcaaagtaccctgaaggggaaggagacgtaccatggaagattgatttttcctcgcctgcgccctttcgcttttcttttgcgctgcttgcagcctcttcccgtctcttcttctcctctcgccactcttttgcctcttcctccttctcttcatccacggctgcgtccccatcccaagtggcccacggtcccttgtaggcgtcttcaccatcgacgacggacaagtctcctttagcctgcctctttcgcttgaaatcctttttggccgctttcgtggctcgatgagaatcggccgtttggaaatcaagagcgatagcagaagcgatgttaccaatgatgggttgagcggtggagttaatggcggaagggttgtgagcgtagccgtggatcgcgaatgttcgttgttgggagtggaacgcgtgagcatccatcttttgctcctcgacatgacctgattaatgaagcaagcgaagatgttccgatgtgagcatgaggagcgatacacttttagaaaagcaagagcggaacgaaccggcgatagagttcattcctttgattcgagtgtcccaaggattctgagggccgaccactggtcgagacatctagagacgagtgaacagaagattgtaacgtatttgaactgttggtctgcccgttcgagtgtcaaggaagatgagagaagagactcacgtcagaatacgggatattgacgttcatcaccttatcggttggccgagtgatcaacgaagtttgcttattggggtcctgatcgatgtcgttttacacaagatgtcgatgttccatataaacgtgtcgaggcgcgtgaaggtacgtagtcggcagagaaatcatcagaacatactccttggtgccaaaccagataacgaaaagcaaaaaaggctgcgaaagaacaaacctcggcaaggacatcgggagcaacctgaatggtatcctttttgaaaccaggtagaacagaaggagcggtcgaagaagtaagagcagaaagattgaaggcgtctgattcgacctggctatcgctcagaggcttaacgacggaggctgtgctgctgttctgatcctcatcgtcatctgagctatactgaacgaggagagaggccatgatgggacgaatacacggctgctgatgatggtagttgctcggatggttgctaacatggctgggatgatggcctttggtgttggcaaaaggaggcgtaaccatgtgcgtaaccaccgcccatggtgacgaccgcttggccgtaaccactgccttggtgatcaccttctgctgatgtcgatttcatcatcaaacgaccatcttcagccatcatgggttccatcgccggtctcatcatcctttcggcctcgtccaggtaagtcagtagggtagctggatagatgtgtgatggaccaggttgttctgttgttgttgttggctgaatcatcccatcgtattctcttgatctttgccaggcaacctatcatctcgactccgttcaggccgccgtcccgacaatatgtatatacccatacctttctctctgctctcgacgcggctagcgattcaagcagcatatccagaggcccggcttctcctacagctcaattggaccctgttttgtgggtggacgagacagcaggtgtctgctgttggctgcagaaaggtggtctctggtttctgatatgcatcgacaaggagggtgagttggttggttcttcgatatcctgttgtcgctgtcaccggacgactctggcgctgaatttgagatctggaaaatattcgtttgtggttacctttagacaacccgctgataggttttaggttcttggaagtgttcctttcaattctagaaggatacataggcgacgtcagtcgatttctcaattgtaacagcggtatgcttgctagacaaagaactgacttgatcgatccgaacgcaaacggatacaaacaaacgaaaagatctccgaatcgcatctgaagagttgttttgacattgtctatcaagtaagcgcgtccatcgctattcacatttgaccgtcgttctgctgacattaacctcgaattgtcacgcatcgacagctactggaagagatgctggatgaaggctatcctcagacaaccgaagcaaacattctacgagaccttgtccttcctccctctttactctccaaagttttagatgttgccggcgtatcagggttagttatactctcgacctcagcgtcgtgtctacgcgtggactacaacgaaaatcaacagtcaacaatccagatggctaatctccaaacttactttttgattcatgtattgaaacggtggctacatgcagcttggggccaccatcgacacatgttccattttcgagctcaatcccatggagacggtcagacgtgaagcatagtagcaatgaaatattctttgattttgtagaatccgtccaaagcacagtcgatcggtaggtctgaattgtaaactctatcatagccttggacccatagctgaatgttgcgcttcacaccattcctccttgatatatcagccgtgggaatacaaagcggatgactcgatctggccgggttgattgtaatgcgcgactatcgggtacaccagatctcattctgacgttgacaaatccgtcagctgtctcaacaccagccttccatccctgcgttcggtaagttcattcttacactccgttcttttcttttctccttgaaatgtatcgttttaacgtgccctcctcattcatcgtgcctcaacagtctggccagatacttgaaagaccaggccttgtcctttgtaccaccggacggcatgttcaaattgatggattatataatcagccgtcctagtcatccctcggattcatcagctgtagggaatagaggagaggacaatgaaacaggagttcggttcgtgactaaggtgaaactctcagagcgaggtggtatgtagtttctcctcaacttatactccttagcgtccgtaactcaccttaaatccggtctatcattatccggaatttttttgttttactaggaaccttctctttgacagtccttccgacacatctatctagaccaatcgaaggcgccgtcgtcaaatggttcttgggacatgacgttgcgctggagaaagtctcagctacgctcagtcctggaggttcgaacgaggctgaagtaggcaggtgggaagtcgacgggatcgagaaggtctgtctaatctgttctcatctctctctttctttctcttcttccacttatatacttggagaatcgttggaggactaacctttcgtcatcctttgggattaaaagacattaatctggaaactcccgacgttaaatcctcgttcaaccgctcgtaacctctctggatcgtttgtcacctcgtacgtctctccttctctccttgttgtagacagaactgatcttttcatattaaatctttgcaaaccttcatgtgtctcatctcgctctttgtcaggtcgactgaaccactacctgatcctacgatccatttatcgtacacaatacatcaagcatccatctctcaagtccgtatcgcccaactcaaagtctctaatctcggcggaccaggtggtaaagggggacaacaacagccgaaagtatttagaggcgtaagagggagggttgaagcgcttgttgaagcacgctggtagacgatcatctcaagaagggtatccatattcgtcatatttcaataaaaaaaccatgcatcgggttttagggcatttaactgtgtgaaaacaaataacaataatacgagttcaagacgctttgttcaatggtatatttatgtcaagtatacggaaaggaaaggaaatcagaaggaggtcgtaaacagaatattgaaaaaagaccaaagcgagagcgtcaaatgatgaggggagatacaaagaaagatttgaaccatataaggaaaaagagtgtaagtgtatgagaaatctataatttaaggtctacgagttttggattgagaatcacaaaaattcacatcgttcatggaggttgaattcgatctgtaagaacgagaagcaagatattcatatctcatgaactagagaaaagatttaaactaaaagaaataagcatactcacgggcttgaaggtggtaggtttctatcaaacacactcatgctaaccaaactctcgctactcaatgtcaatctttccgcccaaccacctggagatgaacctctcctttcaatatctcctatcaaccagtcatcttctccatcatcctgagcttctcgtaaatcggcattgctaccggcaaatccgtgtgaaagggtgtaactagattgtctacttagaggcgataacgtgggggatatgggagagtttagaccgaaaggttggagttgttggggtgagggagtgtcaaagggatcgatctcaagatcgggtgaagaggttgctcctgttgaatcgagcacaatcaatggaatatctaagtaatacccggtattagttgctgatctacgttttgaaaaacgatagaggtcgaaagacagagatcgacctaccagatctgctttgcttctgaagagccaatttagtttccttctgatactgcaggtaccgccttctagtttgaattgcgaggaagagagatcgaattcgttcggtacttagagattcagtgactttgcgcacatgttttcttctacggacaagttcgtccaccctggtaaacgttaccaaccaaaagaatatggtggtaagtaaatacttcagggatccctgtcgatattcttccatgtgcttacagaagtgcatgctcgtcgtcgatcagtttgtagtgggacaaaagaataagcatattggcgaaagagattcccttcccagcttcttcggaaattatagcctcgtggtacaaccgaacattcaatgctttcctctgtctgacctgagtgaagtcaatcttggacaagaggactcgcaaagctcggacatcgattgtgtgaaatttaccgatgatgatatctgattcaagcgtatcagctgtcggttggcaaagtggaagcaaattggtaacggaagcttctcgcggatacgtccgaacctgtcaagcagagcagaagaagccacatctgagtcctctattcaacgaacactcagtgatgtcatcgggttagattcttacctcaaatactccagacaatttggcaaagaacggaataaattgctcttttatgatgtaacccgttctgtttggatcgaatagggcccatgcttttttgaatgcacctgatagatgttgcgaagttgtgttttcttttagccatcgagatcgaaaggcgatgagaagaaagaactaacggatttcctctcgatttaaagacgcctttcctggaacctggaatacatatgagaagctctcgacgacgatacctattcgacgatacaagactcagtatgaccacccacagacgagaacatacgtgtatttctaacaaactcaccagtgaacatgttgacaaacaaatacatggagattacgttccaagcaataaagattcctgtgcacaaaatgtcgacagatgtcaataaaagaacaagtgaaggatttgatactacattggtaatgaatagaaactcaccgtaagaccatgctgtgcttccacagtctgtgtcgaggtaattctcattttcaacgcatctcggatagttcaaagcataatcgtgcatgaacctatgatgaagactcaacaggtagatgttagtgttttgtttgtatcttgagatttggcgaagtgaagagttttttacccattccatccctcgcctgtactcatgaatgctaacatgaccacactgtttccaaaatcccggaagttggcgttttgtgtctcaccattcgaccacttggtgagactaaaaacttcgagtgtaacgatggagaagaacacgaagaaacaaaaccagagtaggaagagatttccgatagctggtgcgctcactctatgatagtttgtcagataaatataagaggcaagaagccagtttgttcatgctgtgcaccactacattgagaagaagagaactcacatggcagttttgaataactggtttaaactgctacttgtttgaacaagcttcaaaattataagaatcaggaaagccttttggatttggcctgagtaagtccatcccgaaggactactgaagatggaaccagcagtcgttgcaaatgttccgcagacggtaaccatgtcaaaaatggacctagaaaaacaatcgagatgaagttagaagccgtttcgttaataaaatcatacataacttaccagccattatctctgcgagaggaaaagaggaagttgtttggtcatcatgcgctactagtatcaagtgagatcgatcaagaaccagatgtatcttgtcttacttgaaactcttccagcctaacccgtatatacggatcacaatatcaatagcatacaagacggacaaggccaagaacaggcagtctacaaatggtgagacacgagtcgagcgaaaagagacatcatcagtaacgttcttgatcaagatagattagcaaagttatgcactgacttcgtataagcgctcctgtactgcctttcttgctcgagtcataggtgttagtcctacaggattcccgacacagcacaaagaaggcatataagacagacgaaggtcaaatcgaaagacgacaaaagaagtttgttacagctttaaaaaaagaaacttacgccatgattatcgtgtgaagaatatagcttgcaaacatcatgttcgcccaccagccatgtttagataccgctcgatcaaagcaccaagatcgtagggctagatatatgtatgtatgagaaacagtcaacacacatctgcgaataacaaagattgtctaattcaacctacctgatttgggtcgacgatgcggccttttagcctgtacaagtagccaaagaaaattatgaggacaaagccagataaccaacaattgagtttgaaaaggtcgaaccagacatgagacgagataaatgacttaccggtccttgcctggctatcgtcttcttgagattgatccattgcctgttcgatgtagaactgactgtcaatatacaacaaacatttacacacaaaagatatgaaaagcgcttgcctttggtcattcaagagaagagcggacccagaacgctttccatacgcctcaataatgatagtaacgaaaacttgaagcaagatgttcagcaggatgtcagttatacacaagggctatgagcttgatagactgaacctacgcgttagaataatgacagcgccaaactgaacatatggcgtcgaaaattgtttgcaaatggtggccagtcagtccaagctatttcggtcgacaggtcagagagtgacgaacaagattgtagaataagaagaatagcgcattccactgagaagcgttgatgttaggttgttggttaattttcgtgatgttcatgaccgaggccatcacgtcggtccagccttccaacgaaacaatctcgaagagaatcaagatggactgtcatttcgaatagatattcattttgcgtgcacatcataaaagttagtcttgtactgatagttctgtgctgttgttccttcacgtaccttttgaaagtcatcaaacgaccaaacgctatagaacaatgcaggttaggaaacaattacagacaatgatggagtcatgcggtttatcttaccttgcatcaacagtaggattcgtccagattctaggagtaagaaatcctgaaccaacgccatcgacaggagtcgcgagatactcgccaatacattcgcctcgagaacttatgctcgaatcattgcagctatagagcaggccagagaaacagttcacaccccagactgcataagggaccatgtagaggaggaccagcatcgacgcatctctgtgatgatatgagtattttgatgtcagatcgcatcgagtatgagcacattcaacgataacagacaaacacacatgattttccctcccccagcaaatacgacggagtaaagaatttcacgtgctcgtacggataacgtaatcaaacgcaaagaccgaacggctttgagagctcgagtgaatctggataaccctccataggtcatcaaacctggaaagtagcaggacaacatcattattgagaaagatgaattgtaaaggtaatttatgtcttgtcgactcactcgtcgtcgtgtttgccaataaacatatcaagatcacaaaatcgatacagttccaagtagaacgtaggtatgcgttcggacagaacatgactaataaacaagagttaaatcagctgatgtagatcgtatgaaaagcactgattgactgtacttacagccatcggctatcactttgatcatgaattctagaatgaacacccatgctagagcaatctctgtcaggtcgaaccagctttgcctgtcagcgatatgtgtggtataatatactcgtcctatgcgtaattatagatggatcagttaacaaagtttgaaactgcgagaatgacttgctagatgctcacgatagatgggagtggctactgccgcaacaacaattccagagaccacagttaatatcatcacaattttaagagcaaatgtcctactaggtcgagcagatctgccgaacaaacgatcacctagatgatgagagagctagcggttagattacaataacttctaatccgagcaaaatattaaatcaggttgactgaccatcagcagggggaaccatgctctgacagaactgccggataggattactctgagagaaaagccacaagctgacatcgaatccaggataggccgcgatgaactctacttggtaggcacgtttctcgcgaatagcttgtgcggcttcgtcagtcgtttcaattgatcgagcaaaatcactgtcgagaggattgtccaacaacatgttgaagacaagttttgagtaaggggtattaaatcaggtgtaagatcgaatgaaagcgcgcacaggtacctattcaaccccgtcggttgagctgaaggcgtgatgttgtctactcgacctttggaaagatctttgagagctatttcctcggctttggacttctcagcagctcttccaaacatgtttctgacaaaactgcgcattccttcttgtttcatctatacaagccgaaagtgaaatcaatgtgagtcagtaagagatcaaacatcaactcgtacagatgtaaacatacaccggcatctgttggaccaaaatctccatcggtgaggcttctcttgacaggaatgccagggttccgttgaacgattgtttgctttggtttgaaaaggaggtagggattgaatttgtccaagaaagtatcttgcggtcgtctgggctcggtcctccgcagaaatgcctcgatctgatggttcttctttgtttcttcggcaacggcgaagttcttgggaaagaaaaagaaaaaaggaggaaagaaagacgtcagcttcgtttgggcaaaagcagacaagaatgttctaacctcttgaatgaccgcgataaaaagctgaagcctatatatgagatgagttaagaatgaatcagcaactcatgctgctagcacgatatatatacagccatcagaatggaagagaacatacatgatgaaattcgaaaacatgaaccatagacacaagaaaattccagaaactactccttgtttgtatccgaattcagcatccagctattcaaatcgagttcaaattacaatgagttctgggcatgcagaaaatccatagctagaactttggtaatataatcttgatgaagacctactactgtatacaagggctctgtccagttttctgatgagaagatttgatacattcctataaaactgttgtaaatctgatcgaaagtgatcatggtttgcccatcttgttcgatatcattctgtaaaggaacaatcagaattatgttaggcttactgtggtatgtgcttatggtttgagcgcagggtcacttacttgaaacagttgcaaggcaaacatagcggcaatcaagatcgtcaaaactaaaaagagcgtcatattgagaagaccggatacgtgtccgaacacggcgatctggggagacgataatgaaaccggcaataaaatcaacgttgaaagcaagcaattcaccatgatcaagaacttaccaaaagaggtttcattcttggaacagctcttatagccaaagaatggacccacacaagttgtatgtaagcgggatttttggaatgacaacaagacaagaaatcaagggaatcaggagatgcttacaagatcactcggtaccatctagccaaaggaaatatcgtcaaccatccatgcgccaacgtcttctgaatgcccggcatttcgatgatagttgaaaccaaggcgagcaccaggtcaaagtcgttgacagcgtttgtgaagaaggacttcaaatcagggtagtggcctgcgatccggataaggatttccacgtcgaatgcaatggcagacacaagaaggacgatatctatcgtcaccatcaaattgccataaaatgcgtgatgagtttcgataaattagttcaaagtattcaaagataacaaacacagcgtactcatgcgattgtcgtatgatgtcggatcaacttctgtcttggtagcctgagctgcaagagtcagaatgataccaacgacccaaacgaaggacgttcggttgtaccatttcataatcgggttgttcttctgacgtcttttgttctcgttcgcgttccaatcatcggccgggtttccggtcatattcgaactgttcaaccaagtttgcgagatcagaacaaatatacaattgggaaattggaaggaatatatcaagtcaggccgtactctgttgcaccaaaagcgctgcgtttcgtttctgaacggatgtctgagaaggcgtttgcgatgacagcgacaaacaactgcgaaaaccacaagttgatgatgatgattctgaatcgagagacagtgattttagcgataaactaaagtatctaaaggaattcggatgaggtcatacataccctaggataaagtatacacaggcgaaccaatagtccgtttccatgacttggtactatcgccattgaaacagacatgaacgtggtcagaaaagttatgcatggtaatcaaaagcaactatgccatggtcgaggttgaagatgagaaactcaccatgacacttgaccacgagttagcactagcaatgataacgacttgcatcattgatcccaatatattatcaaatgtctgtccaacttcgacgctgtcatattgctcaatgcacctctggcccctgggacagatgtatccttttgcgaaattgacaatgggcaagtcgatatcatctatatagacaggccctttgttggaattcgagcttgcatcgtaccaaccaccacaagcatgacttaaagtcgttaaatcagacgagtttgtaggatctattcagagagtaagatcgtcgatttgagcgagaatacggatgaacgtccgttcatgacaacgtaacacgaagagttgaaaagagaggtattcaaacttactgacggtgtagcatgatcttctcatggaaccttggaagcactgcacacctatgatcgagaatatgccgattgagaacatcacaaagaaagcaacgttcaccaggagaggccctgctcttttcaatgaatggaggatagtctgtcaatccgtttatatgcatagaaaagagcaatcagtacgagtaacagctttcagagagcctcgtaaataagaagctcaccgctgttcccctcgtgatgactagcagtctgcctgtcctcagcacactcaaagctctgaaaatgaagaggtgcaacgtcggctgagcctccttacccgatgcgctcaggccaaacatgatccagaatgatatgatggcgagtaaatcgattcgatgccatgagtgtctcaaataaggtctcccgaacgaagctagttccctttgcttcttgagtgaatcttgaaatgggagttcaagagttgaagctcgggatttgattgatttgtgaaggaaaagagtatcacttgtggaaccagaagccgaacgggaaccgaattgatgagactgcgaggatgtagttgaacccagactaggtaagattgatggtaaagactcgatgtcgaacgtcggagtgatgggcaacggttcttcagtgatcgtccccggtgatcgtcgatttctcagcccaaaagaaccaatttctccgtctgtgcgttgcagactctgttgatctaggccgatctccggcatgatactaaacatgaactcatcgtcgtcgctatcttcaacctgttcgtaggtgtctgctctctcctgctcctgctccgcgcgctgtttccgctcccccatagccttctcctctcgagctttccaagcttcagaagttgttcccgtcagagccaacacggcccggaccttgatgactccgctcttgaatcttacgtttcgaggagtttctttggcgggggaagccagagggagggtgtttgaaatattgttactgtgaggagcgtcatttggatgacgggtatcggaagaaacggctgcaagagggattatggaagatggtgtggtttccttgggcgcaagagacttagattcagcaagcgaatgagcggtgaacgggtcgaaaatcaggccggagacaatgatgcgagcaaacatctcgagagtaaaaatgagaaagagagcaagcagacaccaatcttcccactgcatcccgatcgcttgagcagaagtcaatgctccctgaagaacgacaactacagcattggtgatgatcaacacgatgatgatgggttccgtcattctgattgacagatagaaacaacgtcaagttgaatatgagtgccattatcagaaattcttgaaacaagagagaacaaagaagggtagaggcaaatgatcgacagacttgttgctcatcaccttccagcacgcctttcttaacgggtgatccggccgaaagattcccaagctctttccaaccaaaggcccggatccgattaactttggaacagccttattcgtcatccccgccgggttcgagttgttactagcggagcttgcgaaactgggtcttcttgtcgaatttgctgtcccgtccccaattcctggagatgcgagtctaccgtccttgttcgacctccagggtctcttttggctcttgtcaacctcatccgatgtgtctcttatcctacgtctgatagattcgtcgtcctcgtcttcatcctcgcatggatcgttctcgtcccgaagctgcacggctccgtccgaagccgatatatagtctgctttattccttccgtccaaattgactaccttggaagaagcccttcggaaacctcgactgaccgctctcagcgtcgagctcgtctggaacgatgaactcggtatcgacaatgaaggtttctgtgctcttttcggtgaacggtcaggcgtgaagggatggtgatgttgagatccagaagggagattccggcgaggtgagattgtaaacctggaggcatgactcgagtgagtacgaggagaaagcggtatgcgagcttcatccacaacagatgtttctcctgatgaaccagattcatcctgtgatgagtggtgaccatcctgatgaaacggtgagaacagttccgaaggcagccgaggggataccggaggcgaatcgcgtggttgactttcggttgaaggagaagagggacgttcagccgagaatgatcccatgggagagtcatgactggacggtctgacggaaacaaagacacgttgtgaatacagactttctcgaggagattaggtacaagactagctcactctacagatgcaatctgcgccgaagtcgagatcgcgtgccgagggctcgttgaggaaccaagtaacgttggtattgaggctgaagctgaagccgaatagtgatctgaaaccagagacagaggtgagtctactgagggtgattcgatacgaccgatgtctaaattccgggtaggctgttctgatgaaggaggcagtgctgtttcgtctctaagatccgacgaaggtgagcctggggaagagtctagccctgttggtagctctgcaggctcagaaactgacatgacagtttactgtttcgtaggagatgacgggaagcaagaacaagatgagaagaaaaggtatcatgagaaaattaaattcaaaagacctcttgatctttcggacgcgacgttcaacccgagttgtcactcaccttgtctgggctttacgggcctgtaaggtatgtcgagcccgaccgatggagcttccgaacagatatcaaattcagtcgttgaatgcgatcctgacagaatagctctgaggagctatctaatgtctctcttttatgagcaatgatattatacgtgtagatgaattgtcgatctgtgaggatcaaaggatgaaatgaaacaggatgggatgttgagctggcttaagcaggatgtttctatatagaaacgtcatgtgtggcacgttcattgatatggtcattgctgtgctcttcaagtccttcttatacgtttaagcatcatgctattacactttgttcgttcgccaacgctctgtcttctgaacaagagtgtctttgctgtcagagagtatttcgtatcaaagtgtagcggccgagtagtttgttcgaaacttctcgtgttgacgtcgatatcatgaatttagtagaaaaatagatcgagatgatcgtgcagacgtggagaacgtatcttctcttcccctttgcacttctcgaaaagatagctttccacttatgcggagcctacattgtactccagtcagaaatctaaccggatgatataccttgtatgtacttgtatacaaccttgactatatgtgtctcttacgtttcccactttcagtacctgtgtgcatccttactgtcttgcttccaagcccgagcggccaagtacttgtatctcttcatcgctttccttctcttcgtagtcttttttttcttctctcttttctcttttcccttaagtttggattttgtcaccctcgttcggtatgccttcgtttgttatccttacaatgcctctatctctggcgcgcccatgatctgtcaagaacctaagcttcgaaacaactcctaacaacaaaacccatcattcaacaaagttgcaacataacagttgccgggctatttcgcccttccactatctcctctgaatacactggcccagctgctcggacccaactagttgagcgccgagagatctcaagctcccctttatttcactcccattcccctataaactctgcccatgattgccagaatggagggtcgtattctttggcatggcgtattaattgtatttggtatacctgtaggcaggaggaatgcatggagatgagaagaagcaagagcgagggaaccatgcaatgctgatcaaggaagttgtgcctacttctccacacaccgcggcagtacttggccgcgctgaacgccaggccgagacgtccttcgtgcttcttctataaagcctaggatctcagcctctatcgactcgtcttcttcttttctgaactggattcttatcagacgaccacaccggaacacacaaagaatctgtcatgactcaaccatctaaaacagtcgttgtccttggtggaggtggtcagtaatcattctgacgtcagatttcattgattcaaagtcttgatcgacatccatcattcaatcgatgatctggtcggttgcgcgagactcgacgaactctttgatccaactctctctttcatttctctttgtacaaacagtcatcgggtgcacgacggctctcattctggcagaaaagggatatgatgttgcaatcgttgcccgagatctcccaacggatgccctcagtcaatctttcgcaagcccttgggctgggtgcgcttcgcctatactttctttatggtcgtctcatcatcaatggaccaagtctaacaaaccattcatcgatttgaattcatagcgcaaactggcaccccttcaatggaagtactgatcaggtcaaacgatgggaaaccatgtcgtacccaaagctcaaagagctgggaaagcttggcctgacaagtcctcttaaatggatcgattacagtcttgacccagaatcggacaacagctgggtcaacgacgccttctacaacagcttgtgagctatcatgtttactgctgttatgttccagaatggtttcctcgatctacaaacgctcacccggttctacccgctcgatcagtatccctgacgtaagttcgcgtcaggccatacgctgaaaatgtgaggaaattaacctttgagcggtttatcatccttcagcacaagatcactccaaagaatcaactaccaaagtatgtgattatctaaatcccatactgaaatattggtgactctatacttacccatatcctgattctgcatgactcgaacaggcaatacttttctggctcctcgctcactgtacgttcgtctttcaattttcctcaaaaagcgcgtcctactcggcaaagcttatcttgaaagtatcaatactcgtattggaatgattcaactatcccaatagacattgtcactggctcctcccgtctacctcaagtatctttacgatcaactaaaggccaagaacgtaagattcattcgaaagaaagttgagtcaatcgatgaggccgccagggtcctaggcgagaaggccggctgtgttgtaaatgcgactggacttggtatgtgacttgccacgatgataagcgctgaagaagatcctcacttacccaagcttgttctcttccaggcgctctttctttgggaggcgttttcgaccaaaacgttgttcccatcagagggcaaacagtgcttgtaaaagccccttggctgtgagatcttctacaacttatgaacattttccatctatcgacaagtacacatcgtcttattgtttcgttattctttcccttctctgtgcagaaaaaacggtcttggagtggatggttcgtttgctcttctgtcatcccgatgcaatctcgtttgactcgaggttggttgtcttttttgcgccctacaggttttgaagatggtactttcacttacatcattcctcgaccggatggaaacgccattctcggtggtacaatgactgtatggccctctttccttcttctctggatttttatctcaaacttggccggatgataaccaaaaattcttccaacttgatacttgaacgggtgttgatagtacaacagctgggacacctcggtcgacccagagatcgcggatcggatcttgagaaatgcgttcaaagtgatgccagagctttccaagacaggcaaatttgatgggattcaggtcgtttctcacaatggtttgtaccatcactcaatcatgtttacgcaaatttcctactcttacgtttctggacaccatatgcgcaacacagtgggtctgcgacccggaaggaacggaggtccgaggttagagctcgagacgttaaggcttcctcgacaaggatctttgggaatgtcagatcctacctgggtcccgggagggaatgatgtcgaaactgttggagttgtacatgcctgtatgtctacccgccttttatgtttttacctagaataagggaattgacgggaagcttgtttggttattcggcattcaagacggtatcggaccggtacgtaataacaaacgcatcctctctctgaacagatgagacggacaagtttttttctgaattggccttcccgttgcatttgtgcgatctaaaggctggctaccaagcatcttggggaatggcccaagatgcatctgatctgtaagtcagccatcaccgatcacatatcgtccaattgtgtcaggttcttctcgacattgcctgatgagagcttgtgaatttgaattggaacagtgtggataaatatttcaggacgttgaaagaacagaacggaaagagccttcgaagggagagcaaactctgaagtgtccttgtgcttgcggattctttcatcgtccattgtctgttcttctgactcccatcttcttgatggtgatctcctctgcgcgagcgcgtcgatattctcttcttccgaaaatagatcatatagacagtcagggctcagtctcacgaatcgggttttcatttcttttttatttgtgactatcttgtatcagtgtcgttccctattttccatttccgatgaatagttgtttgtttatctattaacctattggccgagcatgccggacgccgccgagatgaccgtggtcgatctttaacattagatatgatgaaaccccccaaacgaagggaaaatcagcataatcgtttgaggcgagagtgaagaagagaagagaacggagaacgaaccgtttagcatctaggaaaagttcattcatctcgttgatatcctcaacttcgatttgcgttcgacctgccaactttgccaagatcgctgctggtgccaatagttgaagagcatatctgcgttcaaaacatggttcgtcgtggatgtcagacacgagccctgatctacagagatgaaagtgataacaggcagacagaaaaaaaaagaaagaaaagagacggacctcatcgagcttctctcgccttcatcggccaatcggcttaacgcgtcctcagccacgaccaaaccctcgacctctgctctgatacctagaacaagtttaacttcatccctatctaatgggaacgttctgacgatcatgcatctatccaatagatcgagcggtactccgtgaggagcttggatgccgactcctgatcctccaggctcggactcggttcctcgaatggtagacagtcctcggttggtggcgagaatgacgtgcggggaaataggtgattcaagagctcggttgagatatgtgaaacattcgatgtctaacatatgaacctggatggattgtgttgcgttcaagatgtcaaaaaggccgaggagtgaatttttgaaaagtctagtgataaagagaacggcaaaaaagagaagatagacatacctcatcgatgaacaagactcctggaaccaactctgcgataccctgctcgatgtatttattcacgaccttgttgatttctgctctcaacttatctgtaacctctgtcctgcctcctttgacgagctgacccatcacggacatgatgtcttgtccaccttgaggtcgagcgttggccatgtcgagatcgtgcaaggtgatgtcttgtacaagttccttgcgcttgtgaacttcgcccttaggaagcggaacataagactcagcctcgaggtcgtattccgatgagtatgcgtccgaccggccaactctctatttatcgggtgttcatagacgaataagtcaatttgagaacttaagcatagaccgcaaagataaaggcggaaatgatgattgcaaaccttgacggcgccagtgttggcctcgatatagataacatctccgacaacaaccttctccttctggatggcttcatagatgctagggtctaagcggagctgctttgttcctttagttgttttgagtccgatgacaacttgggagatcgtctttccgtaaccagacaatggattctcggcctctgtcggcgtcaactcggtcaactctccttcgtatacctccttagtttccttgactcgcaggcctgacgatagtgtcaagggaacagagacaaggtgatgtcagttcgtcaaaatctctgaaggtaggaaagaagggaagctgaaacgaaccgatagctcgcctgaagctctcgccaaggacctcggtcttcttcacctcacttgagtagacctcactaccaacgatcgggcagaacgggactttgcttccaagctcctgagcaacagccagcgccaacgcagtttttcctgttcctggtccaccggctaagagaagggctcttccggagaactttttcatctgaatgagagaggtgacgagtccacatgcctttagtcatatgttgagatgaaggagggatggaaaaagagggagatgagtacggttgtacatgcaagatacaaaaaagtgatcatgagattaaaacaaacctctcgggcctggacttgaccgataaaacctgccgagtttgagggtgcagttccatcttccaatagaccaagacccttactggattagagaaatgatggatattgatttagaagaaccagccataaggtgaacggtgaacgcgtttgagtagatcagtatgcagtcattcattacgcgactggagacttcgaaacagtctggagaacttacatgtgagagtgagtggcgattcgagagctcctatctgaagttcctggcgtgaccttcattgtgagatatagtcaacagagagagagaaggggatgagtgttggacggatgagtgctgaagagagtgtgtgcttttgggaaggtggaaattcctaggggcactctttagcggtgaaatcattacgtaatacactttccaatttccagatcgtttcaacttcctattgcgttctcccttctgcccacaccaccaccaccactactacatacatactcgtcttctttccctctttctagtcggattctgttcgttagcatcttgtatcgtatacattccttcctgtttctgtttgtaatctcaagatgggtgagtttctttgttcccatctttcctgctttctttctcgtgtgtgctgtgatcgaacggttcctgccagagaagcaccctgcccatcaccgccactaccgtctgtgcacatactgatcgtccatttgaacatacatttcatctatcttataggtattcccaaggtctgtcagcctctattttgccatagtacaccaattcaatcgaccagatagaatggtcgtgtatctcaatccttgctggttgggatcgacgatgtctgaagttctcgatctgacataagtgtcttgatcgttggctttccttgttgatcgtgctttcagtttttccgatatatctcgttcgtcgatatctctatctttccctttgaatcatgtctccggtatgatgatgaacgaggttcttatgtcgtattgcccttttacaattcagagagagatatcctctcacgtccgaactgatcgatgacaagtcaatcccgatgtttgacaacctttagttcgtccatctgccctgtttcgcttaatcgattctacgagcagctagactcattgaaactcgacatgatagtcttgatatgaatggtatcattcataactgtacccaccctccttcatctgaaggtgacgcttcgttcaggttaacagaggagcagatggttgtcgctatctttgcatacatcgagcatctcttttcaaaaattaagcctcaaaaggtcagtatagctcaattacttttccaaagacatctgcaagagactcttaccaatctctgtatgcatctttccacgcaggtttttttcatggccgttgatggagtggcccctcgagccaagatgaaccagcagcgatccagacggttcagaactgcccaagaagcgaaggagttggaagagaaggcgctcaggaagggagaggagatgcctaaagagcctgctttcgacagtaactgtattacccctggttcgttttctctcagtaccctctttccataatcgttcctgtcttcagtccaacctgacgctttcgatccgtctttgcatgcccattaggaaccccatttatgactcgactttcaaagcacttgcagtactttgtaaataagaagattgctgaggatactgaatggagaggagttgaagttatcctcagtggtcatgatgtaagtttctatcatgcgcccctgtcaggtttaaaatcggaattctgacccggcttttcttactgtgaattgaacaggtccctggagagggagaacataaaattcaggagtacattcgattaagcaaagctcaacccaaatagtcagtttttttaatcgcgctcgagttctgcttcacgtacaaacatcaagtttgactgatattcactttttgtcattgtagcaaccctaatactcggcattgtctgtacgggttggatgctgatctgataatgctgggactcttgagtcatgatccccacttttgtttgcttcgtgaagaagtgacatttggtagaaagtccaagaagagtggagggtaagtcaatgtgtatcatcgtcctcagcggaatactgaacaagcaacctctaacgtccttctttgctgaaataactagacttgaaacccagaatttctacttgatgcatttgtcactattgcgagagtacctcgatctagagttttcatctcttcgcctaacagatggcaattctactaatggaaacgcctcacatccgagccttcccttcgagtacgacctcgaaaagatcattgatgatttcattttgatggccgtgttcgttggaaacgatttccttccccatctgccagatttgcacatcaaccagggagcgatggaattgatttggggaatttataagaaggttttgcctcatgcaggtttgttttcgcccttatcgtcgttgtacacatcgatcaagatgattgatgagtagaccaatactacacttaatttcaataggaggttacatgaacgaatctggaaaaatcaacgttcagcggctacagcttgtcttagatgagctcgccaaattcgagatcgacactttcgagaagcattacgcggacgcaagctggaagagcggacgacacccagcgccaaaggcaaagaaggagattgttgcgttcgagatggctcgcaacagaggtggtctaggttcgtcttcccgttcattagagaactttgtttggatcatcaactaatcaacatcgatgctttttgcaacagttctgacaaaatctcaaaagacactctttgatcagatcaaggaattcattcgatcccatcctcagccttcatcagcagatcaactcaccctcgtcctccccttcttttcaatctccgatcgacaagtccttcaggacattgccgactctcttcatctttctcttgactgggatccttccgaggttgagctcagtggcgagcctagtgttgtgctttcattccaggatgcagcggacgagggagagtctgagatcgaattggacgcggatgaggaaggcagagaggcaatagagagggtgctcaagaaatgggaggctgctgaggtgatcgatcctgaaggaggacccaactcattcgagaacggaagtgggaaggacgcaaagaaatctaagaagaaggcgaagaaggagcccgaacaacctgatgaggaagaatacgacaagctgttactagaccagatggacgaatggaagctagcttattacagggtccgtctcgtttctgtacttgattgtaaagattacaagctctctaacaggggtttccgttcggtattatcatcgtggctctaggacaagctcgagttctcgctaaaggatgaccaccatcagatcgacgatttagtctacaattatgtggagggtcttcagtgggtcatgtattactattatgccggtgtagctagttggggttggtactacaaatatcactatgcgcctaggatctctggttagtccttcgatgtgtcctatcttacctccttagcctggtaggtcaatcccatgtctaatcttcttgagactttcccatccgggtgatccatttgtctccttagatctcaaaaatgtcgacaagatgtcattcaaattcgattatggaaagcccttcaagcctttcgagcagctcatgggagttttaccgtatgctagtagatctcatcttccagaagcctatagagtatgtatactacctttcttttctcaagcttgacattataaaactatcagaacctcttactcgtttgcttgtttcggtgattcctataataggatttgatgtccgaccccaattcccctatcttagatttttacccaacagagtttgaggctgatatgaacggaaagaaacaagagtgggaggctgtcgtcaaaatccctttcatcgatgagacgaggttgctgaaggccatggcctgtgagtttgttgattggctttgcgtctgcttcgctgcaacctaactctaagatatcgacattaatgacttgattgcttggtttcgttgtttcatcagcccgcgagcaccggcttaccccagatgaggcggctagaaacactcatggatcaagcttcaggttcatccatgacgactcaatcgatgctccctacccttcctccctctccggcttcttcccaatcatcgcccgagcacgatctcgcacagagacattcaccatgcctagcctagacggactggagctcatcgaaggacttttgaaaggagtccagctcggagcttccgcattggctggctttccttccgtcaacacccttcctcagcatgcccaacttgggttccatggtgtcaacgttcacaattcggatagtaagaaccagtcaatggtgatctcgatcgagaatgtctgggaaggacagaagattgaagacgtcgccagaaagatgatcggcaaacggacattcaccggttggccgttccttagggaggggctggttgtagcggtatctgacgagttattcaggtacactttagcctcggttggaggaaagaagaaagtggtttcatccccgcaagatggcgcagcaagaatgtcgtggaagaggaaggcggatggtattgagcaccggtattcaaaacgattcggaattttgacaggagatatcgacgtattattgcatgtcaggcccctaaaaggtgcgtggtttgcgtccatcattccgcattctctttcgtgttgacgtaatcacttctaacacctggatgatgtaaataggtctcaagcggacggaagacggcgcttttgtcaaagagtatcaagacaacgagattgagacggcccttcaactttctgttcctgaggttgagtgtgaagatgagcgatacaccgtgcgtacaattgtataagttgagttttttggtatcatacgcctgactcataccgctttcctcttctcgtctctgtcgtttcttttaggaaaaaccacccgtaagaattcaggatgaattccctcttggagaacgagtatttttcttgggcgagcacttctacggatccccggctcaagtcagccagaccacagacacgaccgtttctctgaagctagcctacttcccctccgagacccgtgatgtggcattgttccgggatgctgtcgctcgtcgtcacagtgggaactattacccgagtcatcacgtatctcgacagcttcgtatcagcggacttgccctgtccagaatcacttccagcttatttgttgtaaattcgcagggtaacaaggccaacttgggattaaatctcaagtttgagggtaaatcaatgaaggttcttggctactctaggaagagtgccaacggatgggaatatagtgatcaagccattaagttgattcaagagtacatggttcgtatgttttactggacgcttatcgtgtcggttgtgaagtatcaggtgttcgatgctaaccactgctcgactatccaaaacgtgatttcataggaggctttcccccaagtttttgccaacttggaaactaggcatgatggtggtacgttcatgaggttacatatatgctcttgcgttcgcctaattcttttcaataaccttcttctaatcatttgtattttctgttataggattcccgaccgcatcgcaatttttccctcgagagagagaacccgatcagcttgtggctgacatcaagaagtggtttgcaaccaagaagataaataacttggagccagtctcattgttggctgaacaaatggagtcggtatgttagattttctgcttctcttttccgtccgtcactacatatgattgacaacaatgtcaattattctttttcctaaaggaaactatcaaagttgtcgagaatttggccgacgagctaaacaagaagcgagtgaacgagcccatcaagcccgctattcttcagggtcttccgagacagtcaattcttaaacctgatcactctaggttcagactacaggaacagaagttcgctcttggagatcgagttgtgatggttgacgtcgctggaacgggtggagtgccgttaggattgaaaggaatcattgtcagtgtgaatacggctacggttgacgttgtctgggattccggtttcctgggtggatccaatttgggccacagatgctccgagttcaaaggatccaacatacccttctatgcctgcctcaacttgacgactccccagttcgtcgtgtccaagaatcctaagccagctgtcgcccctcaagtcccatttgcagttcctcatcacatggcaaggcccaacagcttcttcaagccggctcctcctcgaagcgcaaaggctcctgtgacaattctcggtcgaccaaacaaggaggcagctcgtgtagcccctgatgtgccctacaccaacgtcgctcaagggctaagaccatctcaggtgcctgagacccccatgtcgcacaaacagttcgtcctttcattttcgttccttcagatgacttgcatactaattttccatcttttcttctgctttcatctgtctcgtatcattcaggaacatgcaagctaccttgaactctttctcaggagcttcaagaggtggtcggggtcgaccttcacctcatgtcaatcagtctcatcagggccaacaggacaacgtctcccgaccacctgtggcatcatcatactcgcatgtaccccctccctcggtctcgacaaggccatccgggcaacaagggaacaggggccgaggtggcggaaggggcggaaggggtggaagaggacgaccccactctgaggccgcgcctgctcaagtctaaaggatctctctcagatcgaaaagaagataggaaatggaggaaagaggatgatggcctgaatcgttgcttgaagagtcaagaaaaggtgttgcaatcttttgggttatcggaattgtttgtgttttagacggatatgtacaaatattgttacaactcttgaaaagctaaatgtttaccactcgtttggaagaacataaatctatgaactttctagacctaacattctgataagaaagagctctttggactatctaaaagaaagtcgagtcggaccgatcttgtcttggcctgtaaacttttggactcatcgtaggatgatctctcactttgtaccaaagttttctccattctaacgggtcaccctattggaatgcaacaatcgagactctagtcagctctcacttctcgcaacttgtagagatagaaaaactccttgataacgacttactcgagctcgtttcatgatgatcgacgatccaaccgcgcccgacgtctggtctttcaaagcagtgatcactaacgctccatctaacaactgttttctagagtccctcaatagaaacttgatcctgccgccttcttctgatgtctctcctccgttcatcggtgaattaacatatgtttgtgttggttggagatgaacgattgccggatcctgcgttgtttcaagagagccggaagaagatgatggaggagggttcaagtactggacagtagggtttgaatctggaattgaccgaatgatttcgagtaagatcggaaggatattagaaggtggatacgttgaataacatcttgtcaactctggcacaagaatcttttgaccattaggcgcccattgagagatcatccctattgtttgggtgaactgcccggctggcatcgtagcgggcattcgaatggctggactaccgtcagagtcttcttcgtcgtcgtccattcggacgtcggcgttttgagaggaagggactggtcgactaggaccgctttgttgagatagtgccacactagtgaatgtatcgtgtgtcacagaatagcgtaaaccaattagtattcttttgttttctttatcgttgcctgatagagaacaggatgtttgcaagacaatcagaaagagcgaagaatgagagagcaagaaggcttacccaacaggaacagcaggctctgtgatctccatctcgcctgcgtcagttagacccttgagaagtctctgagcgagctctgcgcgacccatcatctgactcggtctacattagccgaacgacatgacgaaagtcaaggcccaaaaacacaagaaccatctgttagaagagcgattcatgtagatagaagctgaggaagaaccaccgaccgttgttggcaccacggatgaacccaaagttcttgcatggtgatccgtctcttgggatccacagcgagaagcctagagatcaaatctgtagggcatttcggataaaactcacggtcaacccacgtgtcaagagaaagagaagaagtcgtagaagatcaacctttcgcgtctccatgtagggtattccacggctcgaccctccagagctctccggtaagataagcgctgtactctggagaatgacgagtcggttcatcccatggagtgtcttttacatcaaacagagaacaacggataaagtcgatcagggcgagactcaaattgacaaagccgacagaaagatgattaagtgaacggccccgtacttccgcatagaagagtgaagagaacaacgcctgctccccatatatcaacaggctctgctcggtagtttcccggttcgttaagctgtccgattgtatcaaccactcaggtcagtaccgaaacggcaagtgtcttcccagtatcataccaaacaagaaaagttttttgatggacatacctcgggagcaatgtagggcagactgccgcatcttcctgagagcgttcgttcttgtccgttcaggcgaaagactgaacatagtccaaaatcagatatcttgacgtttccttgatcaaaatccaaagagtatatgacaaaatgtcatagtctcgcaagttagtaagatacatagttaaactgttgacgaggaaaccaaagagtgaacggacgtaccgaaactatccagaaggatattctctggtttgagatctcggtgtgcgactcctttcgaatggataaagttctagatagatgaaagaaacgcacgacgatattgaaagaaggatcaggttgtgagatttggtcaattaatggaagctggcaacacaaggagaattatttgatgcgtacaagcccttgaagaacttgataaaagaagaaatgtgcaagattgtcttccactccatagtttggtgcttttcaataatgtcaacttatgttccgttagagatcacgtatgtatcgcgaacaagtctctctacctgggctcattaaaactaaccaattttatcgaatagatctcctccagctgccagctcgagcaagacgaataatcccgggatatatctgtcgttttgctctactagcactgcatccatgaactccaggatattctcatgtttcatcatccgatgaactttgacctccttctcgagttccttcctcgacggtcttggttgaccggggaaatctccagaagatccagaagcaaagatgtttatgactttgcaggcagcagaagtttctgtctttgggttgatagctaggtatactctgtttgtcgtcagcggtccaacaatcgacaattcagccctgaggaaacatgacacttcatctacagaaagatgggctggacatactttgaaaatccacctccaccgatgacctgacggatttggaaccctctgacatccttgaacttgagcgaatacgcttgggatgagtggctagacatatcttcactccgagctgcttaaagaacaagtagaaaagagaaaaaaaagaaaaaagaatgtaagaaactatgagaagagagaaggaggtgacagagggaaaatagttttcggtgtatgtacgtgtagtgatttaatgacagacgcgtcattcattaaaccacgcgtcgacgcgttcgcgttaaccctaacatcgactgctgttctccctacgatgatctagtgtttagtaaagagattctcatgaatgccctccttctcattcgatggtcttaatttttttttctcgtttttccttgacaaagtagacgacatgtgatctggtgatcatgctttcaccatgattctggtagtttttgaggagaatacaatagaatacaagtggtccttccagtcctccacctttgatcgtccatccatctccaccatattcgactgcgggagtcgaatagttttcctgatgggattacatgagtcttctagatatcgagtgctaagattgagtagtttaggattgcacaaaaggagagagacaaatcgcgattagctaaaaagcgagacgaggatgaagatcgataacgagcaagagaaagccaacgagtagaagaagagcgaacctctcttcataagttgccaggtagtaaatgatatactgtttcacccccccaggaaaaaagaaaagaaagaaaaaggaagaaaaggaataaaaaggtggtaaaaagaagaatggataagtataccacagtgagccttttccgaatctaaaccggacaaagcaaggaagagacgacataaagaagagatagagtagaggcactgacctcgtcattggtacaaccttcaaccagccaataccaagcccaacatagaaccccttccagccaccttcccgccacaccattctgacagtctctttccagccaaagagtccgccaggtctcgagactccaccgacctgcatccgtcttctgacgacttcgaacggataactagccgtttgactggcgagacctgctactgctccgcacgtcaggtcgactgatgtccggtacgattcgcggagccaagtaggtacagcagactttagacgaccataggtgagaaaggagatcccagcatagggtaccatgccgaggacggtgatggtgaatcctctatagaacggagcgagcgggtggtagacgaatagtttattcatgccggctgaaaatcgatggccgactgatgcactagggttggcggatgatgaaaggctcccggctgtaagtgtcgatttggggtatggattcgaattgggagtgggatgttcgttatatatcgttcggatgacttttgttaatgaactcggctctagtgatcgcgtctggtaagccattcgaacacggatgagttctagagggtatgtacaaaacacggctgctacacctgtggaagggtttgatatcatatcgaagaataaaacatttttaggagagagaagaaaaactaagacgattgaacacgatgaatgagcaacaaaccagaagtggcgcctgctgcgaataaaagtgcgctcgtttcttgcgcttttgtgggcatgagaaactattagtgatgagagaggatcgagaagaggaaaaaacgaggtcggttagcctgttaggcgtctttcacggatgcgttaagcgaacgtgtaaactgacatgatgaacccggtcatacaacataaacttgacgcctgcataaggaaaaactctgagtaatgtggcaaggtgaccctgaagaagacccctgactccgtgccctcgatagatatcttgtattgaaagaccgagccctctgaaagagcctatgtccgccaagaaagttggataggtgagtaattgactaggcgcgaaaagagacagagacatctgagcaagtgataagtacccttatatttctcgaaatcctggtttgacgtttgaaagagaatcttcacccgatcaagaggagcaatggcggttttagcctgtacgtcagaagaagcagatcaaaaggttgatcaatgagcgtatgaagcgaaagatggtggaatggacctttgcgaggctgtatactcgaacggtggtgcaaataccaaaggagacacactcactacacatcctgcaattccaccagcaattccgcttctaacggctgaggttataaagagttggagagaaagtcaaatagttcgttcaaaacaactgatttggtagaaagaagaggcgaggaggaatactgagcgaatgagcacagataggatgaacccaccaaaatcccagctgtttttatctgcttttgcgcgtgaatgggatcgttgtagccaagtgagggatacttcgtctggaattccaaccggagggctcatctagcggaaggagtgggaggaaggggatgggacaagaagagagagaggaaggaagagaaagaagaacgttgagtatagacaagatagagtcgacagtgcggcaaagacgatgaaaatgagcgaaggatttcgattagacggaatcggccgggagcgggtaagcgaggaaggctcgtgcgtggcgaggtcacgtgtgttgttgcgtttgacacgtaaccatgatctggccgacaccccaaaagcagtccaaacgaggcccaaggcttgtggttgatgatgtcagaacctctgagattagattagattggcatcgaacaaatcattcgtcagctcatcgaactctatcgatggacgattcggatgacatcatttggccagagcctacacaaagggaagcgtcgacggatggcgcgtccagcctgcggacccacaggagggaccgatgggacgagatgggtgcgggagagatccaggcagcgcaggcacgaaagcaggcatagtcagaggcacgagcacagccagggcgcccagaaacaggcaccgagagcggtgagatcatcaggaacagaaaaagatgtcatgcgatccggcagccgtcgacaccgggaggcctgtgcgtgtgatgcaatcgcctggtcggattctaaactacaccagtctattctcgtctggaaggaaaaaaaaagatacttaaaccaagcctccatctcgtttgccatctcgctcttgctttctttcccccaccttctctgcacactcttgtatccacaaagcagctcatcacatattccatatccatacctccaacctatcgttttttgtttgaaccatgtcctctaccaactagtttgttacatttgtgttcttctagtcctcgctcatctgaaagctatgactgacactcctttctacttgccatctcacaaccacatagcaccactactcccgggcccgacagacctattgaaacctcggactctactaagacgtcgtccggaggggagactaactacggtgatcgaaacgtctatggatctgccggtcaaggtatccaacatcagcctcacaactctggacttggccagggtgctgggtactccaccggatctactgccggctactctactggttccactaccggatactctaccggatccaccgtcggatctacgactggccaccacacccacgaacaccacgcaactggcgttcctcgtgaggctaacacctctttgactggcggcgtctctgaccagcacactcaccactaccacgctggatctgctggtaccggtctgggagctggtgccgccgcgggatcccttggtagtggcgttgggtctgacacttaccgaagtgaacagaagcatgttccctaccaaaacgctaccggacacggcactgagggagcccagtatgcttctggccaagctaccggtccagagatcacggctggacatgctcacgtacgttcaacggccagctttgcaacaagctctcagatagcttagcttaaatggtttccttttgtcattgctttttagactggctccgaggcgcccgagagaaccgcctatgggcgaggatctggattgcccctggccgagagtggagccggaaaggacaacagtaagcgttgtttagagacgcgtgcagtgttgtatcgggaacgtagctcatttgttcatctttcttcacctactcagccggcgcgggctacggccaccgggtgaacgacgccatccacgacgacaactcgatcgacaggcgaacccagaacacgaacgacttgatcgacagcaagaccaagagtgttccttctatgaacactcatgacaatgtgaccggatctgggacctccagcgccggacctaccggagcgactggtacaaccggagccgtcgctggtgctcaccatggagaggccggtggacttcacaagacttcagcgaccgacaccactgaccacaagcccagtacgtgaaaccaagactcgttccaagaacacttcaatctgcgtactaaacatcagttctcttttgacccacagccttgatggagaagatcaagaacatcatttaagtatctacctatatgcttagttgcctgtctttcccgctgcctctactattactgcttgtagccctattcatctgtacacgaatgttatgaaacacaagatcccttatatacatgtattttcgaggttcattgaagctaagttgtggtcattgcaaaaccttgagatgcaggtagatgaatgatcagatctcagggagtgcagacaatgaggactgcataacagccggctgcttgacgcgagctgggcggcagatggagaagacatcttaactaccaccattgccatcatcacctcttcaaccgggacaccgacatattaatccaacccagcccaacctaggtctttcaactcatcgctcacaatccagatctcgaaggaaattcatcgttccctgtagtgtctgtgacacacacacacacacaacctgactatgctttctatcccggcagatacatatatccacaatctagcaacattcatccagtcaaactccacccgtctagccgcttcgtcctcatcttcccgtcgtccaccttcttcatcttcattttttccgtcactttcattctcttcaactaagccactcgtactccgtatcacccctcagaacctgttctatgtgctacttcgttttcaagccatcggattggatgttggagaactcgatcagctactagaggccggcgttcgagatgctgttgtctttggcgaaacatcgttcaaaccatcgggtcgagacggcaacagaaacggtaaaggctcaggtgatgcgaatagaaagggagggaaaggatcatcggactggatggaaaccggcagcttcatgagcgctgtcagcgccgtgagtacgctaagcctgggaggttggtggagtgttggaaaagttcgggatccaggtacgtttctctccttcttgtctctccttcaaatctacttcttctttgtttcgattttgtgtctctttgttgagagaacataaaatcgaaggaagctacgacaatatgaatcgtcctgaagttcttggtcggagtctttcgatgatgaaccatccatcaactcaaggtgaacaagaagacggagctgaccaacgtgtttgagatcgatttgcgcattgggcatccaaatacagacaccgacttgaagctcatctactcggctttcacaaagttgccctctttggttgtctattcatctggttgggaggacgatgtgattgaggagatggcaggaagcgggccgttggacacggcagttcctttgaaagtattcaagaacctacaatcgtgcgtccgctcggtcttgttttatcgtcattctcgttcagtattttctccaggataacatgtttctctcggaaatctatttgcttcatccggctgtcgaatgatcttcatgtgatacagattggagattcactctataccaccctcgatcttgctcatacctccttcacccatccttcgatcacttactgttaaatccctcaattcatcctccatggatgacgaggggctgtggatcttgcctcttctgtttgggcccgaacaagaaggaggcacttcgcactctaggaaaaggatagatcaagatgtggttttggaggaagaagaggatgaagctgaaggcgaaggacacgcggagggaagcagcaaggtcggcgccatcgaaccaacagcatcgtcttccgcaaaatccagccctcttaaattcccatatctctcccatcttggactttcttcaacaaacctactcacgttccccactcttccggccgacctgccatcgatcgtctctctagatttatcctcaaatcttctgatagaggtccctgcgtcgttgaaaggattgacaaggttgacgagtctcaatctaggaggaaatatgatcgactcgcttcgcggaattgacaaaattctacctggctcttcccaaatacctaaatcgagcgtatcatacgctggcaggccgcgcccttctcttcattctcaccactcgtactctggactgagagtgatcagtctagataacaatcggcttgccaaccttcacggcctatccctcatcctgactcttgaacggatatctctccgtggcaaccaactcactgagtctcttgagctcactcggctcgtcacccttcctgtgctcaaagatttatacgtgctcccacagccattcttaagtaatccggcggaggacgattggaaagttggggtgtgggaagcattcatcaaggagggtagaggtgaggacgacatcatgttggacggtgttgggtgcgggtgggtcgaaaagaaaaagatgagggcttcggtagggacggtcgtttcgacgaataacaggcgggtgtcagcgccggtcgttgttggtgatggtggtgagaccggatattcactgaaccctgaggttcttaacgtcagtagcacagaagggctacgaaaccaaaagtctctgaacgatctgaaaccatctaatcccaagactgtatcctcagcgcctcccacaccccgttcatcggctcgaccgaatcatcataccggaacgatccgaaactcatcatcctttcctgcaagacgggatgctctggcttcgatgtctcgttcgaatgcgcacgcgcacgcacattcgatcgcccggacgaagagacgacgtcaaagaatcgtcaatttatccggtgaacccgaatctggtgtcggaacaggtttagaaagaatcataggggacgatagcgagaactcgacagggacagaccaaattaagagtgaggacgaactccggcaaggtggaaaaggagggagaggtcgatctaaaactggtgatccttcgtcaacctcggctggctcttcatctatatcagctcttcatgcttcattatcttcaccttcatctccttatcggtcgtctcaacctacccgccagccaggtatctcgaccacaatcgacgcatccccacgtcgtcacactcattcaccaccacaaccgactcagctgaacactggttctttagccgagttggagtcaggcgaggctttcaggaagaagctcgaagcgatgcgatccgaagtaggggatagctggctgagagttttgacagcaggagttgggcccaaaggttccgccagctcaagtgacggtggaagtggaagcggaggcggaggtagaagtccgagcggagagaaatacacacgggttgatgaacttcctactgctcctgcagttatacccgctgctgctgctgctactagtagtgctgaaatcgcgccttcctctttggaagaaattctggaaagccctgcgcgtagagagcaaaaagaagaaacaagaactccgactgatttaattccggtggaagaagaagaggaggagacgaaggaggaggacaacaagaaggctgatgaggatgaggtcgtcgtgaagagggttgtcaagaagaagaaaaagaaaaaggggaaagtgacgtgaacgacggtgggagattgtccttcgacggagaaagaatagcactgttgatcatgaggttcgatgccatgaagatcgtctttctcatcagttcctgtgaatctgacggtgtatcgttctttttgcgcgaaaagtgagatcaaatagttataaatcttccatcaacaaaatggatagcacaagataaagcataagatcaagatacaatggcattaagtcgaagaatcatctggctctcggaacttcaagattttcatctaatacggcataagcctttctctctccttttgagcttcgatcaaccgtctctcatcctctccaatctcatatctctgctctcgttgaccactacctatccgagcgtgtttatactctctttcctctctctcccagtgcatttcttcacttccaaaccgttcttcgacacgcggtagaggcccctcctccatcttcacatcatcctcgtttcctccatcactatcactactctgatcatgttggaaatccgaaggaacgaggaaaggctcgataggtattcgaagccggattttacgagaatgaagaagatcgtacgtttcttcgagttctcttgtcgtaaaatgggatcgaaggggaccgaagggtaaaatgtaaagttctgttatatcggtttgttcggagaatgcaacaaagtagagtagaacaccgtttctgatgatcagttttgtgaacaattcaagacacaggaagaaacatgagaaataagacaaacctttcgaccaaggacaggcgttgattgctctaaagaacaatgccttccccctagatccttgtccaaggagaatttcatgattgattgcgagcctccatagagtgacagatgaatttatcctgttaactcaaagcagaaggaaaccaaagacgatataagtcatcaaccaacgagcacagagtgaagtgggagtgaagatgaggacaggaaagagagaagcgcgtacccaggcttgtcgaacgctctttcaaacaatcgtctcacagcatgctcattatgccttcctttagtcatcgacagttccaaccagatggcgaacaaccacccatttacatcccctcctccatcttcgacacgtccactcaaaacagtagtttccaacatctttctagctcgattataaaacttgagcctcatctcggttagagcataaaggcttaggaaagaagtattatgtgggaatatggtgatcgcccgttcgaggacggatcgaattagagctgggcgatagggagagggagtcagtgtgtgtttgtatagtagatcggtataaagctattatgtccagaaatcggagagatatcagccctgtgtcggttgaaaaggtccaggatgcaatagaaagacagaaaagaactgaccaagtagatctcttccttctccaaagcagacatcatgagggaggaatccagatgtcgttcaaaaacatctgctgcggcttccaaacctatggtcaagtactcgaaaagcgcggagaggaagatcagatgggtcgtgttttgggtaagtgatgtaggtgcctctggggacaaggatgatgagatcactccgctaaaaaactgtagagagaggggttgaagaggtcaggtgagttctttatcaatcagagccaagagagacaaagaaagaaatctctacttgacgggtcttgaggatctcgatagaagtcaagtcaagagcagcagtaggtggtgtagacaaccgttctgatggttcgatgccatcataagaatatcatatgtacgtttagaaatatattgcacgattatgttcatgaagaagagggatggaacagacctaaagatatagcattggtagctgaagcaatcacctcaatcaatctcttccctcccacaccccactcccattccaactccgcccatcctctccatagaacccaactctgccctcttcccgctttgtggagattaaccacttctttggacatcatcgacaaagctgtcaggtagacttttcgagattcatcaggtttagaccgttgacgttctaggcgggcatacccgtcccatagtggtagggaatctcggttctcggccaagattggtttcgccaatttgatcgctctgaatggttgttattcgaattgaagtgtagagcgcatcagatgttatgagatataggtttgagtgtttataagtaaacttacgatttgacgttgtgagcagcttcaaatgagaatgcatatagagaaaagatcggatcgggattcaatgttcgaacttggaataggatattactaaaaacgcacgatcacaaagaggatcgagtcaacaaaaaagcctagtgatagggaaggcactatcaacaacggtcgggaataagattcagacgaacctgatgagcgtcctttggctgctattaaactcggccttttcaaagatcggaaaaccgccttgtccgctttctcttctgaacagatcagccactccaactggtctgactttaaccggacacccccaaggggactttactccaccttcgacttccaactcgactccaccatcgcccaacagttttctctttttcgtctctttatcgactgtcagatgctccggccagaacctcgacgaccctgccttgcctgttgtactagcagccaagaaaggatccgagaagaacgcagccgaggtagacgcgtcgggtggtgtaaatggtagatctaggtatgcaaataacgcatagattagatccacttgcctatcaaccgaacaagcctctcggtagataggtacaagaaacgatcgaatgtcttggaacaacaccggcttgaaagggtcagcttcgtccgttgtgtcttgcgtgatttgccacggtgggtcttcgagtcgggcggagatataagaggatgaagacgcgagattttcagcagtagaccatcggatgaaagagtcctgtgaggagtcgaatgccggaagaggagaaggtggacttggtgacggaggaggaaggggaggggaagagggcgtatgagcccacccaacagacgaggattcgccaaagcggggtgcttcagaatcccaaaaggtagccaaagcatctaacttttgttggaaagtctgagtttgaaggtgagatggcgtgaaaaaggtgctatagttcgaagaacaacctccgcaagatgattagaatgcgggagagaagaacaccaaaacaagtgacggaaacacaagggtgaaacgtacagctccatctgcgcttgaaaaactgcagtagcttgttcgatatatcctattaagcaataagataaacaacatcaagatgttcaatagttgacaaatgtaagagaaacaaaaagagcatatgacataccagcctccttcatagctaaacagcctctaagaacgagatagaccatgattccttctaagtcttccttctcattgaaccctttactttgagtactttctcttcgatgagttttctcccaagcgattctaaccctcctcagtccttcctccgcccaaccgccacctagatcctcctcttctcctcgtcctcccaaacctctcatccgccaatcaccccatcttctccagacttcgaccctccttgccaaaggcccttccagtattctgtcccacctattatctactctacgagcgctttcgacctcttcggcagcctccatcaaagctagtgtgaagccgaggtcgtctcccaagacaggatattgatcaagagcttttgtcaaatgggagaggatgacagtctgtctagagtggtgggtggtagttgattgaatcggaagggaaggatcaagtttgttcttatcggctagtgcggctgatgacgaagacagaaatgaggaagatggaggcgttatctctgcttcggacgagaatctggcgaattcgagccagagggaagggaccagtggagtttctttcagccttttggcgaatgagatgttcttctctctataaagagcctcccgggacgacattgatggatcggattcactgtcttcatcttcgtcaccagagggctggtcatcagatcgcgcgtcgtccagttttccgaacactccatgttggagggcgtcttcaacgttttctttctgatcgttttctgactcatcctcggagcttgtccttgaatcctctgcactaggagaaagaatagatctataatgctttgacgaatcgtcttgatttttctccttcggcgcggaccgtttggagggtttttttgagaacggtaggtaggctgggagctgggttggaatggattgattggtgtccgttgacggcttgactatcaggtgggagggaagagaaaggagtgatctcgctgtcttgtcagagtatctcatcgactgaatgaattgaagaaaagttggtcaggttgacgaccaaaggcaagagcacgccatcagttggagatcaagatgtcaaagtcataccaatctgtttgctcctcctcgatgccactcgacctctattcgattggttccattccgagcagacgattgggtgatcttgaacccttttggaaacccaacgatctctccagctgaagacataaagaatagtgcatatagttagtctgatttcagtctgcgcatcatacgacgagaaaagacaaaagggagaatagagagtacaaaccaccagatcgtctataccgggctagtttgttctggtccatcgatccatactgaatgtttcctctatcgcccctcctgtctatgtagaatggctcgttgtccgagtgagctgggcgcgaggaagataaagacaggacgtctgatttctgtttgtctcttgttgttttggagaaggaggataacgccgaagtatcatggtactttgaactcgacgatgttgaagcgatgatatgacggtgttcagaagtcgatcctagaggtgatcctgaccgacgacgatccctgtgtgatctgcgttccttcacctctcgttcatcctctcttcgcccatccctctttctgtctctcttatgatccctacgcctgctgtcctcatgatgtttgcgagagcgcgaatgctggtcggaacgttcggatctatctccactgatagatctgtcccgtttacgatctcgttcagacttgtctttccgatccctggatgaaatctctctgaatggagaacctcggtcagacgcgtaccgggaggagccggcaggctgacttgtttgacgtgatacggaaggctgtaggaaatccaagtctgggaacgactcaaacgacggtggagggttagccatgaccaaggctgaatagatgagctatgtgtatctgctctcttggatggaggtctctataaaatgatgtagagtaccgagaagaaagcgaggtgatctcatcgatggttacaccaggttactttcgagttgtcagggatgtgacctgagtgtcacaccccggtaaccttcttttggttctgttgtttctcctgcctcggtattccttatgctctctcattatatcaaaatgcaggtatatgaccttccagcgcaggtgattctaacaccttctatgatctgttctattatgcataatcattggagtctaaggatgatatataagacgggtccccctttgccacccatagcatagtctaccaaacctgaatcctttgtcattcctttgttcccgagtaatctggttccattgttgtatcaaccttattcatacgatttccctgccttgcgctctcgtcacagtcaccaagctagagagcctgaacttccttcttgccagccctattccctgcctggttacattcttgcaacctccccgttaccctctgaacccggatcctgacacgagttgtgatacatcacgtgacttgagccatcagatctactggcgatcatttaagttttcatcaaggagatccttcactttctatccgaattcgcgcgcgcttgtttgcttttgattagactcggtgttcgtttttggcattcgagggccaagactgcttcggcatcctatggtcacgagatgtagagggtgtgtatgagtgtgcgtatgggtgtgtatcacttttcaatgagtatatgggagagtgtagatgggcgtgtatatgatatacgcgcttgtatgaatcgaacgagcaaaagaagcaagagacaggacgaagagtacaacacccagtaagtcgatactctggcaaagacacaattctactggcatctttttttgtctttccttcgcctaaaccatcaattttttattttattttatttgcaatttcttctgctctgatgattttcttccctctagactccttttctcagcgcttccttttccgttccttataatgcagttcccaacgcgtttaagagcgactctgcttgaccgtcggtgctttccttctctccttttcttttcggttccctctttctttcctaacatcacccacgtatacacatagtcacccatacctacattatctagtcaccatcaaatacacacatatacgcatacatacccaaatttagttttcaaccagatatggaaaaggcaacattcaaagacttccctctggttatcgagactcctatcgtatacaccaccaacagcgacgacggctcggtcccgcctacacctttgaagaccgcaaagggggatacagaaaaaaacactgcatacatgcgcactcacgacgtcttcgaagtcagtgaatctggacccgatttccggtaagtcacctgtcaaaagcccagacgattcaaacacgtctcatcctgtgtcgtgttccctcttgtttctgttccgcctcccacagtggcgtgaattggtttggggctgtcgttcttctcaccaagcaacagataggacttggtgtactttcgttgctaaaagtgttgaatacattgtaagtgttgcgcgtactagtatcatattgagtgtagcgctaaatcaacacgattgctgttttcatttctcctactctaggggcatggttgtgagtttgtttacgtatttgtttatgtccatagttcttcagcctattggaatggttactaaccggatccattctccccttcgctctcttgacacacattcctctctgtctagcctggcatgattcttattctctttatcgccgctgtagctacctacggaagtgttgtcatcggaaagtttgctcaaactcatcctggtgttcacacgtatgttcattcctcatgtttgctacggaaaggcacaacaaagctcatcttatttttggttcctcctgtcccttatagcatgggagatgttggtttcatcatcgccggagtcgctggccgtgagctttttggttggggtttctggcttcttgagttcgtctctattattatattcccgcgcgcaagatcagtactcgagactgcttctcacctctctttcgccgctctgctcgccttaatagatgtttctgcgctgcttccggtatcctcgccacctctatcgccctcaacaccgtcagtgaccacggaacatgcaccatcgttttcgtcgttgtcgccgccatcgccattgctctgggagccagcccgaggacgttcaaacagatctcttggtttggatacatcggagtttgctctcttttgcctgccatcttcatcgccaccatttctatcggtgtgtctgatcgaccgccgaatgcccctgccggtccttacgacaagcgactccgggctttcggagactgcaccttggtcgaaggccttggagcgattgtcaacatcctctttgcctacgctggttccgctggtttccttcccgtcatctccgagatgcgaaaccccaaaggttacacctccgccgtgctcacctgccaggcgttctctaccgcgctctacgtctccatcgcctgcgtgttatggtactactgtggacaatacattgcttctcccgcccttggttcagctggtcctctcatcaagaagatcgcttacggtattgccatccctgggttgctcgccggacccatcatctacgctcgtaagtaagctgtctgctctgtggaactaggcaaagcatgtgagaactaattttgtgctgatttcctgccctactcacctattaacacagacctttccacaaagttctgcttcgttcgaatccttagaggcacccgacatctccaggagcctactgctgtccattggtttacctggcttgggttggtgacctccatcgtcattttctgctttgtcatcgctgaggttgttccgttctttgacgaactcatcggcctcgtcggtgccgtcttctcctccatgttcaccatccttgtcccgggactgatgtggctgtacgataaccgcgacgagaagcaaaacggagcccgaactctcaagaacaagcttttatacttgaacgccgttatgatgatgatcgccggggtctcccttctcgttctcggactctatgcctcggttgagaacatcaagagcgcctttgctgagggttccatcggaagtcccttctcctgcgccgacaacagtgtaaccaccacgtcttacaccaatgacacttctacatagaatcatatagagaaataaaacgcctcgtagagtgcaactccgagggtacacataatctttctatcagtttcttttatcattccctctcgttttcttctttacaagtcttcttcctgtttcatcttcggtttttctttctttcccagccttctcttagacctttccttccgtcttcttgctctgcgtacaggaaggataggggggaaggcagaattttctgttaaagtcttcacgataacttgttcccttttatcccctgatatctccacgtgttctgtctgattgcatcgtttgtatcatcactgtattcatcaactttgccgtttatcttgaaagtttgtctgtcttttcgacgtatacgggtggtagatgaagcagtgacatagagggctaggtaaagccggaaaatgtatacagatcacttgtgccttccttggctagctggttacgtcatcaaattagtgccgtaatcaagcttgtctttctcttggcattcttcttccggcctctctcatccttggcccgaagaagcaggttctcaagcttagatggaccctaagggagagtctcgagatacaaccacgccctcgatgagataatctccatcgtcatccttgttcaacaaagacggaaacgatagtatgctaaacaggaaggagaagaaagatgggcagcagaacacataccggaggaaggccagaacgaactcaatgggaagcaatgtcaccgatggggttcttgttgactgaaacttctctttttctgccaagccaacgaaagcgtcagcgcaagtgccgagcgtggtgacagagagacgcatacagccataacccagaccgcatatagccataaccaaacgtaaggcgcttctttccctttgcgtcggcctttgtctgaactcggctgttcttgtctcgtttgacggactctcgtttggatatcgatcatcatcggttgaggttacattctagttgccaaggccatgctagatgttctttatatatcaacccatcgagcccaatctctcttttatcttcttccatcatcctcatcttgctcttcttgaaaagtgtctgccagccagctctcgtttctcccatccctctctctttcccaagcttttcttccagagtatctgtgatatctcgcctttctacttgctttgatagcagagaaaaagaaaagaaccctgtctcgttatatcgtccacaaagaacaaaacaaaaaccacactttccaaacacacactccaaacctctcgcctgaattagcactttcgcaaacactgcaatgcatcttgccaacgtccttcttacccttcttcccgtgtcattattggctacagaatccttggctggttctagttcccactcggcacacgcgcttcccgccagacgtcgtcacaacaaaggcagagcgctttcccccatcaaggcttcaaattcttcctccgagcacgagacgaaccgaatcgctagcgctggcgctagtgcagatgacttttcaccagtcaccggtagacgggtcagtaaacgggctcagtgcggagtctcttcaccggcgacatcatccaaaacatcatctaccatcactgtcggagcagccgttgtcccaactgcagccgcgacctccagctcgaaatggaagcttgatctcgaagcaaaaggaaattccttcttcgacaccttcaacttctgggcctatgacgaccccacacatgggaccgtcacttatgtcagtcaagatgaggctacaaagtccaacctagccacggtcaacggaaaaggaaatgctggtatgtcttttgaaagccttcgcctgtgcgctctgtcctcgcagtttactaatctcggcatctcgggcactttgcatagtcttggcggtcgacaccactcagaatgtccagaaaggccgaaaggctgttcgacttcattcgtcttacatcttcaacggaggactcatccttgccgatatcgttcacatgcccaccggttgtggaacatggcctgcttggtggtccaacggacctgactggcccaacaaaggtgagatcgacatcctcgagggtacccatagttgggacagaaatcaggtttctgttcacactagtgatggatgtacgatcccttccaactacggagcctcggccgtgttgacgaccggaagctttgtgaacaccaattgcgccagttacgcaacgagcaaccaagggtgtggccaacgagagtcagccagccaccaggcttacggcgagccgttcaatcagaacggcggcggtgtgtacgccatgaagtgggatacatccgggatctctgtctacttcttccctagaaacgccatcccggccgatatcacccagggtgtgcccttgccggaaacttggggaactcctatgggtaacttcccatcgacgtcttgcgaaccattcaagttcttcaaagatcaccacaccatcatcaacaccacgttctgtggagactgggccaattcagattggtggacggctgggtcggccggaaacggtcaatcttgcgccgcaaagactggatacaactcatgctcggattacgtcctcaacaatggagacaagtttcacgaagcatattgggagtttgcgtctgtcaagtattatcagccgaaatagagggttaattgtgttctgtaccggcttgtatgatgttctttcttccatcggaaaagagagacaaaggatcactcccaaggccgaggaagctggctcttcctcgacctttcatgcttctttgtaccttggtcgatcatctattgaatcttttcttcaattatctagatatatatatgtgtgtatgtgttttacgtgtatcatacttacaagacttggcaaaattgagatagcgagtcagactgaagaagagaaaagtttagcaagtcaagcatcctagtatatgttgagcttagcctatacacatcagaggctgaaaacgatcgcaagaccgttggctagttcgactactttgatgatctctttgtatacctaacaccgggaacctggatgaatactgatgatgttaacttactgtggcccggttgaacacatcttctttgcatctgtctcttcgtctgtctgttgctttctttttgtctctttgtcacctcgtgtctttgtctgtggactgtacgaccttcactaagtcgttcatcataaccgacggcaagtcgaatcgatcaagggaggtttcttgcaaacaaggagacatcaatctcaacgactgacaagacacaaaggaagtcgggggtgatctaaatactcatcagcgacgctgatgtttgtcactgctacttctgctactcttgccactgaagctgcgccatcaaagaggacaaactagactcacgaatcatgtaattttaacggctttcggtctgagcacattcaagttcaaaggggccatgtatcgactaccatcggttgaggtgactctcaccaaacctaaggctcacaatcctttttcgtatggtcgacaaagtgatgcgagaagattaaccaatcgatcaagctttatgagtactgtaatcatagaatcccttcccagactctacataaaagaggaaggttaccatcaaccaaccgaactcccaaattttcacagcagaaaagaagagaaaaagataagacatactctttccgtaccaaccggcatctaccatcctgctcaataggatggaaggtctatacttgctatcacccgtttcggtgtacattgtcttttggatagccagacaggtatctagacctatgaaatctgctagtgtctgtttgtgtatgtattccatcattgtcataatgatcagctcttgttcagctctataaaatcggtctcgtaattctctcggatcgcctgactggaaacgaggacacaaagatactcacaaggggacccatcttgtgacccattcccaggataaaggtcttgtcgatatcctctttcgtggccacaccctggtcaaacatacatacatgtcaaagattcgccatagcaaacggtaagaaaagagctttaaaaacaaagaaacaaaagaagaggctcagctctttcagaagtcactcaccctttcaagggtcatgatggcttcgttgagaaaagggatcaacaccctgtgaagcaggatgacagatcaaaaagagcgtcaaggttgaatgtcaaaaacgcaaatgcttggagaaggccactctggtaagatacgcacgcattgccgacgactgattaaactccaagaaggtgagcttcaaattgggctgtttcatgcaagactcgatctttggtgcttacatccaggaacatcttttgataccgtcacctctgcagaaaccaaagagaacataaacctggccaatcagatacgaaacgttttccgtctagctctagaaaaagatgaactttgtgagagaacgagaaacatatcaagacttacctttgccacaagcctcggcaaactgtctggagatttggacgacctgttcgcttgtctgtagagccggaattagctcaacaagcggcatgaccggtaccggattgaaccaatggatacctgtatcgcgccgtaagagatatcaacaaggaagcatatgattcctgaccacaaagcagaactagccagaaatacaaaccgacgactcgctccgggttgcttgccatcgatgcaatcttagaaatactgatggaagacgtgttggtcgccaaaatcgtctcttttggtagtatcgaagaaagcgacgcaaatatctcggatttcaatttcagagactccggtgcagcctacgaaataaaactagtcagatttaccagagacctgttcaagttggatagattgaaggtgacgtcgtacctccatcaccaagcctacatcatcaaacgacttcatgttatcgattactgagatcctggctctcgcttgagttgccaactcattcgtaagccgacctttgttcacatccttttctaatagactatcaatgaacttgaggcctgacgttacatgcgcatagatgttgggtcgaaatcaaggtttaatggacagagaacgattagaagaaaacttaaggacaaccgatctttgactcgagatatgcgtacctttttgcagctgaggggaagatgggtcatatagagtcacatccgctttggctttcaaagcagagaccaacgcgatgccctagatggttgaatagtacaagtcagcaacagctgaaccatgggcaagactctttcctgtcgggcagacacctaaaagaacttcaacggaccatgcccatctgaccacctcctacgattcctactctacggattatggaagtcattctgtcctgctttcgaagtatctatatcgactcttgtgcgtcttgagctgtgttgaacacgagaaatgttggcaatggcaacgatggtggttgagtagatgtatgtatgttgtgtagacaatgttcgctacttgctcgttcccgggtataacgcagaagccgaaagccgagtaaccatgctttgcatattaagatcttatatctcaatccgacaactaccgttcttcactttttcacacagctcacaagaagataaacagaaccattagatacagcattcctccatggtcttgaccatcgattctagcttgctagcctcaaacaacatcattcctccgcgttggtcaagaccaaactctaacggatcatcctgctttcggtttgcagcgttgtcaaatgggtatgtcacagatgcaagcgcatgctgttcatttcgtgtttgaatagattgtcagaacatttggacgaaggtcatcagaacggacaaacggaggcagtgaaattgatcagccattatacagggcgcgtatgtcaagaagtcggaaatgaaacatacacgcagtataaagctatcttcaggatggaacggcagcaaaccggcctgactaagaccggccaactcatcgacatccatgtcgtctgcatctcttgaagcagcgctctttccgttctttttcttcttcttcgatcccttcgggttggacgagatagaaggcgcgacatagagttttgagagcaggaggaggtgagtaaatttgtacggtttgccctagaataatgacacagtgatgagtcaaccagaaggtctattcagtaaattggccgagaaatccgaatagcaacagaaatgcaaggagcgtacctgtgaaacagcttgctgcatctcttctccgagcattcgatacataggtgcttgagtctgcacaggcatgttcaggagccgttcggaaacaaccagtccgacttgtgggccggaggtgattgagccagaaggaatagatgacagaatggaatgcaggtccgagttggatttggattttttgataaagtattgtagtagcggtttcaacgtgggtgagtcctaatagtatggagatgacaatagagacggcgggagggcgggcgcaacgatgtttaacattcaggtgtccatcaaaggcttccaagattatatgacttgaaagatctcctcgtctatgacatagtagctcaccttgtgaagattgagattgagaaccgcgatgatactgtacgggtcgctctcctctccatcgaccttgatacaactaccaacaccgtcagccttggagctatcaagcactagctcagccaccgggtgaagatcgaacagatcggcatcggaatacagaagctgacggagaagacgtttgagagcaatcaaatcgacatccggtgaaggagcaaaaaagtcaaagtctacgttgatgagggaaggagtcgaatcgtcggattcgtttccggaagatgcaccggagtcgtccgaaagctcggttgacgcgttggcattagattttctttttgccatattgaagtagatatcgaattagcactgatcgtccgcgaatactaggctgaagagagaacgtgagacgaaacacagccagatgctatgaagtaatctgatggtcgacaccaacgaaacgaaagagcaagagaacaaagttgttcaaaaaatgtttctatgctgactaatcaagaagtgactctttttttcccgttcgccttgttttatctattccataccattctcgtccatcatcaccatcattgccatcggtctcgttcagctgtagctctctttccaatctatcttacttcatctgtcggtcaaggatactgtcacagctcgcttctgtcattggcttcaaaaatgagaaatccgctgcatatcgggtcttcgacctctctcaccatagttatcaaactcggcacatcctctatcgtcgacgcagagactcaccaaccgctgctgtctctactttcgagcatcgtggagaccatttgcaaacttcgagcactaggtcacagagttgtcttggtgagtcttttttttacattcgagccatatacccgtcgagattggaacaacaggaaaccaatcgaatcctacagagacattgagaacgattttcatacagtcaccagattgacaatttcatcctaatctcattcaggtcagctccggagctattggtgtagggctcaaaaggatgggcatgaaagagagagggaaaagtctgagcaccaagcaggtgtgttcttccccaaccttctttagttgtccctcgttgcgttgttcaaccatattccctctcattttggctttctaggctctcgccgctatcggccaaggccggttgatcgccctctacgataatcttttctctcagcttgaacaacctattgctcaggtcctcctcacaagaggagacatttctgacgtgagttcttggtctcatatatataaacgtctgataggaagatccgcgccgatacgaaaacagatagagtacttacctatcttcaattcacgctcggaaagcgtactcgatatctcaatgcagtcaatactttcaccgagctcttatcaatgggcgttgttccaattgtgaacgagaatgatactgtatctgtctcggtacgtatgctattgtctgattatgtctgttcgatcaaagtaatctgatttctcgtctcgggtggcttcttgcaaacttgaaggaaattagatttggtgacaacgacaccctttcagccattgctagtaacatggtatgctacttctgagtcctccgtttccgatcttcgcgaaaaactttttgtcatcttcccctctatctcaatcttacgataatcttacacgcttgataggtccacgccgactatctgttcctaatgaccgatgtagattgcctgtacaccgacaaccctaggaaaaacccggatgcaaagcctgtccgagtagtcgatgacattgagtctatccgacagaaaggtcagtattcttgttcacgataggctgaaacgtgcatgcgcgcatagattttgatcaaacctatccttaacagtcagcacagccacgctaggaacatctttgggtacgggtgggatggaaaccaagctgattgccgcagagctagcgatgggcgcaggagtgacgactgttatcctaaactcccaaaagatctcgtccatcttcccgattatcgctgccgcagatactgcggtgatcgatgagaacaccttgccacaacacactaggtttttgaggaaagatcagcctctgggagagtcagttgttcatgttgcggtactttctgttgttttcttctagctagactaatttcagcctctgtgtatcttatcagccgcaaatggtggatccttcacggcttgcacacctctggagagatcgtcatcgacgaaggagcttaccgagcgctcactaggaagcattccgggggtcgacttctcgctgccggtgttgttcaagtgaaaggcgtctttgcatcacaacaagctgtcaagatcgttgttcgactttctcgctcgtctctgtcgtcgtatcatcctgagcctgatagcaacaacaatactcaaccttcttcccgttcacatacaccctcttcttcgcaccggaatccccttgcgagcggtctcacccacggatcggattctatttctgcctctacatcgaattcgacagtaaactcccctgaagtggctcccatcaccccaagcttactcccgtcgatgtctttgagttcatctatcgcctcgttggatcctctttctacgtcggtgtctatctctcccattccgcattcagtctcaccatcactagcatcgccggctcttgtccctgcagttgtggctgcaacatcagaggaggacgaatgggaatacgtcgaggtcggaaaaggccaagcgaactacaactccagtgagatcgatcgaatcaaaggaatgaagaggtttgtcttctccagttcttctctcttttctccattcttttcattccagatacctgatcgcatgtatcaaaccccaaacaaaaattgacgaactatttccatactttcgtcttgcctttggatcaccctgtttctaatcatacatgaacgtcctgtctttcgttttgaaccggatagttcaagaatttcagaaattctgggttacgcagatacagaacacgtcgtagattccattacgctcaagattagcgctattgcttaataacctctgtggcattgatatatattcgatatggggtttctctttcttgcctgcgggaaggacgcgaactagaccgtatcaataagagacatttcatatcttgaagaagaagggaaccaatcaagcaatcgagcagatctacacagaacagagacaggatgggtatgaacagtcacaatgggtatatgtaggcaagaaaaacggagaacgtatagagaaagaactgagagaagactaaagaaataaaaggagcttgaagatacgaatgagcaatgcgaataaatcaattgggtaaaaggagaacaattttggattgttgttatcgtcaggatataaagcagaagtaatcaagtgaaacagactgagagtgactttcaagaaggactccatttgaacgatgacggtggtgattttggtttaggattcatccgtcgtggcaatttagaagtggacggaacttttccagctatcgggatgcgactatttaaattcggaaccacaaccttcgaagacagtaaagctttgctcgcagttgataattctggagacctggcaaatactgtgttcgaatgaggtgagattcttggaggtgatgaaatcgaagtccccccgtttattgtcgcttcgggagttatgttttgctttgtaggaagggaggacaggaatggagaatccatagggcgaacgggcgttttgagaagagtattcgaaggtactgtacgaatcaatgaggactcgatcctccggccaggatgatttggggatgcatccgaccgcatcttgaccgaatggctctgatgtgcaaggcctgtttccgaggcagcttcttgagtcagactagttatttccgtcgacgaggccattatattattagtttccttgaatttggaataaggtagctcgtcattcctcgaaaaaacgtcctcctccgaaaaagatgactggactggactagtggccatttttggctgttgtggtgtacgaaacgcgacctcgacttctccccatactgactcatcctcatccgacatgcgcattgggggtggaagaacctgcatgccaacggttggcgtagatccgcctccagtgaaagataacgggctcaggcgagagacatcagaacgcgtcgtgggtgacccaaacgtcacatcagccgctagagatccatcagaaataggctcatcacttaaaagttggccggtaatcgtcatctgggcgtcgtgaggaagatacagttctgagcgtggacctgccaagagagaccgtggaccaagacgtgttccgcgagttttatcagcgggagtgactgacgtcgagtgggacagactctcaggccgaacgaaggtgggaacaggcacctctgatgcttggaaagaagctgaaggttttgcaggtggagaaggaaaagacaggatcaaatccattgctggcattcgctttttgacagccggtccaggcccattaagcgtcaggctatctcttttattcggctcctgagtttttgaggatgaattgaatattggcataacttcctcctcactatcgctggccatccagccgtcctcatatgaaagaatttcggccgatgtagagatcgaggaagccctttgcttctgtatggaaggtttaggatgtagaaaaggcagtgagggtcttcgggggaagtttgaggtggattcggtggactgagacgaccgtagtttcttgatgaggagacgtgaactgggtgagataatgcgcgatctcatagcaaacgtcgagagcgaagtattgagatcgatgtcggactacgaaagataaagagtgagcatatgaccagaagatactcgatttaggcggaacctacctctgagcctgactcgtaggatttgtggatttcctccttgtcacatgaattatcatctgattcggtcgaagacatagctctagatgtctcgtcgagtgcatctcgcgtcttctctgaagagtgcgctagattagtaacgacgcttcgtccagaatatctttgtctcgagaacgagcacgttgacatcgaagaagatacgagaccgtctgacgacggtagagacgtcgtggaggactgaaatgaaagtgtggataggcggaaagttgatgatactaagcttgcagtggacgacggacgacgtaggggcaatgcggaagggaggtttgcattattggacggaaagggaagaccggcagggtcacaggaaagcgcattcggctcagaagaggtatagctttttgaacgtatagctgaatccaaaggggagattggaataggtggtagcggagcggaaggtgaaggacccggcagcgatcgcttcaaaaaatcaagattttcaatcatatgtgaactgggtgaagctatcgagctgaagtcaaaagattccttaggtgtactaggagacaaaggagtgggaggtagaggtatggttggcggatgggacggtgaaaatgtccgtaggtattttgaggaagggggctcaagttgcggttggctatttaaatagggtaggattgaaccttcgcggttcgagcgagtcatatgcaacccctctgctggattctccgacgaaagatgtagatatacaggtctcctcaatttgaaccggtcgaacatcgaacgttgagtgggctttgaggtttcttcggaagagggcgttgtagtactgatcaaagaaagtgttgaactagtatacgcgggttcctctagacgtgaacccgaatctttaaaatgtcgagcgacgctcggatcatgtgtttgtttcgtcggcattgccaggaaattgcgctgagggcacagcctgagatgataggacgctaaaagatccacaaggacgaaccacggggcggctgtgatagaggccaagaaggattacaaccaggatagatccgcaagctggtactagaatagagaaacagtgaggtcgaaacgtggctgtattgagtggagagtgactgaatggatgtgatccttgggcagcagaagaaagagtgtttgtttttgtttttcttgttattaaaaatgagtaaatacagagaacaggacagaataggatctgatgttgggaggatattgggctgatccaggtactggtcaaaccgcaagaagaggacgaggaagagaacgagaatcgaaaaaaagagcagataatagacagaaagagcgttgattctatcgtcggcttggacgtgtttgaagagacatagctagactgagtcaagctcagacacagtcgcagcgaaataatatggattagattgatgatggttgtcgttggatggataaagacaactctgatgtctgaaaggagaagagaagagagaaggagtgagggattgtttgtttacgtaagcgatcaacaaaactgaaacatctagttctgaaacagacatctaaatacgccatataataaccccttctatggacgccatcccttccgtgtttgacatagcttagatcctgctgttttgatcatatggaggagggtgctctgatctagcctgatgagcggcatcagccatctcttgaagcgtcgcgagctgtccaaaacgggtatcgattagcttatcgtcctgatctgcggtacatcaacgcgtgagactaacctctccacttttctcacacagctgtctgaaactgcctccttccttggccaacaactcaacgggggatccgaattcctgaagattgaaaacagagatatttgagagatcatcagtgactgtaactcatgttcgatcgaaagaattaactgcaaaggttcatgtttcccacctctacgttccctgcatcgagcactaggatcttgtcgcaatcgataaccgttcgaagccgatgctgaatacggaaagcaaggaggaaagaagcaaattcagtttaagagcaattatccgcaagaatccaacaagatattagaagaaaacatacagcaatgatcaacatcgttacaccaacaaaagactctctcatcgtctgttggatcaagttgtctgtcgcgtggtccaagttagccgttccttcatcgatcagaaggatgttcgactgttttagcttgagaagacctcgagcaagcgcgaggagttgacgttgaccagcagaaaagtttttcccttcacgatcacggatacagcagatatttgccaagaaactgtcaatcagatggcgcacgaaaagtataaaattgaaatgcgcggcacgtacctccagcagctacaggcgtctccagactggtgatttgactgatgccttcttcctcgaccgctattgctgaagcagaaccttcctcgttgtttcccatgttggcaagactcgtagtcgatggcactcggcttggagctctgcttgcgatccgtgacgcagctggcgtggaccaagatgccatttgaacagcgacaagggcttcccagagctcggcgtcctcgtagagcgagaacggatcaagattcgatctcaaagagccactgaagagaagagcttcctgagggatgattgtcagacttctcctcagcgcagcgagcgaaatcttgctgatgtccattccatcgataaagatcgcccctccagatgcttccataaaccggaagaacgtaagggccaacgtagactttccagatccagtacgctgttcaacaaacccaaacatagactcctgacctgatcagcatcttggataccatctgggattttcgacagatgtaaagagagaaaatggctcacaccgcaaatcccgactcgctcatggggcaagacctcgaacgatacgtccttcaagaccgggttcaactctggggagtatttgatttcgagggacttgacttctatctttccctccttactaggccagtaagcaggaggctcgattcctttagcgtcttcttcctcttcactctcgagtgtgaggtattctcggattctctcctgaaacaggaacggagtcccagtaaatacttcgatcaacacctactatacttggataaccatgtggaacagatgcagaacttacaacactgttcagatttatctcaagagcggaatataacctgactacccacagaacctgctcggtgaaagtgatcgagtatgataaactcaaactggcaactcccgcatccaacgaaggattaagcagaattagtaccgccgcgaacaaggcgactaatgcgcctgtgcaatcacagcatacggaaagccatcggttcgcttgccaaagcagtaagaatggagcactgcaaagaaacaatgagcagatcagcctctatcgaccgagaagaaatgggttcggaagagagaaaagagagaagcaacaaacttgttgttgtcgatcaggtccagagcctgtttcgtgaaccttgcagtgtctccatacgaccggatggatgtcatcccgttcagagcctcggagaaacagaccagaatgggagacttcgagatactctcaattcttttgagctctctcgacaatgccaaatagacagcgccaataatccagtagagtccaacgatgaacgcggcaccaaagagaaacggtggagtagataccgtgacgacaagaagaacggcgaaggaggactagcaagagcatccaaacacatgatcaacatatgaaacaaacctcaagtagaggaagaaaattataaaggaaattaccatgatggagaccaacagataaaggaaaacaggcgcggcctctctgtagatgcgcaacagttctggctcagtgtcgaacaaagtaattcaaccgacagtataaaaaaatggagaaacgaactgatcaaggctctcaacgtccttcgacaatcgattaatgattcgaccagaaggcgtagagtcaaagaaccttactcgagcatgtagcctggttgacagaaagatattcgaaggtagatatataagcacacaaacgaagaggttcaccaacaagagcttgaaagcacgtacactcgtttcagcagattttcatacaatgttttacttgctcgcaaagatcccgcaaataggagagccattctgatggcaatagcaacaagataaagcactgtgattgctgcatatacagccagatagtaatttgttgtgtcttcagctggtgctctcgctccagtgatagcgaatcggtctataggctgagtaggcgccgctgagaaggtcgtttgactcgatagactacgatgaggaacagcgttgacaggaccaacaaagaaggcaacaaggctgaggctcgagaagtcgacttccgaggagttgtattgagccgcccactttcgaagccacaagttggtccagatttgaacaccttgagagccgaggtaagccaggataagcataatccagaaaactgtagcaatgcaggagacaggattagagttgtgaagactaatcgagatatgacaggtctgttagggaggaaagtccactcacttgcagctcccatagcagccatatatagtttatagacctctttggaaactgcacaactcgccagataagaaacttgatccatgagcatcgctaccacctaccgcacaggatagggacagataagataataggtttagaaatacttacctcctccttcagaacttgtttcctcctttactaatttctttttcaatctcgtctcatcaaggattttcttcgttgcttccagatcaaccttcacagtttcgtcatctgttaaatcttgctcgatcgtcgcctcggtctttccgattccggattcgccaatcggcatctttgaactgctggcaatggggtggtgagcattgtcatgcgcatcgtctgctaaggcatcttcagggaaagcattgagtgatttcaggtgggcagctgttccttgggcaatgacacagccttgatcaaggacaatctggtgataagagtggagaagaaacgagcaaagatgaaacgtcaaggccagaaagtgtacagattataagaataagcataaggatacttacgccgtatgctgctcccgtcaagcaaagtccaacagcgtgctacgatatcgttcccaacagcaaccacaagacagcagaaggttcagtttattggtatggcaggtaaaaataaagaataaagagatgacatgatgaacataccgtgacgaggataaccgtccttcctcttaataaaggccctttgaggcagttttgatacaggaacctagccgtgtgtgcgtccacagccgataaaacgtcatctgaagtaccccggagattcagttgaatagcgggaagatcatcagacatgggtttgtgaaaaggtcattacatcggaagacatttggaacttaccaagaataacaatagatgagcgcgagtaacaggccctggcaagtgcaatcctcgctttctggccaccactgcaagttgtacctttctcaccaacctcggtctcatctccgagttcgaagatgtcaagatctctttcaagttggcatgcggcaatagtctcgagataccgtgcttcgtccctttgaaacgatgaccaggagaagaggatgcagttaagaaggaaggacaagaagaccagatcatttaatccataatggacttaccagggcgacccaaacaggatgttttctctgattgagtctccaatcaaccaaggctgctgaggacaataggccacagtctcagagaatccggtcaacggatcgataggtgcggtgtgtctcgaaaaatgatcgggcatgaagactttgccttcgatcaaagtcgtttctccaagaagcgagagcagtaccgtagtctgatagccgcagagatatacattgatcagtcagcacaatccaaagtacggacaacgggtaggaaaggattcacttttccagatccgacagaaccagcgatgagagacaactctcccgtagggaacttgatactcaagtccttcagaccaaagtttgaaggattcttgttgaactcttctttcgtagcgtatgtaagcgtagcgttcttgaaaccaatctttggctcgtcttcgttgcccgaggtagtgctagtagaggaaggaacactaagattcgaatatttatctgtatctggttgagtcaagaaatcctcctgatcaacgttgcgcgagacagaagtccctctggtcagcatattctttttcaagtatatcagaacaaccgataacgacaaagattgacgtacaactcgtttacaactgacatgggcggctaggacatgagccaccatatctgtcattccctccaacggagatctgcatatcgtttgaatcaaaaaagaaaccccgttgtgtacgagttcagctacaaaatagcaatcgcaaggaaaaaaatataaggaaacataccgaagcatgttgaaaagagccaaagcagtaaacgccgtctcggtcggcagaggtgccttgaagaccttggtgtgaaccgcgaatgtcaccaatgtcaccgccgatggagcgagaatggctccgactccctggagcatccaaacgatgaatcgctgacggataagcttgagctcggcttgtcgcgtgtctttcatacgggcgaagaaccggtcttcctgtttttggtatatacaattcacacagaacatggacccatgagttgtgtttcgggaagcaaatctaggggcaataaatacagttacacgtacccaaccattgaacttgacaagtcggatagatgacaagacctcagtagccaaatccaatcgcgcatccgttgcgagtaaaagctacatcggccataaaatcctccaagcatcgttcagtgttgcttccctcaaaagaatacatcgtatcagagaagataaaatggtgggttctgtaagaaaagccttaccttgtcctgaaccttgacatacaacctggccaggaaaatctgaagcggcgtgactgctgccaaggcggctacaccgaagagagaagaatagcctagtaagcggtacaagaagacgatcgataggatctgagatcatgtaccgtgcattgaggtgttggtgtatatgaaagatagaatgtcaaaactagtctagagacgggtctggaggaactaaacagaaacgaactatactcaatgggccttcgggaaagaggactgtgagaagcaagtcgatatgaggacagtgagtaaagcttattcgccttggcaatatatgggacgagaatgcatgaaggagccttacaaagaagataggcagcaatctctgagatgctgaatgcatcaactgagatcaaatttatgatctttccttctgatgcctcttcctgttgaccctcagtctcctttccgtccttgttctcatctccacttatatcagtgacatcgttggtgttgacggatccaggctcggttgtagtctcgtcgagcttctcatcaaatattttggcaatcttggccgagtcacttcgtcggagggcctatgcaatgagattaagagagatgagcagcatgagtccagacgtttcaattgtacattgaaggggagaaagagaagagtattgtgatatcgacctttgtgaaaacttcagtgattatgatcgaccttaacctcacgcagattcttcttccgatccaaagtgcatagccctgagatgttacagaaacaacctgaccgaaaaacatggcgacaacatacaacacggccaaatgcatcggtcgaggggggtacgtgtctggatctaagcttgagagttttcggtaggcaacgaattctagaataagcttgagagtccaaggagcgatgaatgatgccaacacgtaaactaccgcccaaagctgcgtttcaagaaacataaggataaaggaacagagaaagggggtcagaatacatgcaagtatggactggataagcatatcaaaactcaccatctgaagtaacaggtagctcttgaagtataccaccaagttccaagtgagtccacctttgccaaactccttctcgctatctgtatgctcacttctctgtctctgtctaaagtctcgccagccgctgacaacgactgcggtccgatcatcctccctcagctgggggacattcgacatcttaatcggggtatagaaatgccgaaagattggcttgttgacatacgaaaagaacgtcctagcaaacaatgagcttggctcctcgatcatctctgccttggtttcaatctttgacgagatgtttgcgctcgatgaagacaaggaggaccgtcctctagaccgatgaccttctaggactccgtccagattggatcgatatggggtaaagatatcaagaaggacgagaacaaggacgagggacgaagtgatagcctgaaggacgatccatcgactaccggtatattgatcgataagcgcatgtcgaaagttgacaagtttgagtaagagatacgcaaacagaagggtcgttcggtggatctctgctgatgctccatatggagtcaacccgtacttgcgaccggtactagactctgcaaacaaggcgatagcagagagaagggtcaaatagccggcaagagcgaccattccccatccgcagatggcccatacggtgtgatctaggacagccataagtccgttgaagatctcgagtccaagaagggaggagagaaagagcagaagaacccagtctttgatacgctcaagcacagactttccgagttctggttcgacaccatagacatccagcgcagacgactttaagacttcgttttcaagtgcaaccggggacggtgtcactgaatgaccatccgtcaggggcagctggatagctgggctgccagttttttcttttaggtattgatttgtgatggatgttaacaggaacaatcctgatatgattgccaatgaggaaggaaggactaggttcaggaacctgtgtagatgtaaggggaaagacagattcggatcagcatgacaagaacgggatcggagatgaaaaacgactgatctggcagagagggtgaaactctgacctatctaggaaacaaaggttgatatccaacccggtccatatcggttgactgctatcgcagcccaggatctccattgagaaggacgttcggatatctcttatcgagtctagtgagtagcggagaagagatagaagagagaagaatcaactgaagattgatgatcgttgagagtcggaagagtaggtgagaggaaaatgaagacttggccggttgataacttctttttttaatcgatgactacaaagatccaccgtcaaacgccacaggccggtgtaagccgagaggccatatgggggagccgattagataacgaggtgagtcactcttccgagattttctttctcgcctgactatgtctcttgagtgtgagtgtaggtatgatcctgtagatcgcattgagacggtgtatgtatttgtgttcatgtatggttttcatcactttcaaaagattctatgggcatggaagaatggaaactcggttggaggtgtatgttcatgggttgtgtccaatggtactcattctaaatcacacaacaaagtagataagtatgtggactttgactgctcatacagcacatcatcgaccattcccgttgatgatgactcaggattgcgaaggaagggaagaaaatcgacacaggcatacaagtcatccttcgataagactgaacgaatatatggagtcatgttcaatcggttcgagggatcttcctgctcctgtattaaaagagagacactcggatcccatctttgaaggactcatttacacatcatcttcctcgcttctcaccaccattacacaatatgacggctcagaagaaacttccgttcgatattatcaacgtttttaccacgtcggaagacgaaccctatagtggaaaccctctggccgtcattcatgagtcacatggcctcaccactgcccagctccaaacgatcgctacacgttggtttcgttttgctttccgttctgttttttcttctttccctcttgctctctcaattatctcacttgatttcgcccctcatctacttagagttcaatctttcagagacctcgtttccagtgattccttcagaagaagatgccgccaaaggagtttcgtacaatactcggatctttactcctggagaagtgagctcgtgtctgtttatctcgttcggatcgttcaaatctgattgaccatcttttcaatcaaaacaccataggagctccctttcgcaggccatccgaccttaggcacatgtttctcacttgttcaacgatctatcatctcctcagatgcccagaaggccgttcagtcgtgccctaagggcctcgttccccttcagatccactcgcctactcagatctcgctatcatccgctccgatgtatatctcttcaccagttgagctgccggagaacttgctcgtggaaggacttggtttgagcacagataccgctgttgtgggcaaggctggttatctttctagtgccggactcctattctattacgtctgtttggaaaacgagtccgatgtcgaacgagctgttccctcaacttcggtaatcatccagattctttcccagctaggtgaagagaacaaagaagctgtagagaaagccaatcagccactcggagtttacctcttctatgtagagaagttacaagggtctcaagatctcagggttcatgccaggatgttttcgacagatactgctgaggatccagcgacgggaagtgcttgtgtcgggtacatgttcctctctctctgactcgcttgttcaaattgaacgacttcttactcctctgatcttttcattctctcatcagtctcgcccctgctctccaagcacacggccttttgccatctactacaagttcgacaacgtacaacgtttctcaaggcgtcgagatgggccgcccttcaaagttgactgggagggccatcgttaaagacggagaactagtcaattgtgaggtcatgggttcgagcgctaaagtggccgaaggttggatcttggcccctttcaagaagtaggaatgagttcgaattgagtgtctatgcactgtctttcgactagatgaaactgttgataactctcgggtggacataacggcatacctcttgctggactactaaaacaaagcatgttgatattcaaagaaaacactggctagatgattgatcaatgatgatacgagtttcatctttctcgcccataagatctacaggttcagcgtcattttgctcttcaaaattccagccgagagctgatgttgtatactgggtggtcaagatgtggagttcaaacggcctgttgggacagatggaccgatagattaggcagaggagtaaacttctcttagactcagtcgacatttgatcaatcccatgctctaaaagagagccaaagcggtataaacccagacccggttaaataaaaagttgtgcagagagaataaactcggagtttggtgagaacaaaggaaagagacagaaactcacgaaagatcaccacctccagtccagcccaatgccatcttttcaactttctcggcctctcgcgtgtccgactgttctatgggattggatatcggatctgaaagtgaaactgagcggaagatatccaagagggacgttccaggacgggagttgcaatcggtcatcaagccaggaagtggtgtaaagtttcgacaaattatgaaggcctctgatattgttgcgcatgaacagacaagcagaccgtatggatgtcgttagttgatctctcttcgaaatccttttgagaatgaagagcggagcgtggaatgatgagaaagagagaatgagaagacgtacctccactaccttctctactacttctcggctttctcacccacaccccacccatctttgtctctctgttctttctgtcagtctccggaaagaagcttctcagttgactgactagccattctgctccgggatcttgaggcgttctaaagatctttgcgataaatgtgccacctggtgctaagagatgaacagatatcgaaaatgctgccaaaagtaactgagcttggaggtgcgagtctagtgtatgtaagccagtaacttttgattccataggacagaaagaagatatcatgaatcagtatgcgctagtaaagacgacaacagaagagctgaacacaccatcaggagccccgtcacaaatgacaagttgagctttctctccatccatagctgagataacttcagccgctgttttgggagacgtgatatccccggtgatctgaactacaccttccagaggtgcctgccagattttataagaaaaagaatgacaaggagggtgaacaatccaatgagtgagaggtcaagtagcgtcgtaacacgaaatgaaccgaccataggttggagatctacagctacaatctttgctggcatctgattaggtacttcgctaccgaaacaaacaagataggaacagcatccaaagatacagtcattgataggtaaggtagtaggtgataggaaaccctgataagagatggaaccgacttgagtttcttgactaaaacttgactccaacttcctggggctgcacaaaggtcaactggcagttgagcaaagaataagatggccataagcgccaggtcagttcaatacgaacggtgctacaactatttaacatagacagaaatgagttatcacctgcattgcgaagatcatgaggaaatatatcaaactcttcggcaatatgaagcaacttgtatgccgagcgcgccctataaccctcggatttacctgatgttaccggttggaagagagaagtaagctgattgaggctccaataatagtcttaataagtacaaggaaagaacagtcaggttctacccactgagtctgtagtagatgtctctggaatcgacgttcgaactcttgcccatgatgtatctgctgagagaaagagagcggatgatgataggaaggattcgtctcaaagagttggctgaattatgtctccatgacaacgctggacgaaactaagttcgtcaccttcactttatcgcttgctcattccgttcacactctcacacacgactcttccatatcatctcaccatctgtataaagtcagaaagatgttcattgtctctgatctactttccctactcccttcgtccgattcgaatgtcgcacctcgtccgactgttggatcccccgcacctaaggaccctaacgatcgtttgaactttcctctcgatgtacgtcctctctgcttctcacgtgcaatatcactggctatcgtctgaccggtctttttatttattttatgattactttgattcaaaagcctcctcggccaatcgctttagtttttgtcaggcattgtggctgtccgttcgccgaggacacagtccatactcttctccacaaagtacttgacgaccccgagagatacactctggcgtctgggagcaagctccaattcctgatcgtgactcatgcccctttaaccgaatcccgagagtggttcgcctctgtcctacatgctgcttacgagtcctataagccggctgaaggaaagaccaagcctgattccgatgtcatccaacaacacttttcactctttcctcaaggtccttcgcagagcctttccaaggcttacggtcttggtagcttgccaagttattcaacgatgttttccaaggggatgtgggccgagttttcgaaattgaaggaacgagggattgtcaacagagcgacggccagtggaagtgatcgctgggccgctcatgggggttgcgttgtcgatcaaaatggaacggtcaagtggatctggatagcagacaagattgaggaatttggagactgggaggcagctgtatctagcttggggatctagactatgatcttttttgtaggcgtgtatatgtgtgtgtgtctatgatgtagactgtgctaaggtgtaagattaatgaagattgtctcttgttccaaaagtgcctgagagtcaaatcaaacctctctttcagcacctagtgtagatatctactaacagtagcaacccttttgttgcgctaccgaccatcagtagaaacggacttgcaatcgactgtctcaaatctattcacctaccaaagtagaacagtgtaaagagcgacgtggtatgtaagttggttagggttgtaaatgcttacataataaatgccgtcatcaccgtgagccaactgaattcaccatcagacacgattaagatcgaatggtcgaacagatctggagacccagagtttgtttggatccttcctcgtgtcgggagatcgttgtatagataccatctctatccatcgaatgtttaaagcacttcgttcttacgccgtcatgtccactcaacaagatctgaacgttcttcgaacgcctctccagaaatgttcaactagggcagaagatccagtatctgggtgggaaagatcttggacccttctttatgaggctgtctcatatactgatcaattcgttgctttgttttcatccgtcgaatcaaacatatccaaatgttcctcgtctgacggatctttttctctgacttgccacctttgttttctctcctagatggtttcgagacgggttctgtcggtacgtaggctcatagcctctcatagatgaagtggtatacccagacaatctggctcagactgatacatccactggatgcaatatgcatataacttataacaacctatctgttgtcagatcggatcccaaggactacggaaagcatacggttgcaggaatcttgacgcctgccttccttgagttttcaaaaagtcgagggaacgatttgtctacgcctcgtcctggattccctggattgaccggaggtaggcatctttcttttgttttactatcgcatctgccttgatcgtatggtgggtggttaggtttgattcgttccgatacacgtattgatttcgtatcacgtgggcgggcgcttgctctgaaaggttgtaggtggtgtctttgcgtagaggtttgtgatgcttcattattcttgacctttacaggagaacaactgtatcatcagagcactaagagaacgttttctacaacgactacagcgatggaaagaagccttcactgccagaacagaatatggagacaagattgtaccgttgtgagtctcatttgttgatgatcgtcctgctatatatatttatatacctggattaaccctggtcttgtttgtacttcgcaatctgacagggtcgatttgaccgctactcatgtttgtcttgttctctatttcttcatcctgaatgcgagtactggtttactgacggttcgggcttatgtttcatcgtatacacgagaacaggctgacgctttgaatcatgtacctctgagcgacttcaagatgtttagttcagaacacagacctcctcctcaacgttaattttctgtaggcttccttatctatgtacacgactgagtcttgcctgaaactgctagtaacaaatccaactgtatgccttgatgtgtgaaattgaatgacaagaatgactgccgtcgatgtcctatttatagtttgccttagtaaacgctctttctcgttcaaagaacaatcaaggcagtttccagagggtgagaaagcgatcagatacgtcccacagccccgatgtcgtccgtcggctactctgcaagcaaagagcgtcaag

SEQ ID NO: 594 - DNA, 91331 bp, Xanthophyllomyces dendrorhous
caagagcaaaagaccgcatgtcctccgtgaaggggtgtgggtggagtatcagcatctcgctttatgtggtgtagctagtgtaaactagcaagaccagttatatctctatagaaatgaatcctgcagagtctgtagagtggaaggaagatgtgcatcaaagcgagataaggtcagctattgaaggaagaaagcgaaaaccatagagggaagaaagtgaactaacgtggtcaatggagaaaagcaaaattgattgggcagaaactgacgaatttataccctgggcggagggaggtccgagcgtcacgcggctttcaactccgaagcttattcagcttatgagagtagatgaaaatttgaatccaattcaaatactactgcgcgcctctatcttggtgacgcagagagaacactcaaattatctgtatcattaatcgactctggctggccggtatcctctccttctctcctgcttggcccggtccttctgactcaatgagatatcatcaaccaaacttggagaacgaacatcgagattataaatcgcttctactcaatcttcgacatcaagacacgctcgaccttcgacaaggtctgatttcgcctcttgttagatacacccgaaagaaaccggctcggtcgagagcgagcgagcaaagatcgcgcttggaggatgagagcgatatggatatcggagaggaggacgaggatgggtatgaagataaagacgatgaagcggcctgggtgatcgaagacggcgttagaaagaggatcaaaggcgaagataaagaagagggagacggaagattcagtgacgtgtttggtttttcactgcctcctctccttcaagctcgaccagtccttccgaggatcccaccagaagatgagagaactttgttcccgctgtatgtctcccaactcccgccacctccgtttgagactctggcagacgagatcttgctgctcgcgaaaaagtttctgaaacaggaccggaaacgatgtttgaaggtaaagcctacccgattaccggccacaatggactcttgccaaaccgttgaaccctccctcccaacaagctcgctatgtcaacctccatcagcccaacctcaaccaccaatatccccaccttcgttgtcttcccaaccgccttctttgtttcctcctacttctcctcaccactatcagccatactgtccgccgaagagtagctctcaaacatccagtataacatctaaagaactcatccacacaaccaggtcactactagctgtcaccctggatggtttatcaaaagtcactcccgtcgacacgttcggcacagctcgggcaaagaagaggaaactgagggaagcagagtcgggatgggagagagtgttgaacgtgttgagtggactagatcaggattcattggatccagtgtgagtctttctcttctgcgctgcgctatctatcagccagttcttcttctttcttctcgatagagacgatcatagctgataaggttctctgacttcagtgtgaaggaacggacgattgcgcgtctggaaacgatttatggacttagaaaacggaattctctaggtaagagaaaacacccgactcggagcgatcttcaacttttccttttcgcttctgcccaactcttcgttctcgtttcgtcttgagactcatattgttccgttcatttctatctcatgtttttcttcttgcgggagggggaaaatctgtagatcactatgcagatgaaatcgatgaattggctaatgattcagacctcaatccagggcggagtaaacgaagggacaagacaagacacaaacgaaatgctcctcgtatgtcctctttctcttctcttctcttctcttctcttccaccttctccttcatctgggttctctcacgatgtctaacatagcgggattctattttctttttccaaatcttggggaacggactcttgtgcgcgaacagtactgacgaagaaggagaggtcgatacaagaggagacaagattcaagagccaagagaccttggataaacaatttgttccgacctctctcctccgtccactctcggtgtcttcctgtttctcttcttctcgaggttctaagggttttggatcggttggctcgagcaatcttgttagagcaagtacggagacagaccggagggcgaggaagagaacgagagggatatccgaagagagcacgacttcttctgatgatatcagggatgaagactctgatctaaactctgaagataaggaggtggaggaagaagaggaagaggaagaggaggaggagatggacagagagcaggaggaaggggaagacgaagcagaaaagctggaaggcactgggttgacaatattccatagcccgttcattccacctcgaaaacgttcggtcgagcgctccaaggacataaaggagtcttagtttttcgcgagcgagaacgcaatagaagagattaatatttgatagatgatactttgataggaaacaacaagaaaagaggatgacgatataaaaagagacagaaagggaagagacggatgaggtatatatctaatctgaagaagggagtttatgccttgttaagtccatcgaccgaccaaccctcctcgaccatgaccactcctacgctctccataacctccactgcctttttgcattcctcgatagtgacgttcaaactgggcaacaacctgacacaatccgtcccggccgtcaacaacaagactcctcgttctctgcacaactcaacaaaccgtcctggcattgcagggtgaacgaacggaataccaaggatgaggcctcttcctctgatggcagcagatgagggcgaggaaggcgaaggatcataaggcgtgggggtctgggagacaagtgtagggaagagtgaagggaatcgtgatagacagtccaccaaggtttgactggtcgagtgaaggtttgataagaaggatggagcggaaagtcgggtaaggacatggtgagctagtcgggtagatagcacgtttcctccaaacgtggttccgtgcgagcctgtgtaggtttaaagcgttgacaaacaagagtttatatttccatccccacaagggaggaagatcacaaaacgaaaagcagaaagagggacgaaccaacggtgacagctttgacgacattgtctcggaccatgatagccccgattgggattccattagccaaaggcttggccattgtcacgatatccggcctgcaagatagattacgatagatgatgagtattggccaggatgcatcgagggaggacatgagataagaaaggaggtagacctgaagatggaagatactcactggcactcgagagggtattttgagtgagcccacatcgtacccgttcggaaaagcccacactagaaagaaagagcatcgcggaaagtgagcaaaaggaaaggaaacccgtcgaataggaagaaagagagaagacttacttgaatctcgtcaaagataacgacggcgccgacctgcctggctcgattgacaacctttgtgagccactcggtctctgcctcaaagatcccaccctcaccctggatgggctccacaatgacaccgcaagtgcgctcattgataagatcctcgagtccgtcagactcattcatctttccgaccttcactccagggatgagaggcgcgaacggtgcttgatactttgggtttggagtcacactcaacgcgcccatggttcgtccgtgaaaggctcgttcgaaacagacgatgtctgacttttcaacaccctcgccagcttgttcggaagcaaactttcgggcaaacttgagagctccttcattcgcctcggctccagagttggcgaaaaagactttggcagagctcgagtcggcggtggtagatgtcgcggtgaggccgagaccaccgtgtgtctttgtgagctcgaccaacaggctcgcgcacggcccggcccattggttgtggtacacgttggacgaatggacgagcagtgcggcctgctcacctagcagtgtagcaatctaaaggattcgaaagattggagttagagatacaaatcgaccggcgataaagaagaagagattagctatcgaacttgcctgggaatcggcatgcccgagcgcgttgacggcgataccggcggaaaagtcgaggtattctctgttctgagtgtcgaatatggcgcttccctttccatgggtgaacacgattggtggtcgggagtaggtggaaaggaggccttcggcctgggcttcgagaaacttgacaacgtctgggggaaccgggtggtccgggtgagtgggcttaaggaaggccctgctaggctaagagagggaaaaaacggccgacagggttaagcaggtgctgagaacgaagataggagggacggaagaaaagaaaaggcgaggtgagagaaagaagagatcagacctgagtggaagccgaggcgagcctggaggcactgtgggagatggctctgagggagaacgaaggacacgctttcttgacgctagctctgagcatgattgaggacgacgcaagtagagaatgactgtttggacgagagcgactaaggatggtattgaggatgggagggagaacgggaaaaaagaggattgactcggacacgaacgattgacgattcgaaatggccgggcacaccgcggcggagagcggacggttactaaccgggttcggctgataagacatcaccgataacgcagcacgctggcgatccaaccggtgggcggtgagtaacctgaattcctggttgtgtgtttttatccgtcctgtagagtagagtagaatagagtagagtagagtagagtagagtagagtagagtagagtagagtagagtagagtagagtagagtagagtagagtagagtagagtagagtatagtgtgatgtctgatgtagtcttgacgacgtcagtacagtatgtatcatatagtgtccggtgtctagtgtctgttctgccaagtttctattgattagactggttgtattgtactgtactgtactgtattgtactgtattgtactgtattgtattgtattgtattgtattgtattgtattgtattgtattgtattgtattgtttgccatcaaatgttctgcgtattctctagtgtgtctatgcctaatacaccgtagagtacagctctagtccaatccctaatacgatcctaacaaaatccctgatagagtcccaaaaagaattcaaatacaattcgaatacaatccctaacacactgtgtaatacccccaaacacccaacgctccctctgccgacacgccggcggccggctgttgtgatttcttccttcgtcattcttcttgttctcctccttctcccaagcctcaccgactctgtcctgaatcccatcacccatcgagacgagcgaggcgttcattctctttcattctcttccttctttcatatctagtcctttctctatctctctcacaacacagacaagtcagaccatcaccttgaaccattctctcctctttgtctccgggtcaagcagaaagaaagtacacttggaaatcgatcgacgttcattcaacaatattcccttttcctctcccgccctcgctcgtgagttccagtctgttttgatgcatacagtcgtccatgccattgatcgttctatcgtctcccgaattccttccttagccttcacttcgtttgtctcggtcgacaccctcctcttcaactccgtgtctgtctttttgttgagtgaatacacagcatatacttctttgctgcgttcctgaaggacaatccgttagctttcctctgtcggcccttatcctactgctgtaggtcttggtctcaactctaaatcgtcttgtttgttctcttcctgcttaccccgacgcgcgccacgagctttttctgaccaaaatatactcgcgccttgttgctctctcctctctctctctctccctccctctcccctttgctcttctacacagacatccatggggttctttcatcgcacctcggactctggatcgtcctccgtcgccctgtcccgttcgtcaacggactcttacgcctctaccgcagacacaagcgacacctcctaccaaggttcagcctccgtctcgccaaacacacccttgccgaagtcctcgtcgtccagctcgctccgcgcattctttgcgtcccccaaacagttcatatttcctccaccagctgtgttctacccggcgtcaactaccaccaccgatcacatgtcttaccggtccagaggcaccagcttcgacagacaacacagctccggtcaggtcaccccaaacggatcagccggccttgagcgaaagacctcgagaagaaagcaacgatcacagtcgtttcatgtgctcaccccctcgtccagtcaaacctggctctccccggatggctcgacccgctcccgatccgattttcttctcgagatagcctgcaacaccgagaaggttccactcgtttcgtccacatcatccagacggaattctttcgttctgatgtcagcctgccactcgaccaactctcagagagacagctcagtcgattctctaggctcctcagtctctcgtcgacggaccagatcgatcgagtacgcagcagcagccggtacaccaacagcctcaacgtcggctgctggaacaccaatcgggacgcctcaatccatcaacatgaaacaactttctccccttcaggagttcagaagatctaactcggcgaccagaccgtttcctcttcgatcaaacaccgccccgcctgtctcacccacgcagctctcgaagattcccacatccaatcagcctgtcagctttatcgatgccctagccgaatctgcgagagagagacccgatcgagctgatggaccgaatgacgaaaacgagcgagacgaagaggacgacgaggacgatgatgacagatccacgatgaaacctaatcaggaacttcaacctagattaaaaattggaagctcgacgtcctcaagctcggctggcttccgagcagattcaccctcaggcaggtcccttcaaggaagaagaccaataggaaacagagggtataccaccacctctgtttccacttccacctccagccccaatgcaaccacttctatgatctatatcgatcgcgtcatccgcaccaccaggcatccgattccttcctgtcaaaaatcgacacgtacatcgaccgttcattcggttcctttcccgtcaacggcgtcatcaaagaacctcgctctctcctcttcaagagaacagttcaatcaactcgaaatccgaaatatccctctcatcacgacctctcctccatcagttctgaccggctcgacagtgacgttcaagccaaaatccagacgcaccctctccttgccctttcagcctcatctagcgttgtcgatcatcgaaccggccgaaccgaacgaggcggacgtagtcacaccgacagccactacgtttccgcccacttcgacatcaggtgccgctgccgctgccgctgctgccagtgcagccctatcaccatcctcgtccacatctaccatcacccccagaccgaggacacactcaactttctccagaccgctaacaacatctctcaaaggtgtccttccagaagtagctccgtcacagattccctcttcagccagcatggcgtgtctctcgacgttctcatcctgggactttccaccagccagagcagaatctctggcagcaaagcacaaagtgctgtccccgctggaatcttatgtgtttccaaccacctctcgatcgtccacaatgtcctcgtcaaactcattgatgcttcccccaccggtccctccgcctcgatcgatcagacgatcgatagtcggcggccaaccgactgctctggtggaacgagcgctgaactcaaaggcaacaaccgcccgaccgaacgtcaagtcttattccgcagtgcctacaattcctctagcatcttcttccaccgctcctaccttgacctcgactacgatcgcccagacctcttcttcttcttcttctactacctctttatcctctaccgctttatctctagccgcactgaccggaccatcacggacgacgctaaagaggtcgatgactgtaaattcgatcgttcacatacaggggccttcacaattatcgccgcctacagtcccatccagacatccgaatcgagcaaaacttcgaaatccacagtcatattccttacagaattgcaaaacaatatctgttcaaacgaacactggatcttcacgatcacactcgagtccgaactctgcttcatcgtcaacggcgctttcttcttctccagtctacatgttccctttggaaagctcgaacggatcagatcattcctcaaaaaggtctctatcaccttctctgaacggatacgtgtctgactctggacacaatcaccaccgccaccttcatgagatggggttcggatcaatctccactccggccggatgggcagatagaaggggctcccattcgagttcttcgtcccttcggcaggaagtctttccgtttgagaaaagtcgacctctggattcctctcatactgcgttttctcctatctcttccgaacggtctagcgcagggcaatcggccgcaaattacaacttcaacgtccatagaccgggaataggagacagaagacagaccacaggagggccaggcccgagtgtacgacagatggagagaacgttaagcatagacagtgagagttcgtcctccggcttttcctcttttgctatcgggaactacgacccatccgtcaacatgacggctatcgatccgggcatggaaaccggcctgagtacgggaggcacatcgggtgcgacaggaaagacgagaagcagaagctcgctgagcctcgctggtctgcttggtgggttcacaaaaagaggatccagtttctgggatggagcttcaaagaagagagatgatgatggcgaccagatcgatgagttcggacgacagaaggtcgttcattctttctcggacggaggggagagaaacgatgggagtagtcgcagaggacgaggaagaggaagggatgaaaagcgcgagcaagagaggcccgggcaggaagaagacgaagacgaggatgaagaagagttctgctcgttcgggaacatgtgaacacctcttctgtttcctccttttcttactgtttcatcagaaacaaaattgcatgttcacacacactcatactttccatttcacttccaacatatacccacaatccaataccatacttccagcaggaagggagggaaaaaagctggcccttcatttctcttcttccgtgtctggacttttacttctgctctcaaattgtctatttctctttttccatcaagttttttttcttctttttctttcaatcatccatctgccatcaccacaatcgaaactcaacacactcgggctcatcccattcaactcagatcatgtacaacaccatagatacgtataccctatacccctctcaccttctttctctcttgctcttctcttgtcttgactcaatcttgaacacatgacttgaccgtcgatcatcgactatcgacttttgactccattccttctcagtgtaaattgtgtactccctaccccacctctcatttaaatttccttcagtttcaattccaatacctcatcttgcccgttctctattctcatcctgtttgttgctccctgctttttataattttatatgaatcttgtttcggtctcgatttctggctcgatcttgcacattctgggctcatggttctgcttctgattgtgcacttcgtcctccccgtagacccttggaagtcttctggctgaaagatagttcaggaaaggctcagtgaaagggcaagaagggaagataggaagtagaagggagaccaagattgtatatgtcgtacggtgcacgagaaaagagtagagatagcgacgacgtgtcgtgagatataatgagaaaacaaaagatattctgaagatcgtgggtgacatcgatgacgatgatgatgaacattggctccgaacatgtaacataggctggcaagataagttattaacgaatccagaataaaagataacaaaaaaagaggataaaacacagccaaacctaaatggacaaataatcgaacaagactcgttgaaacatgaacgagaaaaacaagaaaaggaaggaataaataaaacagaagaacagtgaaggattgaagagtcatcaggtcaatagactactgttctttccggacacggcccaatacatcagctagagcggatatgttctgtgacacccacacccatatcaaacccacataaacagcgatggacaggtgagtcgatgaattctttggacgatctagcttggcttgtgatcatcgtagtgacttaccaagggctgttaagttcccgattatgtaggtcgattcaagaggtatcaagccatcagaataatctcgttgtatcaaccgcccaaatcaaatagaatgactcaccttcgataggtacgcgaagaacccagaggcctgacagagcgcttgggtatcctggtaggaatggagtaattgagaaaaagtgatcagtgtcggaataaaccataatcataaaaaagagtaaacaagagttttcagaaacatacgctatccgtgttctagaaaagacagggtcaccgaataaaatgcaaatcagttgggtgtttccctctgtgtagaaccaaagggcaaagacttacggcagtgagggctacaacaggcggatttcctgtcagaggactcgccataatccgtttctgagcggtatgcccatcacaaactggcatcgatagatcctatgttggttcgcgtgcgtcgagttcaaatcaatatcggacgcggatttctgagaggtaccaataatggaacaagactgaccatgagaattaagtcgtatctggagctctcggctgattcaatcgcctgagctccatcaaagactatatccacatctctgttgaaggcccgggtaagatgaaatgtcaagatcatacttatcagagaaacagtctaaacgagtgcggcctaccgatatccgaaccgctgtagaatcttctgtccaacgaccgtgttgactttgttgtcgcttcagagggtatagatagatgatgttagaaacacgtcaagccatgatagatttgaaccagcttactccaccagcagaatcttaagcggattattctatcgatgcaatgggtagaaagatgaaaagtcaatcaggtacagactcgttgatgaccaacaatgcacaacccgtcaacataccgatcccaagttcttatcaatatcggtcttcttctttgctttgggtagaggtgagccatttgaggctttattcgcagaagtgagaattccaagcagactctgaacctttactggtctagtcaagatgctaccctgcgatactcctaacgttgcagatgcttgaaccaactcagaggtcctgaccaaaagagttacagtggcttttggttgtaacatagagagccgttccagctcatctttagtcactagccgagaatcgatgaatatgaatgctattcggtagagatataatcagaacaggacatcagaccgaatttcttctccacataaatgatagaagataggttagataggacgaacaaaactgtgtgttggcaaaactgggaaaagattcagaagcgattgctgatgagtatgaagagaacgtcgacactgttgcggctccatatgcattcaggctgataatcgatatatcgtcagctgagcgcccacaacataagaataacgtgtgattgttttgtacattgagtacaggaaacacctactttcgtataaaaacatcccttgcgaccgattcttcaaacagaagaccagctgtgaatggctgtgatggaggcgaaagttttggaagaactggaggcgatcgatccaccttagagatgaagctgaagtagaacgtggaccctttccaaagcgtagaagtcgcccaagcgtccccaccaagaagtcgtgcaagactctgtgatatgactaagccaagaccagaaccaccatacgatctagttatactcgcgtctacctaaatgggattgtgttcatcagtatcaatcagaattatcagtttctcaagattgacggacctgagagaacgttttgaaaatacgatcctgtgatataagattgaacgaaatttgctgggatgagtcgaggaagtttgtaggagaagacagacacttgctcaccatcttctgcgcgggaataccgcatccctaagggtggtgatgagataagcaaacggaaatttagaggtttgtcaatggaaaaaaaaccgaagagtagaaattcgtaaacttacagtatcttctacgctgaccgttacacttttagtatcttcctcgacactcatgtcctcaatttgccctagaccaatcgaagaataatgagacgaatcagtgcgtcttgtcaagctgaccgatagagttgatgagaagccactcacatcggatgatcacggaacctgactcggtaaacttcgacgcattcctgtgaacacaaaacatcacatcagccatcagtatatcatcacccaggattgttacatatagaaagactgagaggttcgtacgataataagttcagcagctagttgaggaaaccatgtcagtaattaggtttgcacttgtatttctgcagcgaagaaaaacttacaatctgccgaattcgatatggatctaagtgtaaccaccagtgagaatctgattagattctagctcgcaaacacaggtatcacgaaatgtgagacttaccgcctagtaaagacggggggtcttttgaaacatccgtgcctataaaaatctcgatccgattcctgttttgaattgatagcgcaatggaatcgacctgtaaaacttgcagtaataagcatgttttccgtgacaaaccatcccaataatacaaatagagatagacgtaccgcaagttcaatgatggaccgaagattgaaaggaatgaactctggtgtgagagagccactttgtagtttgctcaaatcaagaacattgctaaaaagatagataattgatttgtgataagtcatgtgattactgggctttgtgaagaagacatataagatatacttgatgatggtctaaaacaatgcatgataaacgatcagaaactaaaatcatgatagaagcacataatatcatacgtacctgcagatcatctccagaccttcgaattgtctcgaggtgctcatgttgcagaggcgagagatcgggagcctcttgtaagaccgcactggtaacatgactgatggtcagcctggaacttgcagcgtgaagagttgaagagacttacgataatcccagaatagcgctaggaagggcaaaagatttgtatgtctcagcaactagatattttccggtaagtatgctagatgacggaaagaggttctcacaaaagaggtgttcgcatttcgtgactcatatgagagataaacttctgtttggctgcgagagcttcttccagatcccgagtccgagtagcgacctcgccctccagagatcgggtcagaagcgaagactccaccgccatagcagcaaaggctgtaaaaacaacattgttaaaaaaaactttattttcagcaagtagatattctctgcgacaacatcataagctactcactagctagagaagagaccatgtcaatctgttggtcgatcaaagaagcagaggcaacatacgatgcagaggaaaggaggataacctgaaagaacatgagagaaacatcagaagtcttatcatagttgattgccacgatcatatgaataacacacttactccaaccagcctcctcttattcgtcagaggtaatgccaacaggcttcggcatactcggttactgagaaaattatcctgcctcagggagctcgttgcgctatgactagtgatcttcttcttagtccggaaaacatgaaggagagtagatgcgggacacagttgttcggcagcactgagagggacattctgcagttcatatggttgacttgatcagtacttgagatatgacagatatgcaaaatacacttacaaaaggggctatagctccaaattctccggatgctctcagatgaagctctgaggtcttagagtctatcaacgcaagggcaccataatctcctcgaacaaactaaacgatttcaagagggcctataagcatgacaaccttatcaattcaaaaacaaattgaataaatttacttgcctgaagcaagatatccatcattttcacggctataccatataaacagacaccgtcagccaacagcgactctgctatctagaatgtttccgtattttagaagagagacctacttatcacatctggatcctgtggaacgagtatgatggttagtatatggttagcttggcgatcaaccttgatattaaactgtaaagacaactcaaaccttttccccagctatgaccaagcttgaccggacaaatgtgagatgatcaatgttattattttccgcaggcaatgctgtttcaggattatccggagaagagccatcctcgtgttttaagcttgttgtgctcattgtcgagtttgatagataggtcgaagagggtttgttgatcgtggagtcagattcagaacgcagaagttgtccaggtgatatcaatcgatgtgtaggaagcagttgaagcatagtgccactgggcaaaggaagaggtgttttgaactgcttcatgctctggaatgctgaagggaactcttccgcgaccgatctagaaagagcaactgttttcaagcagttataggcgttgctcgctgctcttgcatatcctgagataaatacaaaattgtaaaactcgctcggtggtcaatattctctttacttaaaaacttgaatctgattgtcctgtttgcttaccgacggatatggtccgtttaccagccttttgaagccagcgagcgacatatcgattgatcaagcctttcaccaaaagaatgaggcgtatcagctgtgttctagaaaatgttagtaacatgagttggcttacctaataaagccatccgttctaattgctcgcattgctcaatcaccccgtccaatacattcaacacactgtgtagatctgcagactttcgaactagcgaaaaagcaacgatgatctctcttcgaagctcatagtcgatggctattgaaaagacagggtggttaatatatatggtgatagatgagcacatgattctcaatcactcacacatcgtatctctccgaagtctatcaaggtgttgttgaacctgaacctgttcttcgtcagttccgtaccatacaatgatcaagctcgtgtagaagagccttcgttaaaagaaacatgtcagcgccacaaagtatcggattttctacttgtgcatatgggaaacggcgtacttaccattctagatggtagaccattgatggaaattcatctgggtctaccttgcctttgttctggacaatctcaaccaaacgctcacttgaagacccaaagtggatcgcaagagagagttctgtggttatccaacccagactagatcaaagagaaacccaatagaaagggtcatttacgaaaattggtttaacacacatcaagaaaaagtccataatatagttgtgaaactcacctgtaaagaggcaaagacttgattagatcatagtcagcttcctggatgtatacgccgttcaagcctaagaacaaatcactgttagaatgaaaggatccaactaagaaatgaagatttgtcaaaaccgacgtacgactcaattctgagcaaggctttgatggatggcacatgttctcagcagcttggatcgaagtgtctatagacgcagaaataaaacgcatgttgttgattagttgcaccatgggaaccagtcaaacagccagcgaaactcttacttaccaatgagtactcgggctaggcgatttagaagacatcgtgagagtgagtgaactgacatcagaatgattattgaaacaattgaccaaccttcttttgtagtagcatcgacggaggggtaccatttgatgatctatgattatttgtgtaagcgtgttgccatcagtctgataccaagacaagcaggattgacggactttttgaaaccacttgtcaaaccgataaccagagaagaatcgagtggagaactccaacgcaactgcgtacgtcaacacgtctgtgttgcccatgtcagatgatagcttgaacgatgggtcgtacatcacacaaggcaacggctcgaatacgaggctttgacaatatataacgataacactaggctttgagtcagaaaagagagcaaacatagggttagcaaaaaaaaatgctgtaagatgattaggaagaatagccaaggagagttgcaaaccccttcaaaaaatgtccctttgatgagagggaggatagctcgtgcaatgtcgacaaagttctttcgttggtgaaccccgaggctcagggctgtagagagagaataagttgagaatatatatgtctagaacacaaaagacaaagtcaagaccgttgaatcactatggacagtatatcttactaactgtgtcaattgactcacggttacgcccagcttattgcggaatatcgcgaccgactggctcaaaagaccaacaccaagcctcagcaatggcacggcatgaggactaagcgtgacctgtacgacgagaagaaaaaagatcaatatctccgccgttagtctgtgacataatgtgtgcttctcacatagagagtcggtccgacggatgctagatatatgacaacgtcacgcttcattcagttgtttgattcacctttgtagatagcataataagaaaaatcagacctatcagggtacagagaagagcttgtatctcttcctctggtgttagtaccggtattggaggtggtctaaacgtccattcggagactcgagcgaaatcctcatcgcgcgaaggaataaaaagcttggtaccaaaatcttcataaccagccatacgaacagcagcgacaagctcatccacggcgaccaaactaaatgtttacagatgagtgaactctcatcagcgaagtcgatagatgactgaacttactaagaaccggccgatatatgacatcgaatgatgatagttacaattttaagctgctcgattgtgttcgacgtgaatttgagaaactcttccatctgacaaacgacggcatagattaggcctcaaagaaccgacagatattcttagttcagaacctagacaaacctttgagatggcggaaacctgatcgttcatgagtgctgcaacgtccgagtaaacttcggcatagaaaaaacagacacttcgcgtccgaatccaagcttcaggctcggaaaactttgcaatgtcgtctgctaatttgaggtagtccattgatatccggattgaggccgagcggctggctctctgtgctgcttgacaagctagcaatacgagctcatcctcgttgtctatttttcggccatgcttggtagcaatgacatagttgtcgacaactgcaaggaaaattcaatcaaaaacgatataatggaaagagattagaacatcaagccatgaaacttactgtcatatataaagtcgactgagaaatctgaatgatggaaacagctagcaatacgaaagtgtgtgttggccatagaagacccagaagataacaaacggtatgaggcggccttgagaaatcgaatcataaccgagctttgttagcagtcctgattgaagggagagaaaaccccgtactcacctgctgacgatcgtgagagaatcgaactgtcttgtcatcaagaatgacgatacccttaaggacaagcgacgatatagcatcagtctttgaatgcgaagaagaggttacggattatgtcaactgactaaaagtgtcgcagtgtgtagcatcacttctgtttgatgacgttcctttccaagaatcatcgcgagatgttcgatcttacacgctctcgattgcaagcaggacaaaacctgtggtgcgggagagatgaaaagttgtcttcatgtaaacagttatcatcgaagacagatagattgaagagatttacctcaagggcttcctgaacattttctggcagtgttttgaggatggaatcaaggaattcatcaactccgacggatgaatgatcttgaagcgcaaatatatcaaacttccactggaaaaggtcgaaagcaaagactaaaagagagcaaagctttaggaacgagagagcaaatcgacaattcgtgagcagtatacgcgaaggtattactaacagatgactccctctcgaaccaaagcggcaaccaaggctatcacacagaatgacattgctcgaatcgttattactagatcacatcgttggtaaaagaaagactcacaacgtaagaacaataaatttccgtctgtttgactatacaggaaagaaaccaagtacggcgagtttgctaccgcagaaatgcttgcctgatcccaaccaaagcatgcacttaagaacttttccacgccctgttcgttcagcctagtaatgtgcagcatcataggagatggaatattcgttgcttctggaggaggctcaagattttccgttcggtacaaagtgatcaggagggcatgctccagacgatttttcgtttgaagactgatgtttctccacctgtctcaagccaacgaattgagagttagagcgcgggccatgaagctaacaccggttgtcagactattttactgccaaactgacaatattaattcctcgggagcaactatcgtgatgtaaataaacacgtaatggtaactaggttagatacttaagaactgggcttcaatcagaggaaattaagaaaagagtcttacgagcttggatatcgtccaacaccaataccaatggccgatcatgtgtggcaaatacttgcaagagcgtcttggaccagatctcaaacatctccgtgaagtgtgtccaatcgatctggccaacctctgtggtggtgtaggccagatcaggatctgataagagcagaaaatccctccattctgcactaatcaggctgaggaaggtgtttacgagattagcaggtaaagcgtttaggatcttctttcgccattcacgagcgtcgactttggggtctgatatgtttatataagagttgccaaggaaggtaagccactggcaggccaagatcgtatgatttgattaaacttaaattgacctgtgaaaaccctgtcgagcagaccttcgaaaatctgcacaaatccagagaatggtttcttcatatgcactatagaagaaatagaacggagtatcggaaccaagttagacaagttagacataacgcgtataaaagagaaggacatatgacagccaacttacaatctaatttggcccaacccaaaagacaacttttccccttatccatatcgaccacctttttcgcccagacctctaccaacttgcttttcccacatccactatttccataaatattcactgagacaaagactccctttacgtttgatatgttaggtccgtcttccataagttcacttgcgggcaggctcgacgtgccgaccgttgatcggcgagcaatagtatgagtggccgatgcggaacagactatgtagaaagctcggtcgagcatcccgatctcattctcccgatctatcaaattcttaggaatctgaaatttggacgctcgattagcttcgccgatgcgcaatcggctgatctcctccttgctgtttcctcgatagcagaggatggtaaatttgttcaagtcgtaaagcactaaagtgaagatataagaaaaccgtaagaacgaacgaaactcctttgccttgtctacattgattttatgaacgtgacgtactcgtttttatacttgaatagcgctcggtaggatctttctcaagacacaacatgatgatttcagcaagagagggtggtacaatatctggtggttgaactttccgggtgatatgacggctttaaagtgaaggatcgagatattgagtaagagtttaaaaagacgacgagcaagacggaagacgtactggacatctgtcaacatgtccagctcggatgaactcatcggctcaattggaacgcctgtcaccatctcgtagcagaaaacaccgaacgagtaaactggagcgggtttttccattgtttcatattggtgataaaccgagactcttttaagctctagcaagacaaactaggaagcaaagagaagtgcaacaagatcgacgaaccatccaatgtgacttgcggcatgattgctcttctcgttgataaaaactctggtccaaggaacctcaagtgcctatgcatcagaatctccgccagcgctcttcccttcacgcctgtctctctttgtgtttcatcctctgcttgtgcgaccaggtatgccggtacttcggtcgcaccaacctccgtagatgagactactggagccaccatgcttgctcgatcgggaaaaattgaaaggaaagcatctcgatcaaatccgggaaggaagactgcagtggacagatccatgagctcgacctggtattttatgggatcgttatttatgctgggcttgatttcgtaatattcctcggtggacatggtctccagtctgattcgaaaaaactcggctcggcacaccggcagagatattttccgttcatgtagtgtctggggatgaagaaagttcaatatcacaccaaacaatgattcgaagtagagcatttcgaaaaacatgttgaaagctcacttactatcaaaacctcagccactttcaaaagcacctcgcaggccaaagcacatcttcgtcctgctttggccaacgtatctctatcgactccagatgataattcctcatcttcattgacctcatgtatctcccttttttgaacacttccaacccaatattcttccaacgtcacgtagtttcgatgttcatcatccactatcatccacaagccttcactatcctcccaaaaagccaagatgctgttgagaaaaggaaggaagactccggacgtggctacattattatcagacgacaaggttccagagatgctagatttaacagatgtattggaacgtctggatgcgttgcgggtgacgagaacacctgaggtatctggctcagaatctgatcccgagtgactatatgtgttggattgtctttcttgggcaaatagattaaacaatcttctgtttctctgaaacaatagggaccctaagtaatgtcattttaaaacagagaagcgatcaagaatcaatacgagaaactctgcagtcaagaactctagatcgatcacaccttctttatgcgatgaatatgtgaagcttcgagcggtcgttttagcaagtcaatgtgtcagatggttcgttcagaatgctccttacttctcactacccatatctgtccccagaagaataatcaaggataaataaaaccaaacatacaaaaactcgactcttcgcggtttgttcctaggttgaaggtctatccgaccgggccaatccaagacctgaaaatcctcggtcggttcccagagggcacgaccggataacgaataatgaactggttggccgtcttctacagtcttcagatctatttgagagagcccttttgacgcgtaatcgggtacgctcatcctctgtcgtagttttcttcgctctaaactgttattatctctccgtcaggaagaagagagaaacagaagaagaaaaggagagggcaacttgggttaaatgtatggtcgaaaatggaaggttacccaagcgatgctgagtgaaggttaggaccggcgattgaagtttcatgaaccctaactgaatcaaacgcgcggttgtgtattgtttattagtcgggctgatcaaattagataacttggccattttgccttgatacgtatatgttcttgcttcatcatatcatgtgtcaacggtccgtcgaaaccaagacaattccgatagacttctatggtctcttcaagagtgaataggaggattgaacaatctcgtggcccactggtttcaaatgtatatagagaaccagtctcagcttctgcagtcattcccagtctggtagagatattcagtgactgcgcatcccttgactaggccgtgttgggttcggtcgtttaacttgaagtaagacaatgtcgatcagttttattaatagcagtcataaaagttctttaaaaatatcagatttggcattagattggcatatactgaagcaattatgtacatatttaaataaaacgaaagaatattatgattatatctcgactcaatccatctcttcgatctccaaatcgtccatgtcttcatccgaggtttcgtcaacttcgacctctggtgcatggtttggctgaatcgtaagctaatcatcacaaaaagaaacagcaggaaggagaagatatcagcacaaagagacatagccaagacaagccgagaaagagagcaaaaatgttagaagaaaaaaacgtaccctgttgttgacatgatcagctgtaaccactgccgtttctaactctcgaacggatccatcaagaacacatcgggatagtgggaagaggatctcggactgcattactcggttcaatggtcgagctccatactgtgggctgtatccagcactcgccaaccattcctttgcatccggctggatgtccagtttgatctttttgttcgacttcagtctcgtttccagttctttgagtcggatatcaacaaccgacatcatgtccgatcgggagagcggattgaagatgatcgtgtcatccagtctgttgagaaattcgggagggaagtgtgcctgaacagcacccatcaccagagatttagtcggtttcgagatcggtccttcaggtgcttcgttcaaataggcagcacccaaattactcgtgaacagaaagatggtgttcttgaagttgatctttcggccttttccatcagtcgcatggccatcatccaagatctgtaggaaaacggcagaaaactctcgacaggccttctcaacttcgtccaccaaaatgagggtgtacggctttcgtcggacggcctccgtcaactgaccgccctgatcgtatccgacatatccaggaggtgcaccaataagtctggcaacagagtgcttctcggtgtattctgatgcatcgattcggaccattgcatcagcgctgttgaacataaactctgccagcgttctgtttggtaagagaagaaataatcgacgaccaataagctttcgttcgactggatatcaacaaggcaaataagaaatacagaagatactcacttggcgagcaacgtctttccagttccagatggtccacacagaaggaaacttgcgatcggccggttcggattgcccaagccacttcgagacaatcggatagcatttgagacggatttgacggcatcgggctgaccgacaattgctttggtaaggattttctccatatggagaagtttctggacaaaatcataccaaaacgaagccgatggttactatctcttcataacagaaagataaaccaaaacgaaacataacaaaatgagactccctacctgtttttctgtggacatcagacgttgagcaggaatcgcggtccaacgggccacgacctcagcaatctggtcgggagtcacgatatcactttctggtacctgttgtaaccaaaattagagtatagaactcagtaccaacacgtttttcacaaagcgagaataaaaaatcggcactcacctctccggcagcctccttctctgctttcttctcttctaacatctgtagccttttctggaggtccgggatcgcatagtacttgaggtccgccgcggtctcaaggtccatccgtcgctcggcatcaagaacctttgcctttagctcgtcaatcttggttcggactgtgttgatctcgtctcctcgagatttctcaaattcatatttggccttgagaggctcgagttcgtcttggagatccgagatttgcttgcgagcaatctcaagccgctccttcgaagccgaatccttctctcgctcaagcgcatgaacctcgacttcgagctccagacgtttcctctccaatagatccagctcttctggtctagtttctcgtgcgactttcacgctcgatgctgcctcatccaacaaatcaatagccgaatccggaagttttctcgaggtgaggtactgctttgccagttgagcggccaaaaccaatgaactgtcaagaattcgaactccgtgatggattgcgtatttttcactgattcctcgaagaatggagatcgtttcgggaacggtaggctcattgacctgaacctgggcaaatcgtcgttcgaaggcagcatccttctccacgtattctcggtactcgttcaaagtagtcgcaccaatacatcggagttttccacgagcaagcaacggcttgagaaggttagcggcgtccatacctccagagtcgcttcctcggccagccatgatgaggtgcatctcgtcgatgaacagaatgattccttgaccttgctcggcagctttctcaatgtcgctcattactcctttaacacgctcctcatactctcctttgtattttgctccactgaaaagaaaattcagtaaaatcgatcaatacgtaatcagcagagatttttctgcaagacaagagacgagcagagagacttacgccatgagagctcccatgtccaagctgtagatctttccgaagagtgaagtaggaacatctcttgcaacgatacctgtatcgtttaatgtatcaaggaaacgaacgctgtcagcatggttgctaatctgaggatttcgtcctacaaagatgatactcacgttgcgcaagaagctctgctatcgaagtttttccaactcccggctgtcaacaagaacgagagattaagtaacacggtccagtacaggcgacacgaaaaaccgagctcacctctcctatgagaactgggttgttcttcgttcttctacataaaatgcggatgacccgtctagtctcattgtctcgcccaatgacgggatccagttttccctcctctgccaactttgtgagatccacgcagaactttgcgaggttttctccaacttcggctcctccagcagcggccttatcggcatctttggagtctactcgtctccctgcgcggagggttgtaagagcgtcgagcagcggttgagcaggaagagaaagagaagcaagaacaggagtcatttgagagtgttgaatgagtggtgggagcaggtggagtggagaaaggtaggtgtcattctagtgattgtatcagaatgaaaaacaaaaaacaaaaaacatctgagtcagtgattgccgtaaataagtaccctgaaaactttctcggagaaagacgtacctgagtcttcatcaaagactgagcatctttgaggagcttgttgataggtccgatagtcacatcgtccggcggagggttttgggcgggaagacgaacgatggctttttgcagagctcgttgaagagcgacctgaggtgaacaacatcaacggatcggaagtcgtggatgagtgttctattgatacaaaaaggtcatgaggatgataggggtgataaacttactgggtcccctccaactttttccactacgctccaaaggacgctttgtttgcctgcgcccggagactctgcagtttgattgggatctgcgagaagagcgagagcgagatggacagggtagacttgagatgatgcgtatgattttgcgatctaacaatgaaacgttcgatgatcagcatgtcgtgaattcacaaaagaggttacaaacgagatttagcaatgaatcaactcacctcgagagctgacgagatagcttgttgagaaagttcagtgaactggaaagagctcatggtgggattaaatgtgaaatgtgtgtcagtgcgtgtatgtatctgtatgtgtatatgtggtttaggtgtgttggagtatcagttggatgaggtgagatgaagaagcaactcaagtttatatagagcatagaaccactgacatcatcctcgccgaaaattccagcgccttctcgaaactatacaaaccactcatctaatccacactctctacacttcccatacagtatgcgtgtgtgtttgtttgaatgtagacatcatatttactcggaacaggttctctcgctttctctcactgtcatggtatcgtccatatctcgagggtgctgttctttccagaataatctgttgagctgttctttgtattccagattctgcaatctgaagtcgcgtcggacggaagccgcgaaaatcaaaaaagatatacagcccttatttaagtcgtcatctccatggttacggccgataatagatagagctgagaggcctatgatcgaacttccaaagaatcaagccagacgacccatcatcgtcggaattcttccgttggccaatactttttcatacactcaggttcctatattcgttccatatggctccccggaagacaggaaaaggaatcgtcaagtctggagcagtgtcctccaaggcatcacctttgccagagaaggcaaaggaaccagctgttcctttgacacctgaagaactcatccatcgagagctaaagcgaccaggttataaggtctgtttgttcattcattgatttatctctcgattgtctacagagtcttatagagagatgctaatggtccgttggaagaacttgtttcataaatttatcgtcccaaaagactccggtcaccatccttgtatgtgctcatcattcagatgtagggtcgcgtctccgacacagaaagaatcttgttcaagacatattcagccagtcgtcaccagctcaaacaatctcgaatgctcaatagtcactcatcctctttctcatcctgtttgtatggctctgacagaatgagaggtgtcaacgactaaattgggaacgacctgatttgatgaccgtacgttataacccaatctttcatacaagcccttcgtcaatcattactttattctcttgcctttcttcgattctctcattacaatacaatcacatatatgtttagcgtcaaacgggctcaacattttcttgcgcggtcaatttaaagcgacatatcaagaaatctcagaattctcctatcgagagtgttctgttggctccgcatcctcctttaactagtgcaaccgctttggaggcacgacatatggccgcggtgtatgcgctctttagattcaactcggtacgttaaaagagaatctatatctatctatctatctatcaatatcgaaaaaggtcttatcgaacgcttcccttgtacttgccctttcaaacatcagggacaacctctttcgatgacccttccacctcatttccgaccatactggacggaacttctcaaagagaaggcttctgcgcccgatcatcgagcttgggaatgggctgacgatcctttcaacgccagaaaggctgtagaagatcgacaagtcaggaagcaagccgtcgaccaggctcgtgccgccgcttccggtggtgggggtagcaatggaataggaggcggtggatctgctatcgtcctcggaccttcgggccgtccattatcgaacgcagaggcttcccaaatcccagaagtcagaatggcgcctgttcttcgagaacttatcgagcagacaatcaagaaccagatgctgaattatccagaagccatcttgactgctactcgagaatcatcctctacaccttctggatcgaacactccaggaacgttcgataccgctaagctggagcagaatctgctagaacttggtttcagaaagagtcatgtaatctctgtcattggattcttgataggtgccagagagaggattcataaagggatcgccgatggggaaggcttggacccgttggtattggcattgagtagactgtcagaggaggaggccgcagttgagtggttgatcttgcatttgccagaggtgagtgtttccatgtctatcagactagatatcctggtgcgcgagagaattgacatgcttgaatgatcgatatattaggacgatctacctaagaggttcgttctattagccttgactttcattcagttatagattgttgcgctgtatgatccaacgctcatcttggtcaaatcttatattctaggtttcgcccatcgacgtctgtcgcagatttcgtttcctctgcccgagcgtcttcgagtaaacaatccatcaaccagtcttggctcgttgataaactaattcacaaaatcggatttcctcgctcaatcattcttgaaattcttaaactccaaggagatggagaatttgacgaaggtcagatgttagaaattctgagtagaaaacttgtaggctgggacgaagatcccgagtggggaatcgatcttatcacggaccgggcagtcacggatgtaagtgagcaagattggtccgagagggacgaaaggcgacaagaagagatcgaagccctggaagctgtttttggagaccgattgaagattttaccaagagattcttctctcaactcggctacagaggtttctatctcgatcccacctcgctatgcctcggaatcgaaggacgacctgacgcttcatatcctgttttcggcttcctccccttacccatcttccctctacccaactgcaattccgccattctatctgacctcaacaactcttccttcctacattcgattacatctctatgcgtctctgctcaatcttttccgggatcccaatcgcgaggactttgcatccattttagcatcgggagatggaggagtcggttcaggattggtcgatcatttagaagagatctgggaagaagctgtagagcatcctccaggcgtaggagaggtcacactgcatctcctgccaaaaatgtctcctgcgcctacgtccgaaggccctaaagcgggccaagtaggaagagtaaaggtgcgaggaaccggagggagaaagctccgggtttacacgaaggaggaaaacgaaaagctgaagaaacggaccgaggagtggcaaggtagagaagagtttaagagcgtgatgaagggacgaatgagtttgcctgcttggaaagtcaaggaagagattctgcaaggggttgagtcaaacagagttgtggtcatcattggagaggtacgtcaatcatgaagatatcgagcgtaatgaagccgtctacttttctctgatctcttgacgcgctcttttttgtctctgctatcaagactggttctggaaagactactcagcttccccaattcattcttggtgagtgctcgatggatcaagtgttgtaccgttcttcggcatcatgagagagaagcaaatttaacatttgagtgttatgcgtcttttcaagataacgagattgcgtccctgagaggttgttcaacaaacattcttgtcactcagcctcgacgagtgtctgctctcggagtcgctgcacgtgtagctcaagaacgactagaagacgtagatagagtctcaggttcagttggatacgctatccgaggtgaaagacgagccggcccagacacgaaactgttgttctgtacaacaggagtcttgttaaggagactgagcagcggaggtgatacaaatctagatggcgtcagtcatgtcatcgtcgatgaggtttgtccttcttacttcttatcgatatgcgcctcatgcaaagtcaaatgcgagatgctgatagataaatcttgaacgcacttaaaaaggttcatgaaagatctgtggatggcgatttcttactgttggaacttcgtgagctactaaaacgcaatagtaccatcaaggtgagatcacttgttcactcagtcattgtgcatggctactctgtgttgaaactgaaatgttttgtattgttcttacaatcagatcatcctcatgagtcagtgaagttatctatcgtacatactggtctaatttcttccgacacctgatgactcgattcttaattcatgtatctaggtgcgaccatcaaccacaaaacattcaccacctactttgagtcccctacaactggtcctgctccccttcttgagattcatggccgtactttccccgtagaggaccactacctcgaggatgttatcggacagatccgataccgtccatccaataatgtgcgaccgacagagcgccagacagaagaacaactcaaatcattcaaagcggagtatgagagtaaaggccttggatcgagtgaaattcagttgttggatactgtttcgagatccgacaagcttgatccagggttggtagctgctgtggcagcatacgcgatcacagagccaaacgctgatggaggtggtgtgcttatattctgtcctggtacatcttaatctctgcatcgaatgtcgagtgataacattcacaaggatgcaaaacttactcttatggctatcttttgttcgcaggtgtgatggaaatcaaccagacaatccaggctctccgatcgatgaatttaggcaaagttgagattatgcctcttcatgctcaactctctagtcaggagcagaagagggtcttcgtcaaacttccagctgaaatccgaaagattgtagttgctactaatgtcgctgagacctctatcacaatcgagtgagtattcatcttttctcctctatttaaaaactataccttctatcccagttcgggtttgcttacagccgtttccttcatcttaccagcgatatcactgtcgtagtagataccggtaaagtaaaggaaacacagtttgaagctgagagaggcatgcagttgttggtagaagtcttgacaaggttaggaacatcgactctttgatttttcgcattactgagacttacatacatacaaatgactatctacagtaaagcggcttcacgtcaaagaaaaggtcgagcaggtcgaacgaaacccggaaaggtatgtatcctcacttgtaatctttttgctcggtttcgatatgaactaacatcgcgctaccctaacttacatcaagtgttataaagtgagtattagctagcatcatgtcatgtcacttatagctgataattttgtttctctctatgttaggtattcactcgacgaatggaaaacaacaagatgccttcattccctgttcccgaaagtaagaccttccatgactcacaaaaggacccatatcagatactaataatctgtacatgacgtacacagttctacgtactccacttgaggctctctttcttcaagtcaaagccatgcgaggcgatgaagacgtcaaagctttcttgtccaaagcaatttctcctccgtcgatgccgaacatgaacgtggcgtggcagacgttgattgatctaggcgctgtagaagcggaacacgaaacgtcgaacctgacagctttaggaagacatgtacgtactcagctcatgagaacacaacgtcgttatgcagcgtattgacaattatgcgttgtccaatctttgacagatgtcttctattcctgtagatttacgtcttgcgaaaatgcttgtgttagctgctatcttcaaatgcttagatccaagtgcgttcagttatcttttgcgtggaaatcttggaatatatatatataccatcattctgacttcaagatccgatatctagttgtgactattgcagccatcctttcttcgaaacctttgttcttatcccctatggacaaaagagatcaagctcagaagtaacataccttctccatcagctgttctcttagagtcggttgtgtactaacaaaggaattgcttctgttgatatttaaaagagctcgagctcaatttgttaccgcaaactccgatttgttgaccgatgcgaaagcatacacagcatgtgccgatatcaagggtttcagtggtcaaagattattttgtgaagaggtgggtgaactgaatattgaactccactctcattcatcagttgttaattaagtctttgttgcacagaactttttgtcgatgactagtgttcgggatatcaccactgctaagtcagacttcatcggggcccttcaagatattgggtttgtgccgcctggatcgtctcggacttcatttccccatttaaatacggtaaatatgcttttatattgatctacagttagcacgagcagattgttaacttgaaagtatatcgtttaccattcacagaatagttgcaacgagaatctcgtgaaatctgttagtcactgttgttcacgtctgtattcatgtctcaagtctaattcccgaatatatgctttagatcgtgcttggagggctgtacccgcgtttggctgtttgtctttctcatctcatttggtaaatatataaataaaaagatgttagaactgatccaacgtctatgtttatggcatgatataacagaaagtatccatgcccaaagcaaagttcgagcaactgcaatcgggaactttacaaaaggaacacctcgcaaaagaggtcaagttttttgaccagcaagaacgagttttccttcatcctggatctgtccttttcggagaggcaaaaattccatccgggttcctcgcttactgggccaagaatcaaacaaccaaggtctttctccgagacgcgacagaagttccgttgtatggcctacttttgtttggaggtaaagtcacagtaaatcatttctcgtcaatgcttatgttaggaaacggttgggtcaaactcaaggcgtggacgaggatcggagttttagtgaaccaacttcgacgactcttagatgcttccgtgagttactgatatttctcatcacatccgatctttgaatttcgttcaactcgtatcctgacttatttgttactgttcctataaagctggatgcacagtttgatgatccaacggcgtctacgtccgatgagatcattcaagcgatgctcgctcttcttgtcaaggatggattaacagcttagaatcttagcgtatctaatacatttttgtttttcagatgctgtcttttcaattttcattcagtcatttgtctcatcgaaaaacttgcattgaaatggcgaatatagtggtaaattgagatcaagaggaagagatagaataacatcattatttatggagacaacatatattgcgcaaaaggatatctccctaggaacgaagaacgagaaaggagacacgaaaaagatgaaatgaagaatgaaagatgcaaaggagatgcaagaaaacccattaagacccatccagtaacataaaccaaaagaaaacaaaataaaagattcgaaaaagacgaattaaaacaaaaggacagaatgaaatgaataaatggatgtgctttcaagtcttcgcctctcctccgtcctcactctctcgcaacttagtctcacactgttcctacacaactcattcaaccttgggcttcttctcctccgtcccggccccttcttcttccgcctttctctttacctgcccatcagctgtccccactccagctccaaccatagccacagcactggtatcaatcttctccactttcatcttgtctaacgagagagtgttcgtcgacgacaacaaagcagcacttggcactttggtcgtagatgcagacgtgggcgtaggtgtaggtgtaggagcaggagagggagcttcactcgaaggtgacattgacagaacagctgctaggtcgtccaaactcgggacataactcgtcggtgttgagccaacaccggcgacagcagtagcagttgtcgcagatgtaatcgctgaggttgttgaggatatagtggaagtggaagtgaaagtggaagtggaagtggaagtggaagtggggagtggaggagcactttggttcttgggaagaggtctggaaatgtttgtagacgtagcaggttgggtgggcctaataggcgtagaagtgacaggagcgcggttcaaagtcgatgatggacctgcttttgtaggtgtcactatcgcagagccggacggaagctgtagagaaggccgagccgcaacagatccaacagggcgaacagagggaccaggtggtcttgcttgagttgtagcaggcctaaccggccttaccgctccaactcctgcagaaggtccgacagttctcgttcctgatcctgccgctgttgtggcgactccactggatcttggtgtcaattttccttgcaacagaggtggaacatagagcggcacacctggcgctcgacccgttttgatcaactgagcagccacgttcagatctgctttgtctcctatggaactcaagtactggaagaaagcacctgcatgagggcctagaccggcgagacctagttgaggattagacgcgtaggccgaaagagctgctcgcgggtcagcagggacacctggtaaagtaggcgccgggcgaggttggacgaggggccgaactgtggttgcacttgtagctgcagatgagacaggtcggacagtggatgctgcaggccgaggtggaggaggccgggtatttattggacggccaactgctggtcggaccgacagcgggggtcgggcaccagtgccaactgtgctcgttgggtttgacggtcgaactgctcctcctacggagggacgaatcggaggcggtcttccaacagcgtttgttggtgttccacctggtcgaacaccccctgtacctccagtaccaccaccagccgtagaaccagcacccccggatttaccttgagcgtccaactttgctttcaggtgatcgacaatataagccctcaggatcttcaaggccttttcctgacccagactctccaaataatccaactgaggtcttggaacatgagaaaagattgctggatcaagcaatagacttccttgatacatcgccataggagtagactccaacaatcgatgaggaggtgtggtttgaagatgagctggaataggcgaaacgagtagcggaagtctagtattcggagagattgtgagtgtccgacctccgttcaagggtgggcccccagttccggtggacccaccacctgccggaggaggtcgacctactgctgttgccgtggtaggaagtggtcgactgggttggtttccaagggacgaaggaattgctaacggtttgtgtagcacattgtcacccaccgaaatcggttttccagccagtcttccaacaccatttgagggatacgcatccggtacagccaatgaaggaattcctcccggccctgcttgtccgacgttgactccacttgtggatgaagacccgatcttcccatctttgcccatctccttttctttcgcctttcgcattttctcctgcttagatactcggtttttgatttctgattcggcagtcgccatgagggctccttcgcaagcagggtcgagtttccagtaggcacctgcatttttgggttgatctgggcgaagagggactttctgaaaggcttcattggtggaaagcgtatgcctcaacgagttctgtttcgccgatgaattaggaggcccaaaagtcaaatgcagatgtcaatttgataacagagtcgtacacggcaagggatggataagcctagaagacagacaaagaacgaacctgccaaccactgttcttgttcacccgataccactcaaactcattcatgatccaatcacagatcattctcaacgttccctggttgccttcaaagctttggagactcaacagaatggctgtgttgtacgtcaatggcggtttcgcagcctcaccttcttctgttgtctggcccattggaatgagcgccgagagtggattggcgtggagaggacgggtaggtggtaggccaagattggagctagagttactattcgttcgacggatacctgaaggaggagagacagacgccgatgctgtaggcgagggggactggaagtttccagtcgaggcggataacatatgagcagctgtagaagatgcagacgccgaacctgagccagagttggatccagaggtagaaccgtagtggatttgatgatgatgcagcaacgccgcttgctgcgagagaattgtcgacgacgagatcggcatctgagaacctgatcttcctgttgatgacatattcgatgaaggatgagtatgggaagggattggtcgatgtgatgttgatccacctaaaatttcggctgatgtcaatgggacttgaggtcgataagttggccctgtcgtgatagatggtgatataggatgtggatggttcgttaaagaaggaagggactgaggtcggacagcttgtcgtaggatcgatgtgttggcaacaagaggctttgctccaccgccaagcgcagagacagacctattcggaccagtaccaactgttgaatttgttcctgttgagccgcttgttactcggctgggtagatttacgctcgagcccgcaggaccaccaacagacctggcggtcattggggtagtcgatattccagtcccgtttgataggacggacggagcgatctgacctggcttaccagttgatgcaggttgtacccctcttgatgcaggacctgtcaaaggggccggtttacccgtcgacacgtttgtatgtattgttgaagcagaattcagaggtgaacccagagaagctgaaggttgcgaaagttgtttgacaggtccagatcctgaactttgggacaaaggactaggcactcctcttcccatactaacaccactggaagcgatatgttttgtcgaagtgttacctgccgagtcaatgacaacagtagaatctgtggatgtcgaatttggtctatcagatggaggcatactggtagaaaccggtgtctttggagggttctgcgatggagaagatggttttgtgattgtagagagtgcagattgaacgaccgatgagtgattagaatgcgacggggtctgagcgtcagaaggataggaaaggatagggagagtcggtttgacatctgccgactgtcccgttgaagacgctattgtggttggtgtagaaatcgatatagagcctgtggaactggttttcgagcgtcttggcgctggcgtctttttcgctgccggaggcttcttgccagctgttgtcggagttgttgtcgaagccagttgactttgagaagccgtgactgtcatatctaagagcacataaatcaaacagtcagtcaacgtggcctgacaagaaaggctgaacgtcaaacgttgaacgaaaaataagttaccttttgatttatttggagaatccacgtccataggtgacgaaaaagatccaaacgattcgacagaagcagccactttgcctttggtcttggtacttgaggatggagcggctgaaggagaagcttgacctgataccgaggtagacatgttagattcttgcccaggatcaggagtgagcaccgggagaaacgttggtttgatgtcttcttctacagcagactcttcaagttgtgattgtggtatggaaggtatcatggaagatagcgctaaagacgaattgttggctgcgtccagaccggaagtagttttcgaagcttttgattttgctttcgattttgtttttgtcttgtccgtctgctctttctttaattttgttttcgtctttgtctttgtcttcgtcgaaggcggcattgtcggtggtaacggtggcggtgagcgaggcggaggggctacagctgtgatcggtacgggcggaggtagtggataagattgtgtcagcagtaaagaagctgacggaattgaaggtgatggagtcggcactggtataggtgacggcccagcaaggtatgggctctttgtcgcgcgtggccgatttgtctttgaggatggtttgagcaggctcgcttgagcaagcggttggtcatcttcagatgaagagccagatgaggatgagtgtgatgaagaagatagggatgaactggaagaggcggaagaagatgaaccggatgaatgacgggatgaagacattttcctcgacaaagacgcggcagcagaagaggcagaagaggaagaagaggaagaaccagatgagatagacgagtctgaagcagaggcggagccgtcgctgtcttcatggtgaaattccttggccgcacttgccctcttgccgccacttgctctcggagggacagcatgatgagacgctttcccccctccgacatgaaccccgacaggcgggcgaacactacttggcgctttcccgcctccgttgatcttccctccagacattttggcgccgaagccagttgctttgccttttcctccgcttgacttgccgcctcccgaagcgttcccaccggaaatctttccacctgaggcctttccttttcctttggatggttttgcggttgcaaaaacgccgagatcgagttcatcgagctctcctagcaaggcattatcggggttctcagcgatcgcctcgaggagagcgtacgtggccggagagagcggcccagagtcatccgcatatgtgaattcaggaagaccaagaggtgtcgatggaggtggtgaaggtgagggaggaagcacaaaggtgaatgtccggatggatatttgaatttttgttctatatgaccatcaagaatgaccaaaatgcatccagatcgataggacatatggacgcgttcagtcaagggccaacccagcgaatgattcggaaagagagaaggagaagcgtacctttcgttcaacacggctctttgacctttcgcaaagtactcgtcttcaacccatgctccattccgaccgaacacgtcgaggacgaagcagccggattcgtcgtcgtaactgatcctcgcgtgtaatctagacaccgatttgatagcccctagatcaacgtcgatcccttggttggcatcctgtccggtatactcgaagggggagggaaggagtggtgtcggtggaggctgcaaggaaggtgccgtgggaacgataagcgaggacgatgtcgacaacggtggacttggcggtagaggcggaggagcgggtggatttggcggctatcgttaggggtacgacgcgtgaggaaagcgagattcaccatcatggttagctgaaatgtcctgcaaggttcgagctgagcagttgtttttccgcgtctacgtggtattctgacgggaaacgacgcgtttgaaagaggacggagggaaagaaaaaaaagaagaaacgaaaagaaggaggaaagagacttgccaaagttcttctgccgatagaaacggacagagtttgaaggtaataagaaaacccagggaattcgagcttaaagtaagccgagatgggttctgtcgacggattggttgctcctgcgggaagtatggctggtgcagctggcgatgttgacggtggaggaggtggatgaggatgatgtgtctggacgtgtggatgggaagaagaaccgaacgcggagtgatgaagctccggttgggtcgatggatttagcattggtccggacgtcaataagagaaagtgttcggattgaaaaggatgctaagtagacgatcagaaacgcatgctagatgggaaatagaaacagagagacgaagaaacaagagagagaagaacaagacgtggatggatggcagtccgggtggtgttggacgaaaacgggagaagttgttggttgaggatgaagaagacgacttagataaattctttcgtagtcctctgaaaaaacaatagaaaagttctgtagtcatttgtagtgattcatagtgtgcgtgtctaataggtctcgcattacgaatcaacctagtcagtcgagatcgagtttgtagttcgatctgtagtagttctgtcgatgcctgttcctccttcttccataccatccatccagcatataccccatcctaatcatcatacatcaatatataccctcgtctttctctttctttccgtctttctttctctctccatgatagcatgggctcgtatatgaatataaacattgcttcaaacacatctcaagccgaggtcgacgccattgcctcaaacagcttgccatcggcaaccagtctcgacgcgtctctgggaacaccagagatcgccgtccatcttccagtcatccaggtaccagctgttcaagatgttcggactttaacatcaaacccatcaatctctgatgttaatcccttggtcgggtcgttgataccacaggttgcgttgggcagtgcctcaatgggatctgcccaaccaggaaaggtgatcccaaatcacaactcacaagacgacgcgttcatgatgaattctacttctgtcgtcaatccggccatcactcgacaaaacctatcctcagccttgagtggtactccttcgttccagaaagtttggtcaaccgtgtcttctctgcctcttccaactcagatagcacgtccgactcatccacccaggccgactcatccgccgaggccttcctctgtccttcctacacctcattcgcagccagcatcgttcaacagcaaagaaccgatcctgaacagtgcttctgctgtcgtcaccccttctgtattctcctctacgtcctctctatccattcaaactacaaatgctggttatccttcccttcaaactgaacaatcacaaacctcagatgaacgaccggctagagccgaggtgagaactccgaccggaccggacaaatcaaagatgaacttgccgagagtttcgttctcagttgtagaagacgattatgaaacttacagagttcctcaggatgcttcagccctgagaagcttcgggtgtgagtctggattttctcgtactattcagccgtcgcagacaatgctgacccatgtccgccatgcgggcgattgtttggagaaacttagtcagagatgggtctgaatggatgaaacctgagcattacatcagttacctcggttcgtacgggagccgttttctgtatttccatattagcattcgaagatcatgtctttcttactcctcgtctacttcggcaccataaacccagagcctatcgaagcagacctcaagaatcaagttgaatatgatgtcgatgtagcaggtccgtcgggtttcttactaaaccggatttactttggacaggatgaacgttgattgagctgataaatgtgcattaaaaaaaaataaaataaaaaaaacttaatcaagatattcactgggtcaatgcttataatgaggagagaagaaaggcgaacacagatccaatctctattcctctcttcgaggtggtcattgacaggcttgaaaaagagtggtgggatctcgtcagtcctttcatggtcgccttctctttcaaactctcttacacatgaggcttggatgctcacacaaactgaactctgcgcgctgtcttataatgcaaccgtatcgtcttcaaccagacaaagaaccttccgaatgctcgtaattcggctccagtagaagacgcgccttgtgcgatctgtgacgatatggagggcgaaaactcaaatgcaatcgttttttgtgatggctgtaatcttgccgttcatcaaggtttttattctttctccgtttttctctttcttcattaagcactccatatataacttgcgttgtcattgtcgctttagattgctatggggtaccttacattccggagggacaatggctctgtaggaagtgtacagtttcacccgaacatcctgttgtaagttctatcctccaaactcccttccaaatctcgatttttggtatatttgtcttacggctctggtttcgatcatcgaaaagtcttgcgtcctttgcccgacggagggtggcgcattcaaacagacatcagcgggacattgggcacatctgttatgtgcaatttgggttcccgaggctggagtcgggaacgccgtctggatggagcccatagacggtatcgaagggatctcaagacaaagatggaaattggtaagtttcttctcgaacagaccgtccgtgtcagctcatgtctgaacgctagacttacgcctttattccgtggtttgggtcgggccccctcatttggtataaacctcaaacaagaactgttcgctgtgcagactcaagacaggagcgtgcatccagtgtgagaacaagaattgcttcactgcgtttcacgtgacatgtgctagagaggctgggttcctcggcagcatgaagacgtacggcggtggtggagatgaccttggtgggagctattcaggaggctcaggagggatcctgagagcttggtgtgagaagcatgctcccgttcgtctctattcttacttgacgcttgcttctctgatgaattcagtctttcgttgacctcctatcgtctatttttttctctttcgatgttcaatgtgatttcttcaggccagacttcttgaatccaacgctcaaaaactcgctctatatcccaaggcgtcatccagcaagacgaaaaagtctgctcaggctcatgccaataaatataggccacctgctcctcgggtacctgcaaaagtccgggatgacgtcctaagctatgtgggtaaagtttcgttgagaaagaagaaagaagcagttgagtcgatcattaggtattggtgtttgaaaagggagtcaagaagaggggctccacttttgaagagattgcatatggaggttagttgatacttcgctcaaatgctttcagttatgaccagagagtagattcataactactaacctgttgtgtatgtgattggtaaacgtttccatatatagccgtggacagcggctgacttggctcgtcaagagaccgatattgagaaagcccagcgtcacgaggtactgtattttctgcttttctttcatcttctttaacccatcaacccattcaacttgtcataatccttcttcgattaacatggtgtatttacatacgacagtatctatctcgactccgaaacgaccttgaatctgctcgattcttatgcgagatggtccggaaaagggagaaagagaaaatcagacaatcagagattctcagggacgtggtttactcaatcctattttctcaggaggaaccgttgaaagtgtttttgaagaagctcaaaaggtaatattactcatgcgtttctctatcgctgttgactacagtgtatcttacgacgatcgtggtttacaatttgctataaccgaacttgtggtctcttatcatcctatcagtcaagacagatcccgtttttttgaagtactcgtgtcaaaagtggaagtacccgactactacgacatcatcaagacgccgatggcgtttgaggtgattgagcgaaagatcgaggatcatgcgtatcacaatttccaggagattaaggtgtgtacgcttacctcgaggactggcatcgactctttttactgatagttttctttctctaattcaaacacctaaggacgatgtgaatctcattttcgataacgccgtgctgtataatcctccagtctcgcccatccacaagctctccatccgactgcgaaagtacgcggaaaaacttctcgctgatcttcaatcggagctactttctattcttggaccttctgtcttttctgtccctgtagatccaacgatagtcggcaacctcgatgcacctactgaggttcttcaactttttgaatcgaaggattcagatgagtcaagatcattaagtcgattattccaattcaccgttgagcgaacaccttccccctcacctccgccgccacctcctctgtccgtttcacctgagcttgatgttgagcacgaaacggcaagggaacccaaaagaaagaaacaaaaagtggcgcctatcgctagacagagcagcagacggagtagagccagccatgtcgcgttccttcctatgcccgattcgtctaatatttctgctcctctacaccctaccgactcgacagaggctgctgctgatggtgacgacgacggtgagagagaagtagttaagccagctgtgacacctgtgtcaaagaaaggtcatcgaaagcaggcaacggtgatcggtcaaacgatggaccttccagtgatcaatccggacgatctcgacaacaagagcacgtttagtaactttgagactgggtggattttgccggctggttcgttaagaaaaagaacggcaactggttcgagaatgaatcagagctcaaccgtcgcagccgcagaaggacttgagaggaaagcttcctccacaaggctgaagagaggtcagacttcttcaaccaagcccttacatggtgagatgattctccctcttccatttctgctccttctctttcactcccatagacttctatttgtcggtctgttggtttgctgagttctatgcctcttaaatttcccaggtggtgctgaagttataaaggatctgccatcatccaatcctcgctcgattctgtctgctgtaaagccttctggatcctcgccctcacatacgccccccctatcttcacctctcaaagcccgatctgctgtccaaccttctccaatgtctatttcgacggcgatacctacgtcaacttccaacaagttagcggtcggtctgtttgagaataacgatagtgaactgagtgatctatcgtcagacaacgaatcttctccggcggatgatctcgatgggctcggagaatcagacgacgagatggatgtcgatcaagatgaggaccagggaatggggacgaatgaactttcctccaggagaaagaaaggagaggcgaaagttgatgatcagccaacaatgttaaccgagtctaaaacaccaaggtcatcaaatcgattcggttctcagaagcaggctgaatctaggtattcgccaacatctcatccgtctgggtcacctcctttgaatccaagtctagtgcaaagtcccgacgggatgatgacacatacattgatctccaaaccaagattgggattggagagtgcttcgaaaattggtaatcaattgtctactcgagaaatcgcttcgaactcggattcaaccgctagtggtcagagacggtcttctcgaggaggcttacaccaaacattgaccgttggtgatcgatcgatcgttgaaccagtctcccctgtccgtcgttactctcctcagacgtcgtcggattctgcctcgagaccgatgagatcaactcgacagaggccatccctcacatatccaaatccctcggcaccttctgctccggaaggagaccggcattcatctttgggaagaaatgtcgctgaaggagctgcaggagccatcagaccaaacgaagcgatgatttttcgggcgatgtccttcaggacaagaagagggtcatcgaatgccagtgggattgatgcgactggcgatcttgttagccagtccaagccagaaacagagggcgagtcgaaattccagtcagactcaaaaccaaagtcgaaatcagagcagaaccgaaaagcgcctcggaagtcaatcttccgatccaagaacaaaaccgcccgaataccttcccggcctgatcttcgtcctgatctcgaacacggagaacttgtctgggcccgagtacctgggtatcaactgtacccctctcatctgattatcttggaagagatcgaccctgacgatccggacgaagatcagatacctacctccgtagtcaacgctcgaccgaaaaacaatatcgcccatttggtcagattttatgatgcccaaatgagttttggatgggctcaaccgaatgatctttacaaattgggtgaagacaaagagttcgataagctgctggtaacagcaaggacggtagctgcttacaatcgagcgatggagaacattgaggttccactggagccggatgcggagtcgacagagagagaagcaaggagtgatggagagaatttcaagacagaggcggtgaagattgaagaaagaggaggtgttaaaatcccgttgggacattcagctgataaggaagatgaagatctggatatggaggttgatgaggaggaaaaggtcgacaagatcgtgggaggtcaagacactttgatttctggtgatgctcgagctcgaacgcgaccacagaaatcgcgtgttcagaaagaaccaagacggttggtttcaagtctctctcacacccttgtatgcttctctactactcttgtgtacggttctcttatcattgtttcttgttctaattaaccacttcacgaatcagactgacgaaagcgacaagtccagacgaacccgagagtgaaccgttatctcagcctttgacgcctctcgaccccgaatcaccctatccttccagcattggatctcccattgatccaaaagagacgacaaaaacatcacggtcaagatcagagtctagaagaaggtcttcaagacggttgaatgtatgaaaattatgatcgaaaaatgatttgatgtgactttttttttgtatcggttttcagccagattcgttcatctaattgaggtgttgaagggaaaaccttaaatgaagagggaagaatacaatttgttgaaaatccaaagaaaccaaagaaagacgaagaggaattcctagatcgtgggggaaagagaacggattggcatggaaaagaggaagtatcaagcaaaataggaagcgatgggtaagagctaaagagctcattggaaaggaggaagggaagtgaaagagggcaatctaagagatgtgtttctatcgatccaaaagtcaaacaaagaagagagtgaacaatagagatgattcaggaatgaataagaaagcagagcgagaaaaaaacattgaggcgtgttaacaaagagattgagaaaagtaaatggcaagtcaacgtgaaagaaaaacaaattagttgacgaaatagccggccctgtcactcgccctcctctctcgtccccttttgcctcctgttccccgttctctatctggacctcctctcgtcatgctacttgagcttggtctgacaggcaccgaagacatccgtgctgctgacgatgatggcggcgggaaagaggaacgagaaggagaaggagaccgggatggggaggaaagaaagggtgatcgctcgtcttgatcttcttcatattcttccataaactgttcgtctagttcgacctcttttgctcctgtgtttcgtatagttcacaaacaagaggaagacagaatagtcagaattagatgaacaccagatcaggaaaagtaaagatatagcgaaaccaaccttcaacgcccataaaggagaaactcaacagaacgagaacagctcccattatagcctgccaacctccagttgaggttcctctgaaatagtctccgataagagcaaatggaatagttagtgagaggccgattgtcactacaagcggcgtcgttttgagcatctaagggacccgccaagtttgaagattagctcagtctcgccaagatagaaaaaaggtagaaaagtgaggcgaaagaacgcacggcgatgacatagaggtaatcggatataagagtgatacacatgttcgctgccattgtcaaccaagcaatttcgccggaggggatctcaagggtttcccagcctgtgaaatggaggacaagtccgactggccagaggagaagggtattaaacaaaccgacaaaactgttgaccgaacgcgagtcgaatgaaagcaattcagcaaggaagattataaacatagaaaagaagaaacccacccaaagaaaagctgcatgtccaccctggcttcttctccaatcctaacttttagcaaaacaacatacattgcgtagaagaacgcagagagtaaggcgagcgcgtcgccgtacatccggtacgtatgtggtgatgatgagacgatccaagaagcattggaagtgaaattgtctggtgtagaggatgaaggagctgaagaaggaagagcggggcgagcggttgaggaaagagtatcggctagagagactagaaggacgcccatgaaactatccagatccattgaaagatgttaggtcagaaacttagacatcgagtgatgaaaggggattaagacggacgagatagtgaccgcgatcatctttgatagtgtaaaggtctccaccctgaaaagacgaccaattcctaaagtaaagaagcctgacatcgaagcgaggattgttctgtgagggaaaggcatagtagaaggttggaatctatcgcgctacatggaaacattctgaagagagagtagagagttggctcacgaagaaccgacagaagtccactccagtgacttgttgacactccagttggccgcgaactagatgaaccccggatagtatatcaaaagatagattggaatcagaggaaaaatagcgaacgcaaaaacaccgcacttctgtagcccacaagtaaggtactcacccaagctccacaaaacaaaactgcgagccctgccgtttctctaacacttaatctatcaattccttcccctccgttgacctctgcagagatacataccgaggagtgagccaaaggcggatgaagggtcgccatcggacttaaacttctccttccatcaagagacatgcttcttctagctgagagtgatctcgttctacttcttggggctgggtggtatattggtgaggatggaggggaaagaggagccataggaggaaagaaccggcgtttgaagaggaatggaagaaggtagagcgtgaaggccgaagtgttcatatatgtaacgagaaagggcttgttgaaccctccagctacatggaagaggaaagtaaaaaagattttgttgagtatctgatgtgcaccaaagaggtggaaaggcagagacatagacgttgaaccaaccaaagaggtcctacaaggtacagaagagatagcaagataggcagatcgataaatggcatattcaagtgagcatgaatatttattgaatggactggaagcactgaacattcatcagaagcagacaaacggcttacagaagtgatgaaacttgaaatgacccatactgtgagtgatcagatcgatatgaccgaggcccaaggacaacacagaagtggtagcagcaacagataaggaaggctttggagtcagtccctctgtgcgcataaagcgtctgatcggacactattccccaaacactctctgacgaactaccgagaaagaagagatacgaaagaaacgcgtacaagagacgacacagagtaataagacaatcccggtcatgtaatcccttgaagcctcatccttccatgcttccctaagcgtgatgaaccaggtcggtatgcgtgaccggtgcgaaggattatttgtcgtcgtcgtcatcgtcgttggttttggtagataagcagcctttctctttgacgctggattcaacagggagttcgactcagtaggagccatctggaaatgcggagagagaagaacaagtggtcttggactagactgatgtcttcaacttgtcgctcgtgtgagggagtgagaaggaagagaaggtgaggaaaggtgaggaaatacttgggtgctacgagacaggtcagtcacgtgatccggatgatccgcgatggcgacattggggcaaatcaggggtttgatctggggttaatttgggttcttatgggctctacttacataagcagactactcggtatcaagttctccttattcctccgtttctctttgcacctcattctcctcgacctgtgcccttcgacctcatccggtttctttcctctttggctctcgtgacattgatactccctctcggttggttttgaaacccaaaaaacctcaagctgccctacgcgcttttccttacttttcttctctcttcttgaacttgtgccagaggtatgtaccgcctttgctatgctggttttttctttcttttctacctctatactaactttcttggcgttcttcgaatcgctatttaatcattctcagccaccctgaatcatccatcatggctccaatcctacactcattcaaccagaacaaacgatctgttctctctaccctctttctcctcacctttctcggctcggtagcgaccgtggcgatcccttgtccgtcagcgtcccgatctggcgcccagcttgattcggaactctcacatggtctaggtgtcggatcaaactcaagtagggtacgatcgggatcaaaccgaacgggccaagaatcctgggaagagagagtggttgaggctaggaggctagccagactgaaacacgggtttctggaggaacgttaacgtcgacttccagatctagtaaatccttgcctgcaaattcttggggtctatatcttggcttttcaaacaggaaagactcgaaattatcttcgtttgcggaatgttctttctactgtcttcgccttcatttctctgtcttttgtttccatcagctcttcatcagctctcatcaacacgcatctcatttcactcaaggtatcgactttcggttcatctcataagaatctctcgacttcctatcacatcacatttaaaaagggatctttgtcggcccatccttacatctcgtgcatcatcctccttgttcataatacacactttgattctctttctctccgtctttcttacctcacttcttttgttttctttttttctcttcattttcttgcggctttggttatgttcttttcttgttgttagagtatagagaaagaagattcagattgttcttccatatataaatattcgcaatttatcacctacatgcagcgctgtttgaatctattcttcgaagaggatagaaaggggtattttgtaagaaaaaaaaagaagaggaaaggttcttaagaagacgagataatcagattatccaagacctttctccgttccttccttattttccgccttgggattttactgtcgactcgattggctaaaatcaagacacgccagatatctgttctacgaatttcctcattcgttggatgtttgcctcagacagacgtcatcccctgtataccctccattttctcacataagtctcatattcacgttatcatcagcttgagaaacagacaagagagatcacatatgtataagacgtttcttctgttgagaagaaaaacagaatcgactaactaactaactgactgactcgctagctagctacctggaatttgcgaaactataaggtaaaaggaaaacgggattcagagcaaaaagttccaaaacccaccgtccccgtctccttccctattcctcctctctctatcctctctctccaggatctctctctgcgcctcctcttcttcagcccagtcaacccggtcacctctgtccaggaccctgtggtagaacatctttgcttgtgcgcttagtcctgccgggagagttctccttgtttgtccttgaccttgaccatgtgcatcttgtggcgccggcgccgactctgccaaagatggagaaggagaaagactacctacccgttctcgaatcagattctcccttcgccgaagagtagatcgtctgaaggcgtcgagaggtggtaaagcggatgtgacgaataagaccggaaataacacaactttcaaccataaagggaggcatccgctgctcgtcagcatctctgttgatgttgtttctgacggcgtcgacgatgaggaaaatctcagcaaggcagactcgcgttccagtccaatgagcgccactcgatgcaacggtgtcggcgggactggcaacacaaatatcgtatgcgattcaccatccgccgatccagatctcgtctccggtgccgatcctctaccggctcccccggctcccccagcgactccgcctcttgtttcatccccaccaacctgagcacgtctgatctccaaaaagccttcgtacatccaccaacctaacagcccaacagcccaaacgatactttccattgtatcttcctccctcgtaaacacataccacaccaatgcgtactttacaaagttcattcccagtaagatcatcgccttgatcatccgagtccgtacttcagcagagacacccggggctaccggagcagctgctggaatagttggtgtgggctcaatatgtgaggagaacgaaagagggaaggaggggtatagatgggtggccaacaggttggtaagaatgtcttgacggcttgagtaaagtagatacgaatgaagcgccgttctttgagcggtcgataaggtggataatggtggaaccgagagttgatagggcatatcgctttgaggaacaaggatgaagttacctaaattagctcacgcagtctctctttccatcaatagacccttggtgaagcttactcgatgataatcggccattcaccaccttccggacctatccactcctctagacgacctcggtgttcacttccggctccttctaaaccactctcaattcctagattggttacgagcgcatgcaccaccagtctggccacatcccacggaacgaccggtggtggagacagatcctcccatttgttcatcgactgtgttggcacattgataaactgaaagagggccgactgagattcaaacgtatagaaagcaagagcgtccgttatagatcggtagaacgatgggtcgatgggtgctgtcgatgtatatggatatgaatcggcagcgaagggaggcaaaccagtagatagctcgggtgttgctgccagttcagagctactaggtccagagagcgctatagacacatcatcattccccatattagctgaatgactgactcccacagacgaagctcctgtcctgtttggggtcgtcttcgatgccctcccatcaggtctcaaaaccaaatgaattgtatgagtctccccttcggtatcctcctctccagaaccaatcactccacccagtacgtcctggacagtttccgtgtccgccaagagtcgaccagctcggacaagtcgaatatcatccagagagggtgagaggggatgacggagtgcgatctgggaacggatgtggttgatcgagtctgtgggtgatgctcttatttgaagttgatttgccgtcgctgatggttcgaggaggtgaaggacaaccatgaattcttctggaacaggtcacagtttatggatgcttgtgagtcgattatttgtaggacgagggtgtatgaatatcaaagatggaggttctttcctgttggctgtctggggaaggtgacgatggtgagctggcgggctgcgcagcaaatgatttagcacgtgacccacacgcttagcgcaaacagagcgatacattcagactcgaaggcacagcgacaaaagggtataaaattatatctcatgtagtgtgaaattaattgtagaggaagaggtgcaatgcaatgtgtgatatgaagcagagtggaaggatgtgtttgtagtcagaatataaaacggaaaaactatgggcactggtcgtccgcgcccccataggagtgacagagaactgagaagcaaataaaagcccaatgtagagaataggccaaagaaacaagagaagcaaaggataaacggatatgcaaaacaaagacacactcagacatcgtcagaaccaagtgttacctctcccctaagcttcttgaacatgacgtgatctcgctctccctcctcctcttctttctccttctcgccatactcgattctatcaccctcgtcttcgtcctcttcctcctcttcatcaggaccaccgtcacccataatcaaccggcccaactgcgccgcttctggaccgtatccaaaatcaagcgctaactcatcaatctccatctcctcatccttcagatcatatacatcctccttctcttcgttctgcaacgattcaacaaacgcgacgagtttcgcagatgcctttgtcgcccgggcctttctcgatattacccctgcccggagcttcctcttgcccaacacagattccaccccagctgccagttttctcgcttctcgttcctgatcggttcgtcttctcgacgctcgcttgacttccagttcatccacaccatcgaatttgccctcttcatcccacaaccgttttatgaactcgacctcttcttcatctctcacatatccttcaagttcgccatctaagaagagctcatcatcgacaatgtcctcgactccacccggacgtagagcggccagcactcctattgtactcttcggtgctacatgagcaggaagcggtcttccattctgaccgtatccgttcaagatatatcgacctagctcggtcgagtcatcttgggcgtccagtacggaacgaattatatccggattaagatgactgtaaggattctttctacggtagtccgaaggtcggtatcgcatgtaagcctttggtctcatacctgtacttgctttgcgagtagcataagttgatgatgactcggctacacgaacagaatttgtgccaactaccgaaggaatagggcttgtcaacgagttgatggatgcaggtgcaagagctcttgacattctcgatgatgagcaagaggacaagtaggagttccgtttggaacgaacaagttcagtattggatgaacctagagagggggtggccgcaggagaggttttaagcttggatgagaatggagatgcgatgtctatcaacgaaggcagtttcgtagaggagcaaggtgacagtcttatgtttggcgtacaatcctgtggaggtgatggccggaatgcagaggaagaacgagaggtagatgaagcttggacggaaggaagcaaggaaaacatgtccacatagatctctgttccctcgtgctcaccagattggtgatctgaacatgagtactccgagatggattccggtcgacttgaaacgggatgttcgttttcggaggattgaggccagataggtggaaacgcaataggggtatcttctcgggcggattgttcagtagagatgatggtaggggcaggggtgaggatggtggcatgagtggaacagttatcaggactagcagtagtagttgtcaacataggaggtgatgttcgttcgtccaaagatgcaaggcatgtcgagccaatagatggcgcttcagaaggtgatactagcgggggaggcgagaaaatcttgtcggcgagattatcaacaagctgagagtcaactaaatcgagttcgttttcagaggcgctcggaactgaagttgttcggagacacctcaaagggcctgttcgtccaaattcagaagttttttgaatatagagatctatagattggaccgggttgtttggaattccccgagcctctgttggtttaatgattacaccttgacctacatccgatcttggatttggtttaagcccatccttcattggatcttctttttcaacactctcgtatgcattatccttcttctcctgttctccatcactactatcagaagacgaatcgctgtctgagagatcgtcccacgtcgagatctcttcgacctctgacccaatagccgcctcctttttccatcgttccaggtcttgattggatatgctctggtcgtggttggtcttattcaacacctcatccgtcatctggctcgggctagcctgttcaaccccgagttccaatctacgtgcccaaaccaactctttgttctccaacaccaacttcacgagcgacgcaatctcttttctcttcgaaactacccgtcgtgcaaccgtgcttttcacaaccacctgtctggaggagaggtcatacccagggatatactctgcccaatccaagaaggctttacccgcttctcgataacgctccattatggtgaacgttgccacagcttcgagtttaccgagctcgttggcaacatctgtcgctttaggcatcggagcctcacatgttccttcgatagcaaccataatcacagcgatagataccgccatagctgctcgaccggcgtagagatggattcggtcgaaccaatgaaagagtgctcgggcgagttcgaacactaaggaccagtcgacctttttaaggtatccaacagttgttcggtcgacttcgttcttgttcactcggcttaaccaggtggaatgagtgagcgctttggacggatcagaagatatgagcgagaggtgtgccaccaggcgtggtagaaaggatgccggtgttatctcgagtaggttaacggcttgctctcgctggagtttcataaacactctattcagcttaagcagcttgaggtcggccgcatactgaagagatttatacataacgtaagcgaacgaataacagacatatcagcaagacaatctcggtccagagttacataaaagagttgaaaaacgcacagctatgtccttcaacgtttctgttctctttcgttcacgaagagccatagcgaaggcagcgcatgctacgtaggtcgtcaaattcttgatcctgtacactggcttgatggcatccgaggcaaggtagatgaactgagcacgctcgaccacgttattggctctgaattgtcgacctagagactcgatcaagtgtttcgatgcggtctattgaaaagataatgagaaaagttcagctcttcagcatagtctacgaaagcaatcagcaagatagggtgcttgtcatctgttgaacatagaaaagacaaattactcacgtttctttctaatctgttctgttttgctgtttctccttgagccgtgaacctgctgacgctgctcaccgaacccaactgaactcggctggtaccttcgaaatatgtgccttcaccctcgcctagttcacgatgaacgagcgttccagctgaactgccaacgattgttccacaggactcgcatacagtttctccgtacgtatcagacagggtgaaagacgatccggaacagtttggacattttttgtcttttatacgggactgcatcgtgacctaaggagtcgaagtggaaccgaccagggggaaaggaaaaggcgggtggatattgaaacgaggacgaagacgagcgacgctgaaggatcaaagataggtccgtcgtcgctctcgatattcagcacgactgatactcgttttttcttatatttctagtttgtctctctttggagtacaaagagcagggtggagggtggagggaagctctctttacacgaacaacctaggagaagggtggtatcaagtttcagaaggtgagctctaaacgtacttgttaaaaagcaggcaagacatctgaaagtgccttccgaggctggctattggattgagagaggagaagagagacgagagagcaagagcagaccctcaggcgatgtagatagatgatgagcagaaagaaagagttgttggctgggagaaatgaaaccgcctgaattcttcgaaattagtattttgccttctctctttcttcacccacccacaacctcttttcgttcttccctctttcttttcccttttctcgctcttttgtatctgaacaatgtctgtgagttcaaaaaacgttctgattcttttcttttgaatactaccaacatcatttaacttgattaatccgatggttggtgaaacctttgatgcagggaattaaacctggagacgacaagatcgtacgtcctatctttatagcttttctttctagcgatagaccttcatggtgcttatttcttttatgattcgtctaatccctccctcaacacatggagtaggtgttcgagtcctcagagaccgtcaaagtcgtacgtactactcttttggatcgatcgccagctagagtttatctggtccaacttggacgaagataaactcgttggaagatgaagtggagaaatgatccgctatatgtgagaaagacgggtagcttacttcttcaatgagtgtgctgcacgtctttctcgatctaggcccctacttgtgagtctccatcccctgtagtcttgttacgaagacaccgttcactgacggatccacctgctcttgttctcgtcctgaacggaaacgcgtacaactcgatcaatctgctgcttttgccttcatttctctttcaatctgcctttagtcgacgctctcaagctcaaggaggaccttctcaggggtatctacgcgtacagtgagtgttttctgttcttaatctctcaaacgcttcacgacctcgaactcatcaaccttcatgtcgtcgccctcactcgaatataatgaaatagactttgaaaagccttctgccattcagcagcgagccattctgcccatcatctctggccgagatgtgattgcgcaggctcagtctggaacgggtaagactgcaacattctctatttcgatgcttcaatctatcgatacctctattcgagacacccaggcgcttgtcctttctcccaccagagagctggctacccaaatccagtcggttgttctcgctctgggagattacatgaacgtccagtgccatgcctgtattggaggtacctccattggagaggacattaaaaagcttgatcatggacaacacatcgtttcgggaactcctggacgagtgttcgatatgatccgacgaaggaacttgaggaccagaaatgtcaaggtctgctcgaagtttttctctcgttttgcaatatcatgtttctgtttgtcttttcaatactaacgaaccgcttttatagatgctcattcttgatgaggccgacgagttactcaaccaaggattcaaggatcagatctacgatatttaccgatatttgcctcctgccacacaggtggtcgttttgtccgctactctcccttatgatgtgctcgagatgacgaccaagttcatgaccgatcccatccgaatccttgtcaagcgtgatgagttgacactcgagggaatcaagcagttctttgtcgctgtcgagaaggaagactggaagtttgacactctctgcgatctttacgatacgtaagtcgctgtttacctacttcttttctgtcgcttttctttgtttagacatctgatctgatgagcatttttcatcacatgattcatctatatggctttgtataatgatcttacaggctcacgattacccaggccgtgatcttctgtaacaccaagcgcaaagtcgactggttgaccgagaagatgcgagaggccaacttcactgtatcgtctatgcacggagacgtaggtccacttttttttccattttgttattggctatatccagaactggctagactggactggacgttggttgtctgattcggtagtgcttttaatgtttctttttattagatgccccaaaaggagcgagactctatcatgggtgaattccgaggaggatcttcgttcgtctatctttcatagtcttattctcgctctaaacttgtcatctcggaatattgaagggttaccgttcttaatcgtctacctctagccgagtgctcatcaccaccgatgtttgggcacgaggaatcgatgtccagcaagtctcgttagtcattaactacgatctgcccatcaaccgagaaaactacctgcacagaatcggtcgatccggtcggttcggtcgaaagggtgtggccattaacgtttgttttggtttcttccctcattttcaatgttaacgaaagcgaatagaattctaacaaggatttattttatctttttgataaactcgttggtgtcctcagttcgtttctgtggaggacgttcgaattcttcgagatattggtttgttttcgatttcttatgagtctttgatggcttcttcctctgtatcaaacaactaacaagcttacaactctggaaacatgcatttcaacagaacaatactactctgtgcgtcctgtcttgagcgtcaagatatttaagagatatgtgtctgtcttgactgacgttgaattgcactttaccacagactcaaattgatgagatgcctcttaaccttgccgagatgtgagttcttgctgttcttcttccttgcttctctgttccgacgaacgaacaaacgaacgaacggtcggtggctgaattatcggctccttccttttctttcacctagtgtttgaggaaaataaaagaagtggctcttgtgggtgatatgtcgagggattgtggatgatttttctttatgtgattaatgtcgttatactttgctccgtggtccatctggcctattctatccttctggcattgtcaatattggctaaactgtaggccagatcaataagggattttgtactgctttcgtatgaatgtgcatcacgtgaatgatatccaaataaacccagctgacgactacatacaataaagacattcattacttctactcttctcttgtttgttattcatcacgttttgcttttgtatatctgtcttctgtctttcgctgtttctctctctctctttctggcgaaggcctgatattgtagtatattggaacatgtgagtgattcacttgaattttgtaggatacttttgccgcgttgcctgaatggattgattagcgttagggcttcctcctgtttgttgggattcgctttgacctggctgttctgggattcattcgtctcatttgtacttactgacatgctctttttgtactctctgcaacctgttctgcgtgttcgttccgacttttgattgcctaattgttttctgattacagattgaagaatatttcgaagcattcccatcctctacaacttctcgtgtaattcagattgccaactgtttcctcactctgttctatttttaaggaaggctaccctacatcatgtcctctgcttactttgaaacgcccgatgtgatcgaacccaatggtgcggacgacgaatggcaacccccgccattcaactttagcaaattctctttgtcggcggatgatcctgtttcagaggaggaccctttccaatcattcatcaccggtcaacttcaaccggtccgatctccgacctcaaagtttacctctccgtttttgcccacgtttaactctgaagggtcgatcggagatcattcaatctcaaccgggcgggttttctcacctgtccagttttcttctggaggaagcgattcggttgacagccaagatatctcaccgcgcacatcggtgtggttcccggattctccgaggaacagaggcaccagggaggaggataaattcgagcctgaagcgtcattgtttacaaaacaggaccaagaagaagaagaaaatcaggagatgaaggaggaccaagatcaggacgttgggtccctctcgttcgcatcgtccgagcttgatggcatgcccgatcaagatggctcttttcgttcttcgggctcaagttcgatgtcgtggtcctcttctctttatcaacaacaacaacaacaacaacaacaacaaaaacagcggtacccaacctcactctctaaagcgtcacctcaagggagagcttctttccctcagcttccgtcccaaattcacttgcaacttcgactagaggaagccagtcggtcttcccttacttttccttcttcttctacctcccctactatccacacagatattccaggacaaccttcccctctgcctcgctcggactctcctcctccgttgtgtctcagtattgatcaggctcggttaaggagtcactcgcttccaccaaatcattcgttttccgagtcttcctcctcgatcctaacccctgctccgtcctttgtggtcaacacattcacaaacagcacggatcatcctcgatcgatccaacgaagaccatcagaaatatcagctagctcgccggctctttctgccctcgccaattctcctggaacatcatctccactttcaaagaaccttaattcgaaactagcagtacccacgtcgaatagtggaaatctgacccctcttcgatcccctatccgtacgtttttttttgttgatgttgtctttcatcataatcaggactcgtgttcctggactaacattgccgtgttcgttctgttgacttgaactgactcttacgtggcctctgacgaaccttcagttcgcccgaccaacttctggaggcatacctctcgttcggctttacattctccgctctcatcgccttcctcacttgttcttcgtcgcagttcattgatcaatactggtgcagctagtcctgacgaatgttccgatcaagaagagactcttcggcaatgcgaaggcaaggtttggggcgagcgagtcaaggtggacaaactgctcctgtgagagactctctgtcggatgtgcaggaatcaagggacaggggaaagtcgaaaggacgagaggacaggtcggcgttcgagttggagggaaagcgtttgaagggagtaaattatcgtccatcctccttatcaccatccactgtatatctaccactaccgccacaatcacaagtggctcatcaagaagaatattttagattgaactgttttcgatcacgctccgcccgttcatatttctcaggggggacgtttggtcatgtctctctcttgtttatgcttgctgcaacgttagtgcatggaacgccacaagcacttgttgatacctccccggctcctgttccaggagctggtctcccactttcttcccccactcttactcctgtaccattggctggaccggtcatgtcgacgattgattggtggccttatcatagcacctcaaccacagatgatcctgctaccctcttgcctacaacgactcccacgagtgatacaacaccgcccgagacgatgcctagttcagtcatagaaatactgtcaactgagctgaacagtatgatggtaggatcttcttcccaacaaatcgcctcatcaaagactggggaaagttcagaaaccccttcccaaacaggaaagggagaggaaaagggagaggacaaaggaagctcgtttcatttatattatcttaccccggtttttgttgcgatcggtacgtctttgttctccttcatcactcttgtcaatggtcagcattttgaaccgtttgttaatcggttcctcttttcttattcattggtttaatcttgacaaagcataggtttggtcaagatttacactctctacagatgctgtatccgttcccgccgacctggattggacgaagaacagggtgaggacgaatacccaggtctcagagaaagctaccatcccgttcaccccggccctttcggctctcgatatgaatctactcgacctgcatccgagctttatctttctaaatcagaaaaagcactcgatgagtgggatgatgaatcagactatgacggtgtggagatgcggtacgagtatggaggtggaatcgtcggtatgcctgttggaacgccctctgtttatgaagatctcggagtcctaaacgggcctttgagcacgcctggaagccgatactcgacctggcaaagcaaggtcacggtagccgacggaggaggatacgttctccgaccttcaaaggaaaagaagaagaagaagacgtatggcctgttaggaaatttcaagggagagcctgttgaaggaggccgtgagtctttcatgagagaggtatctctttcggctgctagcgcgctcaacggaatcaagcgtgggactcttggtcggagggtttcttcgggacatgctagacttgcttctgacgaatcattcggaactacccaacctcataaagaccaaccggacatagccaccttgccttcttctgatgtgtcgaattctccgaacaaaactcgctttggaccccgtgcccaaactagacttcccaagacggtatccggtcctatcgaggcatctccttccaacgctgcatcaattctttcccctccacttcaacctcatcttttcttcaccggtctacaacccactgcgcctcttgcgtttatgcagagacctgtttctcaacagaaaattccaccaagagactctttcaattcgactcatacgtcctttaccgccttaccacagaagactctaaggtctgtgcatcgagcaggtggttcttcgtctactcggtcaagcccccgtcagcaagataaccctccgttgagcccgatgaacctggctgggtctatcacaccggtggactcgactcccaaagagtctagacggtctctcctaatacataaactcgacaggtcaaaaacagatcgatcttcgtataccacccgaaccagatcctccgcttattcggatgaagaagagaacgatgatgagggggaggaggagggagaaccaatgcctacgaggtcaaggattaggagacaagtccacgcgatcttatccgctggaagacatcctcgagaagaaaaggatttcgatcggtccaaatctaagtcaatctctagctcggagccgaggacaaagatcgggaagaatgagaatggcaggagaggtgagagagaagaggaagaaacggacgcggatgcagaagtagaggatgaagatttagaaaagatcacctttatacctgatggaagcaaaccgagccgtcaggtaaggggctatcagcttagagatgaggttattccgcttgagtagtcatagaaaggactccgccattctcttcctctcttccttgtcattcaactcggaatgtctattgttcatccgttctcatttctcttttgttgctttgtgtctgctctcgcgttttgttgcttgttacagcgtacttttcatattcaaccatgttccctattctgtctcgtcttgtttcttctctttttacatcactttgccttctgctctcaaaaaagttttcttcgtgaactctctatcggtatagccattcactcgtccgtcattcacactcttttctctcttctttttttatcattatttagaacagattgctcttattttccttgctcttgctacctgtgttccctttcctttttgacctgattcagtgtgtttgtataccatttatgttaggaccgaagccgttttatcaacctgaattcaagttgtctttctctacttgaagttgctttgagcggtgacaagatgaatattagagaaatcgcatgaaatatatctttggccactgtttcctttatcttcaaacgagctgaccctgtccgggcggcagaggtctagccggcgcatcaactaccatcggcaacttttccgccagatctacatccccgatcgggaaaggcaagctctcgacatccttgacgtatgcatcgttacctttctgcaagttcttctttgccgctcggataactttctttagagcgtccttaatcatcacgaaactctcatccggaccagggacgtttcctttaacgaagattaggttgagagagagatcgattcgctggacgagcaggttgtgtacggtcgtcatttcgaatcccagtcgaccggctttcttcttaccggggaaggatcgaccaggcgtctagagaaatgtggatacgggaagcaggtaagtgaccaagaggtgagagccatgtaagcaatgatagaacttgaagtttgaggaacgtgtatcaagaaatagagagcgaaaaaaaaactcacttggttctgaccgacggatccggcagatcggtgagctttcgagttaccatgggacatcgttcctccagagaatccccatcgtttcatcgtaccagccgttccctttccagtactacagtgagttgatagaagatagaagaagtcgcgcagttcgagatagagaacaacggataggttgtaagccaagcggaactatcaagtgagtgaatgagtgagagaaaaaaaaagaaagaaaaaagacaaaccttctggatcggacgtcaacgtgctgaccgggaacaaagtggcaggcactgaaggtagaacctgttcgagaaatagtagactcaaataagagagtgttcgtcgcgttcacctcaaaagtcctgttgccttcttccactctttcctagaaccggctctcctctcgtaacttttagtcaaactctaagaaagaacgcaccgacagccgggacagcatcttccgtcaccttgaactctctaataatcgactttggttcaactccatgttttttgtagtgtccgagcatttggaccgactccttgtattccttgtattttcgggtaggctttaatccaagctcctgtcgcttgatcggatcgactatgtactttctcaagttcttggctccaatctgaacagtgtgataggccggtttaccgcgtctagagggaggtggagggttaacagagacaacctggcagtcttgtaccttttgggtgggaaaggagagattgatggacgatttcgaggataggatgtttgataggcagggacaaaagaagagaatcaaggatgattttcatacaagtcaggatactgcataaaccttcacaagcctagctcgttcctttctccaacactctacaaaaaagatgagagcagagaaatggagaaagaatggagttgatgccttgaagaagagaaacatacctggaggatcgtgacggggactcttacaccattctgatcccaaacacaagtcattcccttcttgatagcaatcagtcccgacctgtgtgacaatggagaccattcgggtacctcggttctttccactgccgggttgtacaccggtgtgaccggcttactagaaggacctttaatgaatggttgtctataggatcgagtgaatggaagaagccgtttgggagacgaagccgaggcagaggaaaagaagcgagaggttgaaggaaagaggaaagacatgatggaggatttaaggatgttggccgagatagcaagctcaggtcttcccgtactagccttgagagatgtacgaaggtctctgtatcgagaatggaatgacacgaacggagagatgatgggcggggatggaccaaaaaacggattggaggagaggaggaacaaaaaacggtgttagtacatatgtaagaattacctaagtgctcaactcatgctcttccatcctctacgcgccatttgcatacaccacgacgacgacaacaacgacgacaacgattataattctttcaatgattaaaaatcataatattatatatactattagaacaaagatcaggccgccgataggaatccaacttcccatgatcggctgagcctgatcaacactcatcactctccgtagaaattcttcttgcatcatattaatccgcacaagctgagctcgtgcgcctgataccagagaagaaaaaaaaagaaaaaaaacgacataacaagagcgcataagtcgaagagtattgagcttagcacagaacacaaagaaagagagggcgaacgttgatcttggctagtcatcggcccgactctcatatccactgcccagccgttaacagctctggcgtctctagccctgagccattgctcctttgcttgagcgcctgcagcttggacagcaatctcttcatctggcacaatatacagatcgcatgcgttacactcggtacacggctgaccagctgtgttgaacgaaagtaagagacatagcagaatcaaatttgttatgttaatacatatacaataccttcgaatgatcaaagcactcacggatgtgccgaaagctagacagccatgagataacgtgcaaagggaaacaaacaacagaagaatcagcatcaagctgtgtgtgcgtgggacagagctcgagaacagggttcacttactgctggcaaaaatgttgatagccctcttgactgatgtccgctcgacagatgtaacacatcttgtatccgtctcgaggacatgtcatctgttcaacaccacagctcggtcagaccaataaatctttccatctttaacgaacctatttcaaccgagagagcacccactttgttgcaagagtcgagtttggtgaaacccaattcgcatcttgggcatgtctaccggcaacatccaaacacaaagacgggtgagagagaacggatgaggtttagaacaagacttctagttcaaacaaagaagcttaagcttctgtactcacgcgaatagcagctctagacatcgcagtttccatcgccaacctcaactcctccctctccttctcttccttgccttgttcccccttttctccctcgtcggtctttttcttcgagtcttcatcttcagtctttctcacagtcccttcgaaacattcacatggtgcttcgtcctcccagacctccttaccacacctcacgcaactatctcgtccacatactatggattcaccttcatttccatcgatccgtctacacctgaacaccgtgcccgcttctttctctctagcaacatctagcctcctctccaaccatattctcatccaagcgaaactttcaaccggtcttgatattcctagcggtctccctggcccagctgagagcgttgacggtggaggtgggtcaaccgagaaagcaaagatttggttgaaggaagtagaaaacagaacgacgaggatgtaagtggcaatcatgttcaataggaccacaaggctcgagatcgaccaagatgctgggtcggtcgaaggaaaatccaccgaactcgctgtccgaggtttgagtaccatgtatttacagaatggacaagcatgaacactctcggctctggggcttctgttagagagcgcagaagcgtagagggcgagccatcgatggaaagcggcctctatagtggattgatacgatttcatattcgaatcagaaagatgttgtcgtagagtagacagaggaagggaagcagcacatggtttgttgggtgttgagcaagatggacaaggtatcagtgtgtctgaaggataaggtgatgattcgtctgaagattcgatcgtttctgaacgaaagcgagggggagggaaggcaagagtcggtagaagcgtgacaagatgagtgtttatacaggaccttctcgttcatacgacacatagggagaacataagagaacgatgagtctcgggaatgcactgaagaaataaggaatgagtgggcagaggaagagaaataggggtacacaccgacacagtaggtgaccatctgaacaagcgccaatgtcctcccaagcctcctctccgaaacaacactgacactccatcaactgtccttcggattggtaaacgccataattccaagctcgagcgagtatgtcgttgattgcttcttctttctttctctcctccctctcggttcccagagccctgatctcatcttctaactctctacattctgtctcccctctcagagcgttgactccatcacctccgccacctccacctgttcctatgcttcctcccccaaagctgtttctcaaggacaaagtcaacgaggaccatagtctaccggcgaaccctctctgacggaccaaccgctcacacgccctctttgttctctcgtatccccagttttcctctcccagtagacctctgagactaccctgtgagatcgctggaaattctgctgtgagccgtcgaagaacgttttctttgtatgctttcgtccggaatcgttccagaggatgcacaccctcgtgcgcccgtcggggatgagggagaagactaggagctggtccgtatatcttgggagggatcggacggagtagagtttgagctgatagatagagaggagcaggagcgtggttgggatggttgaggagtccacgaagatagctcgttgggtgagaaggatatatgtttgatagcgcttctctgtggtcaccgatcgatatatgcatcagttcctttttctttgtcagactcgatccgtacgtgatcaagaagaagttccccagagcagggataaaaggtgaggattgacgaacagatcgagattcaactgtttgacagctaagctgtccatctcatctccctctatgcttcttaaccttgtcttgtctttggtcttgccttttcctttccatctcctcttttctgcaaggtctattcctcctactactcctgctgctgctgctgctgctgtccgtctatctgcactgatattttcatgaactgcctcctctgctcttctcgtgggaaagacacctcctaggccatcgagtatcttctcgctgatgctctcaacagccccatctaccgtacgtgtccgatgtccagagatcggtaaagcaggatcgaaatagtagctgacggcccaagcaagaaactttggtgacgcggttgggaagagtgattgaagatgagacaccgctagtgatgggaggacctgaggtgtatgtgcggtcgatgacatgaattgactgacgtgagtatctgtgagtgcgaatgaacaaggaaggaaagcgtgtgtgtgtgtgtgtgtttcctctctgcgaagcaagagttgctcaacgcaaagggagcgaaccggttaaagttgttgagtttcacctacgcgccgcggcgtcatcattgttagcgatataaacagtcgacttcctgttagggttagctctctatcaaccaatcaatccgccaacaaacagtgctaagatacattggatcaagtagccgctacagtatgcaagaagagcacaaaaagagaacgagacggaatgaagggaagagagataataaatcacaaaagaacgaagaagcgataaaaacaaatcgaacagacatccgaatgagtagaaaggcctatatatcacgaaacaatcagattcgaaaataagagcaaagtaagttgggtatagaaattattgttgtctccttttttacttgaggttgttctggtcctccttgaatccagcaggagaggtcttgacctggtcagcatccttctggatctgagcctcggcctgttgcggaagcatagaatggagcgaaggatagaatatcgtcagtctgatgtactctgtcacgaaagcagaagcggtgggtcaacgtacggtgtcagccttcttctgagcctgctcctcctcttcctcctcgtcaacctcgtcctccttcttggacaacttgaggtaaccctcatcgcttccagagatgttcacagggagcttggcaatctgggccctggtcatcgtcaaaccacccttgttcatgccggaggtaggagtggtcgcgtggttctgaagccggggggaggtagggtcccaggtgttagtggcagcgactatacgtccatagagaaacattgtatgtgtcagttaggctcgacggagtcatcagagtgacgcgggttagtctcgggaaaacagagaagacgacgaacgggtaaggatcaaggaggatccgaccaccaaggtcaagtagaacctgtaggtggcgaaccatctgggagctgaagttataagacagtacgaaaagctttagtcaaacggaaggaatggcttcaagataggagaaacgcaaacgtactccatccctgtccagcggtccatcgatcgacgatccacgatacgaggaaacctccccactgggcagtcaactgggaacatcgggaagaattgtcaggaaagatgatctcggtcctaagagagtatgattgagaagtgaagatgaggcgagtaggcaaaaaactcacagcgacggccgggttggcgatgtagagggtaggccatgcgtaagcaataggcaacacaccgacgaagagtcgcttgtggccttgagcacctccatacttggcgaactccataccccagtgaagggcgccgaggaaggaaaggatgacggctccgtaggtgatttggaattcctggagctgattgagaagctgaaggtttgattcggcacctgatataacaagaaatggaaggtaaggcacaatagatctggcgagctcttaatgatacccctgaagagaaatggtccgtacctccagcgatagcaagagtagagtttcgggaaacccatccggtgagaccggcggtgacggcgtacggaatggtaccagctagaccccaaatcatgatgggcctagggacggcggcgaccatgtcggtcgtgattgttttctgtatgttgaaacgagcagcagatgtgtctgttagttgggctgaagatgaaacgactgactcgagtaaaagaaaaagaaaaagagagagaaagggaggttggactgacgtagtcatccttcaaagtaccctcagtgtttccaggtccggaacctcggatgaccttggcggctgtattccagaagaaaggccgagggagaggaaagataaagagcgtacgagatgttagtaagagaggacgaggaagacgagatgaaaaacgccacgggtctgattggacatcttgacgtcattgccggtcaagaaaagacgctatcgaacagaaagaacgacagaaaccaagatcactcaccctctccagcagcactgccgatttcttccctgatgtttgtagcagcctcgtcgagtgtctttgagcctggctgagcggagactgggttagcgacgaacctcttctggaacgacggcttgacctgctgaagagcgatggactgtctgagaagaggaagttgagcctggataggtgatctgatagctcgggaagagagaatggtggagcgaagagtcctggaaagcatgcttgtgataggagtaagggtagtagtggtagataatcaaacagagatgggatagaatgaatgtatgaaaggagaaagagaaggagagggaagaaaaaaaaaacgccaaaagatgggccgtccttgtcctttgtaggattgaagagttccttgcccgtctgattctgatcaagcgaatccgactggaaaggatccgatcgaacaggtaatagagaaaaagagagagagagagcacgcaaaacgtcatcggcaccaatgatgtcaatgattgccccgggtttttggtcacgatgatgctgcgcgatggccgatcaatttgttacatctattgagcggtgttgcataggttacgctgttgcataggttacgccgttccctgttcctatcgttccctgttcctcattttccccaagttttttttcccttcatcaagcgcatttgttgatcatcgcatgcacttgtgttggcctagtttgctcatctgatgccaccgaatctatgtgtttgctttgatttcaatgttaccatctctgaatttggttcttttcttaatcaagtatttttcaagatccatgaaatccatcagatttatgcgtcaggagcggcagtggctcgggtgtagatccactgtccgttgtggtggacaatcttcttgatggatccctccttggcaaggtgtcggatagcggctcgggcgacggaaccgttaacctgttgtgacgtattataggatgataagcaaaacatccaaaacgagacatgcgagacaaaacaacgaaccttgtgtcggtcaatcaagatagactgggagatcaacttgtaggtggggacctccttaacgatcttgtcgtactgtagacgcgaaagacagtggatatcacgataagcccatgcacaaaaacgcccaacaaacaaagagaagaaaaaggaacgaacagtggcctgatcaacaacgacgtggtgggcggccttgtccttcacctttcccttggaccacttcttcttcttctgggtcttaccgacaccggtcttggccttgactttgggaggctaatggaaagaaaggatggcgttcagatgtcagtcaacggctaataaatcccaaccaggtagtccattcggtccaaacacaagtacaaggtgggcgatactgcaggcaagcaggcaggtagatgggcatagtcgagcagtggtttgtgatgataagtcgatgcatgggtttgtggggacgtatgatcggactgtgcaaagtagattttttggggggtgcaagtttttcgctctctgtctcctctttccctacacattataacaacagccgtccgtccgtcgcaccatgccactgatatcccaatgatatcggaaggagttcttcgagaaagcctaggaagactggatggaatcgtgggatcgatagatcggtcgtggggagggaaaaagattttttctccttcgtgtaaagtcggtgcctgcctgcgagtatgatgaaccctgccggatgcccgccttgtacaagcgtataaagatacgaaggatgtcctctggacggcccaaccatatactgagagcaaagggtgggccggaagtgaagggagcgacaaggaaggatcagaattgctcaccatgttggatgatggggactcgtcaaagaaacctctccaagatttctctttcgtccttcagctgaccagacctcgccccggcgagtggccagtgcgggatttgctgacaaagcaggatccagccggcccaacggttactaactgtaaaagtcagaccccttttgaccttatgacctttttctcacagattttctctccaaacaagcggcaggcgagagagagagagagattacgtaatcagctacctctgcgcctcccccccgcccgtccgtcgaacagaaggggaacgctttgtcggtaggaggggactgactttgactctttgtcgtcgatctccctcaagaaatcaaccaccgtatgtgtcgtctctcgcatggtatctgcacaggatacgtcgcctgctcggagaacattctcgagaggatgtattctgtgtctgcttagaaggaagaaacacctgttctgacattttgaacgtttgacttttttcttccttcttttcttcaactctcacagggtatgtttttcttttcttttctagattgttctccctggaaaatcgtggagaaacaagaagtgaaggaaccccaacgacttacaaaacctttctctctctcccgctttgaacctccctttttccccttccaactctcaatccgacttgaattttgatcgaaacaaatctggtcacgcctttcttccctcccttcgacacttctttcccttcgtgtcctacccctccctttccctcccctttccttttcttgaacatcttagcacatcatgtccaagcgaaccaagaaagttggaatcaccggaaagtacggagtccgatacggagcttccctccgaaagaccgtcaagaagatggaggtctggcagcacggtacctacacctgtgacttctgcggaaaggtacgtttcaacatttcctaaagtgaatgttttgtaagggcaacatcacgggatccattatccaacggacgatttagtggatgggttcatgggaggaacgccagtgggagccttgggagaatcagaaggaaaaatcgttagaattggcatagtacagatttgttgattctcgttcattctttttttttccatcaaactccacaaatccacaggacgccgtcaagcgaaccgctgttggtatctggaagtgccgaggatgccgaaagaccaccgccggtggtgcttggcagcttcagaccaccgccgctctcaccgtcaagtcgtaagtattcttaaaagctcctgttcaccaccgcttggcaaatttatgtcctcggattcttccctcatgccattgcttacccttgtttcccatatttgcttctcttagcaccactcgacgactccgagagctcaaggaggtttaaattgaattctgcacaaagacaaaactgttgcgggcgggagagagtggattcattctttttttttgtagatctgaagggatgccatgtcaaccctttcgttcccacatctcttttcttgtttccagttcacttgacacaaccgttctagcccctttgtcatcacctttcatacaatcacaattaagttcgatcccattcggtacatccctcgccaacaaccacccacataccgacttagacaataaaggttcccagtttcatttcgccttgtcacatcgtcatactcgacatttgcatctacttcactccccacaaatcattccggccgatctgtcgtccttgcaaacacgaacatcatcatcatcatgagggtttatcataaataatagtttacaacggtaaagatcccaataaggcattcaaacaagacgaatgtgaactaaggatcacacaaaaaaggaaagaaggagttcttttgttctggtccctcctaaaatagaacgtagataaggactcttttctaagcacggaccgaaagcgaaaggaaaatggaaatgatgaagtgttaaaaattgcaagattttttattcgacagaaataggagctttgttgatgttggatttggacagatgatgtttttgtaataaacttgaaaacgagaatgagaataacgataaggtcgaaacccgaaaagcatgcacgggatggatgaaagatgcgggagatggctagttgtacattattttgtatgcaggaatgatggatattttattttgttttgttttgaagcatttagagcagaagaggaaaaggataaacaagagaaagtaaaaggcaaggtttgtgaacgagaccgtagcggcaagaaaacgaagagagaaatctatgggaagagactctattaagagaaagggttgcctctcaatctctctttcgtcttcttctctcagctcagggagaacgcgcgagcgtggatcttgttgcctgctagatcgaacagttgacggtcgtctgcgaggaacacttgacgcaccatcgtcttggacgaatatagttggacctgaaagtgaagagaaaagaaaaggtatggtcaaagatacgaaatctcaccgaccagggtttgttgatttgggcagatacttacagtagtcaacttatcgggcttgcgaatatcccagacctacccattcattcatatagaacaagataagatggattagtccctaacactctgctctaaatcagtcaagtcaagcaaggaggaaagaaaggccagacaaaccttaagctgaccattcctcgtgcctttgagaaagaggttaccagtaaactgacctcgagaatgggcaatactgatcatctcattcggatcccgaagaccgattacggcctggggacgagtccgaaaatcatatacctggaaagggtccgagttgttgtacttaaacgaggcgaaagaaaagacaagcacacgtgtgagctcgatcgtccgttcaggtcgaaacgagatattgtatgaagagaaaaatgcttctacctcgatgcagaacaagttgggatcctcgttgagatggatctgagagatagatgcaagtcctggacttttaggaattccaaaccatcccggtcgattttgagccagatcaaaagtacagactgtagtgtatcaacgtcaaattaacatcgttactaactttcaaacttatgcagatacaatcgaaaaaaatcagaatacatacgggttccatctgctgcaccagaaaagagcagactatctgttgttcacaagacatatacgcgtggtcagtagacagaacctcaagtacgctgtggacattgtttagaaagacgtactccgaggctgataggacaatgcgctgatctccatctggtgatactttgccggaagtcgtgtcgtggtagctacgccctcaggacagatcgaccaacttctacaaaatggataaaccccaatcatacttgtgagatctaattcatgagtccttatgaaattctaaatatgaagtcgtgactgactgaacgactccatcatttcctccagaggcaaagtttgatcgaccaaacaactggctctccggaattgatgccagacaggtgattcccttgggagcatgcggagctgtcggacaactttgaattcgaggagtgatctttcaaaacaaatgcgccttatgttaattcaaggaagagaaggctacagaggaaatgctggtaaaaactaacatcggaacgtagattgataaaagatatttgagggcagatggacggcccgttagatgctggcttgtgattcctgtgatagttccgagagagaatgattcgatttcctgagaatacgatatctgatacgctctcctcgagcttaagatcgtcaatctcagcctcgtccaggcagctataaccacacaatagcatatcagcaacagcctgtttcgacagccatgtacaacttatataaatatggactaacgatctggctttggtagaatacagcccaactttgccttaaaacattataagaacatgttagcaagcgtattatataactacaattgtaaaaggaaacagactcaacccttgatcgaagtatatgcgagaagactgtcctggacgacaaaccacgataccgagtctggtttaggtctctgccctacaccaaaatcatacttttccgacaagacaacagcaggaggtcctattggtaggcgtgtttggtttctgggacccggaatggtgccaggtatagtcccgatgatcccttgagaagtatcatcaggtgcttgctcttccagtttgggcttcttgaatggacggggtggaccttctatcggactcttctctacacgctgattgaaagcgtctacggctaagatgaagtacatcctgggcatgtccctctgtggtccgttgagatttgccactgtccacatggcctcatcctcgttggaaagagtgatcattactatgtccttattttctaccgtaatacaatcaagactaaaatgaaaagtgttagtttttataaccagaacttgcacgtgtgtacattcaggcatcaacgacaacagaatcaaggtcaacataagaatagactcacacgttcaaccctgtctctgcgagatacgtcatcaaccctgttgtaccctctgagaacataccacggacgatcacttgttgaggtagaagatgagggtcagaagaactgaactgatgccatgggatgggcgaatctatctggaactctgtcgaaggggcaaccgattgagtccgttgcctaatcttctcatgacagttcgcaagtctctgctcaagctccctctgttcctcctgtaaccgctcgacatcgttatcatcccctatgtatgcctcttccagagatagagacgtaggaggattgacggttgtttcgctaggaggattattcatcaggataattgaagaggcaggggccgatgaagagaatggaagatttagaacagatccagagacggcggtttgacaatcggattcatccagtgggttgatcgaagagatgtctgtagggaggagctgggaagaaacttctgtttgtcgggtttgaaccgtcgatagctgattcttcttcgatgtcgcaccgaagttctctgcattttgagcgagcttttccttgaaagacgctcgtcgtttccgagacagtcttggagcagtcggggtaggaatgggggctggagctgcagatgtaggtgtggctgcagctttcaatgctgattgacatagctagttgaagaaagcaagaaaagtcgcatatccaaatcagaacagacaggtttatcgagcaaagaatggcaaatataacgtacctccgttgtgggtattacctcggattcagcatttggaagctgtacgtcaggcttagatacctggtacgaaagtcgaagaaacacgcgcgaatacatcagattttgaattgaagtagaaggaaaagagtcgtaggattactaacttgggaagagagaagttgattctgctttttaatcagacaattggcattagaatctttccttagaggagaataccaaacagcagttgaccatcatagagatacgaaccttcacacgtacgtcagttttggaggagtttctgtttgtaccctcctcctcttcctcctctgtttgcttcgcccaccagctaaacacgaccctatcctttgtccagtcgaccgctttgacatctttacccttcccagacaagatttttttatgttttctctccaactcggacctcgagaccggttcggttgagagcaacactgtaaacttcccttccaacgtgtttaacttccagtcgagtgccagcccgtcgtctcgccaagtacctttactagtgacgaccctgtctgtattggcaagttccattcgtttggtttctacgaaaagctttcgtgctctcgctcgttcctccggtcgttcattcgaccataacgcccgtgctagatccggcggaagcttgtctttgagatagggttgggatcccttcaacggtcgaacgggtggaggagtaggtgatttcggacggatagcaaggagggacacattaggcttgatgtcttcagagatttgtgccagaagtgtatctatcggattcgaagcaagttctacggcgggtgtcggaggaccaacggaagtaggaagacaaggagaggctgtgagagaagagggaatattcgcggaggctgatagaggatcttgaggcagacaattaagttgttgattgtgagacgcatgcaagggttgagaggatagagaggttgactctgagttgacagaatcagaggcagtagtcggagtagcgttacaagtctgttaatgctcagagaggaaaatgtatacccgttaagaaaacgtcagcgaccaagatacaacaatcaagaaggaaggaagagaaagagaaacgaacaagattagggactttattaaggagaactgaggaaatcttctcctcggcaggttgaggatcagatacttgactctgtattgggggagggaatagcagcgcagatggttcggcagccaaaggatccgtcttctgagatacatatgaagtctgtgccgccaccgaactctttcttgatcgagaagacttttttgcgatcgatgcagaagatgatctggtctcagatgaattcatgggttgacattccggagtcatgcaagcatcattagaggcaggaggaatgtcgaaggtctctatggctggtgcggggcaagtatccattttgatcaaatccataggaactttatcatcgaccgatatctccccatgctgaatttctggctcagatggtgtcggtttctttgaaggatcaagcatcgggttaggcttttgtcgattccgtggtcgtttcgctttggccgattgggtagaaggagcaggagcagggggtggattcttggagtggggagaagaacacggatcgattgcgaggagcggtttgagaggatggatcggtggttgacaatggacagaattctttgccgttaatctagggctcgatctgataccttccttcctactatcgacagtattcgctctatttaccgacccttccaaccgtttgaccggcttgttgctgctctccgcccgggcgtcttctccaagtggcctaggttggacagtatcccttctgaactcagtatttggtttgaacttgatcttttccgtcttggaccttgaggaacctgattctaaaacccgattgacatcttcatccagagacgttgatttctgtgcttgagccagagtcggaggtggctgggacgaaagtatagatccggtaacattaaataccgagctctctttctcgtttgaaccaaggattaggtttgcttcttgccggatatctttttgaaagggaacagaaggtgagctcgagtgtgcggtcggtgatgtcatgactggagtggctgccaacgaacgagaaacacttctggtcattgtcctgttcccaggcggtgtaggtccaggctgcaatggctttggttccagttcagattccggttttgatcccagtctttcttcgtcttcttcgtcctcacccattatcaatgagtttctcaccgccaactcttcctgcgcgtctaacgcggcctgcttttcatcgtccgttgccgccgatatcgccggcgctgccgtcgtcgtcgttggtactgccaccggtactgctggtattgctggaacagctgatcttttattcccatcctctctagaggattgagagcgctgattgaaacctctagtggacgtcccacctctcattctcccattaccagtaccattaccgtctctctggtttccagctctgtcccactccacaccatgtcctcctcctggagcagctactgctcggtaataacctccgttcgacctatgcgatcttggaccaagtggaactccctgtccattaaatcctcgtcccgacggtccattgacaggaaagagcggtggtctagtggggactggtataggaacgtgaggatacgaatgaggttgggatctatgttgagactggattcgagtctgaagtggaggttgagtccgagattgagattgatgctggaatggatatggaggtcgaatgggaaacccggtagagcgaggggtcatcacttctgccactagtggaacaacccttgctcggttagcatgaacagattcattaggttgggtatcttctcctctagtcgtcgtcgtcgtcgtcgtgttcgccgatatctttgactttgccgttgccgttgctatcgatgacgatgatagtggtttggatcgtatcggtactgccgaggacgaggaggaagaattagaaaaggaaggcggtaagagtggaggtagagacaggggtattgacggatcaggttgaatcgttcgaaaccgtttacctgtatatccttgtctcctatttgacccgttgctacccccattggcgttgatgttgacgtttccgagcccgttgtcgccgttgatagtactagaactagcacccacacctgtaccagacgaaggagaagtatgctcattctccggtcctttccgacaggaaacggacggagggcgattcatcggtcggatctgcccttctgttcaagcctttccttgagcaaaagcaaacagacagaaaggactaaggtggaggaaagattgatccaagaagatatcgaagcgaaccagaacagaacaaagaaaaggaaacgaaaggaaagtagagtatgaaaaagagaaaaggcagaaagacaaaaacttgggtttattacatttccactttcactctcgctttcactatcactgtcacttctactttcacttcttcattccagcctcttctctttgctctgcttcgctattgacaactcaacgttcaaatctagtggtatatcctgttctattacaacattgatgatgtctcctcttgttgcaaagacacatgaggaggcgcgattcctgaacaaacttttcctttcttttttctttttcttgacttagatttagatattctattctcctaatcttcgctccagtcccagcgctgagcgttttctcaaataatgaagaaacaaagagaagaagagaagaaagggaaagaagaaacgtgatcttactgaacaccaaagcgaaaaatgaaaaggacaagaaacataaacacaaacaacaacaacgagaactacgctggaaggacagaagggacgagtgaatgaacagatgaatgatatgtctatctagagctgagcgatttgctttccgagccgttctttcaaagtcgagtctatggagaagaagaggatcacatacgcgacgcgtgagtatcccgtcggatagaagacaagggggagtcagctcttgagcatgaagcacactcgatgtctggctagagcgaagaagagcaagcagaggaacgtacaagcagacatgatggtttgctcattaatcacgatctcgcctgcggtatccgctcttgggcgggaaaccctggaggcgatagctactgggtctgtctctaggataattctgtatggatgtgcgcatatggagggacagaaggggttgccatcaggtcattaaggttccgtttagaaagaccgcacaaaggaggaggagaaaccccgaagaaatggtaggaaatattgaagactaacccgtcatcaatcgtttcgtccagagccaacatgactagatctaagttctccaacacgctcctcttctcgacaagtcctctgaggagtagtcccacagcatcatggaatgcggtcaacgcgttctgaagcatgagttcattttcggatgttggtccaaccagatgaaacgttaggtccgtcgaggactttgttaggcagattgacgatggtgggaggaataatacgtcggcttttgttttgtttttgttttttgagatgaacacaaagatgaagccaaaagataagacgacacgttggcacacgactcgttaagaaacgaaaaggaagcatgactgagagaaaaagaacacggggcaaggagagtcgactgaccaagtcccttccttgttttctcacaaacattcttctcgaatgctctctgctctttcaacgtcccgaacggatttccacctagcgtactagctgcggctactccttgaccgaccgaagctggctggtgaggaggcgaccagtattttgcaatcactctgtttccttcactgtcgaggatgattagacaggtagccgaatatagcgtcagattggactgaagtaacggggagaatgaacgagtagaaggagagagcaagaagaagagagttagattgtcttctaagcgttaagcacacacaaaatctcataagaacagcacaaggtttgactaaacggaacatagaaggtctcaccatgatgagtataagacagatcaaacacacaaggcagacacagcaagagagacgagatgggaggaaagtacaacgagccgaaacagtgaaaacatcgtcggggggagatgaggtttgttagggttacatgtctgcttatataagttcactcgtttcttttgaaccatttcatctaatcaatcgactggtatgtataaagagggaaagaaagatctaggaaacagtctgtatagtctagtgttttactggacaaagaacaaggatgattaaaaaggaagagaagagagccaatccaagaccggaaggttttaacctcgctgggcggtcttatcactaaacaagttcaagagaagaagcagccaggtcagtcaaggagagaatcatacactttcaacgaatgatttacaggaaaaaacacttgaaaaaaaagcttactcgatatgagcgctctcgccttcctcctcctcagccaagagtcgttctgcctcaagggcggccatgcaaccagttccggcactggtgatagcctgcctgtatcgcttgtcctgaacatcaccggcggcaaagacaccctgaacggaggtttgggcggtaccgggaacggtgacgatataaccgtcctcgtctgtcttgacctgacccttgatgagatcggtagccgggacgtgacctgaggagaaaggagagaaggaagtgttaaacgctagaaagacgatatggatgttctagaaataaaaatcgtaccaattgcatagaagagaccgttgacatcaagcttagatgtctccttcgtcttgttgttgtagatctcaagacctgtgagaagctccccatctccagtgcactctttgccctcggtctggttttaaagaagcggaaagggggaagagtaagcttcaactgagagaaatgtcgatcgaagcaaaagaagaaaggaaagaaaataatacatacgttccacagcacggtcaccttcgggtgagccagcaatcgttgagccataatcctggaggctcgaagttcgtccttcctgaccaaagtgtacacatgtgatgcgtactttgtcaagtagatactctcctcagccgcagagtcacctccaccgatcactgccaacggcttgtttcggaagattggcacggctccatcacacactgcgcacgcactaacaccggactgccagtaggtctcctcaccgggcaaaccgagtcgcttggcggaagcaccggtcgcaaggatgatactaagaggaagaaagacaatatatgtagaaatgaataaataagtaaaaggtaccgaaagaagagataacgaagggcaagggagaaaaacttacgtgtcggcagtctcaaacgctgtctcatcgtcctcttctccctctcgccagtacttgaaaggtcgcttggagagatcaaccttggaaatggtctcagtgatgatttccgtcccgaatcgctcgctacacaaagatagaaaaagcgtgggtatagataagcgagggagggctgtagacagaaaaagtagaaacacaggaaagaaacgtacgattgggctctgaacttgtccatcatctcggatccaagaatgccatccgggaaaccggggaagttctcaacatcggtggtggtggtgagctgacctccgggagcaaacccgttggcaagcatgccctattacgagataaaatgcgcgcaaagggaaaataaggggaagacagagcaagacgtatgattagcacgataagaagaaacttgtaaacgttttagtctgagctgacctcgaatagaacagggttcaagttggctcggccaagatatatagcagcggtgtgaccagctggaccagaaccgatgatgaccactttagagtgaagtctagtggactgctcgcccttttcaggaatggcgagctcgtggttctcaggcgagtttccgttagggacagcgataggggccatggtagtttggtctgaagaaggaagggaggagtagtgcttgggaattggagtaggggaaggggcagctgtgggctgagaatgagctgaggagaaagtcgaagaggagcggtggatataccgagggttgaaggagtgtttagcaggaagggtgacggtgagtgcgagccgtttgttgctttgaaaagcaagagtctttaacagagacagtttcggttaaaagatgtaggggtggtggtagtaaaagtgaaagaaaagagcaagcgaggcaagagcacctggttcttaagggatctagagcgatggccgttcgtgtttactaattggctgaagggaggaggaggaaaaaaagaaggcgacagttccgttcagaccggagacgtcattcgggctgtgctatgtaatcgaaagaaacagctcacgtgttctttgggtcacgtgcggccgacttcacgtgcagaactacactcagcactggatgttccatcgcgacagtagtactatcaccgtcaacggactaccactgctatatcagcgctatcaccgtacagagggctgatcgattaagatgagcgagaacagatcttacatgtccatagagaagttgggatgtgatctccagcagaaaggtggagaggatgaagggctgagctagggtttgactacgctgatgaggtccacggttgtagtgggattaccgcatcagcgcacatcaccaccatactgggtatatcatactgattggcactgtgaacgcgtcagggattacctttgtgtaaattaatggacttaaatccgaattatgaggtgggcttatctgtagtttagttcagcgtagttccttctctgattggtctcctattgtagtctaccaaagtctcttcctgagccaaagtgtgcagtctctttctcttgtacatctagagaacaagatgttctcatcgtatatgtacatatgcaactatggtccttacattgggctcaagatggctaataaccctcatcttctttctctcttggatctctcttgggtcaccaagtctagatgacaatatgctcttgaattttcagaggaagatcccatagatcgttgctcccacttgatagtgataaacaggtaaaaaaaacatgatggatgattcagaagacaacattagacaaatgtctgtctagacaagctttcttctggcaaggatatgagaactcttggtgacgtgcgcgtgcgcgaaagaggaaaacatatgttgcacaactggtcatgtacactagatatagagattctcacaaccgaaagataacatgaaccatgctgcatagaaactctgagcaaggaaatagcagagtttgaaagaaagaaagaaatacaaaggagagagttattgtaagcggctacactgaagaattcgatgttgtgggtgtagttcccttcttcctgtctctgtctatcgtccccagttgcagttgcctcgctctccagctgtccattcttatacctccttgataaatgaacaaatcttcagctgttgctccagcttagacttctctgccaggactactgtgtttgtatgccgattggcattgcgtctcgtaggttttctatctcactgtttacgcctctatagtctcccatcaggcttgcctaatttctgtagtcccttttgtaatacctcgcctaatgcactctcatagtcatatgcccggcagtcgattgtttttcttttcttcttctcttccatccatcttccatcatctgcccttctccattcaatcctcttccgtttctccttctcttcctctcccgatcgattcgactgggtcgtctctttggaaaagctaatctttcccttgttctctaggtctctcacctgtatctcaacttcataaccgcaagaagacacagagaacgcgtcgtctcattttcttcccccttctgctcctttctcctctctttccatctctattgagtgagtaggcatttctgtttccctctttttcttcctcatgtgtctctttctgcctcttcatattctttcttcacgttccgtactcatctctttctcttcttttttttaattttctgttccatccttgcaggtcttctctctggtccatctttctagagttcactccacccatacacaccagagcacaccttacccctcatgtcctcatcaccctcgccttcctcccagagatcaccctcgccctcgcttccgcctccaccgtctagcgcaaagttgccgcctagaccatctagcagcacaacctcacacgttccctatgcaagacagtcccttggcccaggtggccctcagtcggccaccacgtacaccagtctttcttctgtcaaccctaacgccaccaacaatgccaacagttccaccgggccagcctacagaaacttttcaggtccacccggtgcaggcaggtcgggcggtgtcggtggaagaccgtcttcagagattttaggaggggctcatcttggcgggattggtaacactggtggaaacgccgaacctaggaatgccgaaggtaaatctctctgtcctttttctttctctgaatcttctcagttctttcagagatcctgaaattttatttaactctctttctgtctcttttttttgcagccgaggccattgaccgttggttccaagacctggcgtcttacgaggttaccttggttagtctcttttctttttaaggcttttctgctcgcccgttattcgtatttccttgtgttcatcttgctcatccgccttcgtctctcaccttgacccctcattcacaggaagagatggcggccgcttcgctcgatcaaaacttcactgaagagctgagtgccattgaacaatgttcgttctctagtctactctttacctctcgttttctgaacatagttctaactcttttggccttctcttcaaagggtttcgagtcctctccgaggcggagagaacggccgcgttatattctttactccagcactcgacccagcttcagattaggttctttatgaccgtgcttcaacagatggcaagatcagaccccatgtccgccctactatctccagctgtaggaaccgggatgcaggctcaggtggaagcaaagatgaacacctaccgatcacccgtccgaacgagcttcggaggtgggaatgctgcctcggccgtcagagaatcctttgccgacagctcggcctaccttactccagagtctgctctatctaccctagatggaccgccccttgggaccatctctgccaccgctggctcccagcgaaagtcatctgccagctcgtctcacaagccgaaccgaatttcggccccaggaggcttgaattcgctgacaccgtcgtggctagccggtgggtcgaccggactcgatcaagttctcgagcgaggcccatcccccggtggagaatccgttacttctactcgatcaacagaccgacccaagtcagcagacttctccgggctcgcgaatatcgtccccggttcgacccacgcggccaataaccaaaagtccagatcaagctcaaggatgagcatgcctggttctggagcaggactcggcctcggtcctcctgctggcacaacgcctaacctagcagacgaaagccccttcccatcttcgcccagtgccaaagctggtgtatcgttcccattgtcccctaactccaacgctggtggctgggccagcatggccaataccccgactagccaggtaccaaaactatcggacgctcctaaacgaagagtgactggtggaggaaacccgaccggatccggttacccatcaaggtctctcttcaacgacgagccggctcagcaacagcaacagccgagcggtcctgggtccggcgtcggtctcggcgtcggaatcaatctaaagtccggtcgaaacttttcgtcgcctggtaatgtcggtggtaacttccaaggaccggctactggttcgtgggcccaatccagacagagccctgccctcggaagtaacgccgatgcgttcggtccttccggtttaaacatccttaccaacggactagcctcaccttcgccatcggaccttgcgttccagatgtctcaacttcaactccagcagcttcagatccaacagcttcaacagcttcagcagttaggtgtcgctgccgctggaggcaatgccggcaacaccactggagcaggaggaactggctcggctattacaggtctcggtggcctcggagggattggcattggtttacccgtaggcggattgcaaaaccccggaatgggtcttggcctaggcgccttcgccggtctgaataatgccgggttgattggtctgctaggtcaacaacaagctcagctccaagctcaagttcaggctcaggcgcaagcacaggctcaagcgcaagcgcaacagactccgagatcagtctcgatcaaaagccagcacaacggctcacactccgccaccagacggtcccccatgctgggcgtctctggttcggccggtttgaagagcccgtcgcctggtgggtctggtagacgagagagcggtggaggtggatggggagcacacgcacaggccggacaggcacagactggagaggaagatgtggacatcagagtgttggaagacattccccagtggctgaggacattaagattacatgttcgtcctttccttttcctcgctaccctttcttctactctcttatcttattgaactgacgagtcgacatctaaatgtttgaatcaacaacgaaccaaacaccagaaatacacaccgaacttcgaaaactcgaaatggacggaaatggtgctcatgtcggacgctgaccttgaagctcagggcgtcgccgctttgggggctagacgaaaacttctcaaggtctgttctcttcactgcctttctcttgctttttcctcgtcttgtcagaatcgtgctttcttcccaaaatttggaggaaacatagtttactgataaaccctccttgaatttttgaatgtaacagacgttcgaggctgtccgagctcaaatggggatcccagagcctgattcccctggcgctggcgttagtgccgaatcgggtgccggcggcgagaac

SEQ ID NO: 595 - DNA, 16474 bp, Xanthophyllomyces dendrorhous
gctgggaagggtggggatgacgactcagaggatgaagacgcgtgatcgctccctttctttaatcttcctgattcaatcctatctctctattcttgtctttttttctgtccctctgcctttctgccttttcttgtttcccttgactcttggtagtagttgtttcttttcttatattctctatccattttaaatatctcaattcaaataggaagtttccgccttgtctgagctagttcacattccaaacccatgattccatccatcgtgctttcttacttcttttatatatattttattttgtttctcttcttttgcttctttaatttgtttttcagattgttttgcttctctcatgtttcatgctctaattcatcccggtccgtctaggatctctcaacgatctttatcttgacatcctttcttttaaaagccatcaacgcaaccagccttttctcaaactagacccggcaatcaacacggggctcattcctgaacccaacaagtatagacatcagagagaaaagaaagcggagaagagaagagaacaagatctctcgtcagtcatcagatcaagaattaaaaagaatgatgcaaaattagagcgaaacgaaagaaagaaggtgaagagagcagagggcgggacagacatttttacgagagggacgagccggtctagttgggactggttccagacttcagtttccatttaatgatcatcagaacattagtgtccgtttcttatcaaacgaaaaccaggatagatgcaaaaatagaagaaggtaaggaaagacagacttgagttgactttgttgagaacgagaaccagaagtgtctgctaccgtcctctttgtccttctcgaggtatttgccgacgccgccgcctttggcggcgctctcgatcttgacctacaaccgttcaatcaatatttgaaaatcaagatcaagagaaagaaagagaagaagggtatgttgtcaaaattggagaaagaagaagagagagatagatacagcgtgaaagaggcaggaacggacgtctgaggggctgctcttcgtctaggaggagaagcaatagtaatctcttcgtcctcatccccatcctcgtcatcatcgaaatcatcgatatgaccttttgtccgttgagtttcagttcgacagtcatcttcgtccgtatcgtgtatgaaaatttcctcttcactgtcgttgaactagagatagcagaggagttaagttcagaaaattgatatccgtgttcaggatggctacaccaacgtactaaagcctgcttcttctttgctgcagctggaggcttcttggtggctgggactttcttggcctttgctgcagttgaggtcgttgcttttttggctcttcctgtcgcccgagtgaacacggagtcgtctgagtcttcacccatcgactctgccatcattacgtccgagtctggagcattcgacgccttattaaacaaatatcaatgtccataccgtcgatagatcaaagaacaaaggcaaaggaaaccaggtgtttggacgaactctgactttcccttcggatagcacagcgggccgcttccctccgaattggctctcggccaagtttttttgttggatcaacttgaaaaataaggcaaacaaacaggcgatgaatgagatcaagctgcctataagaaacattgagtaaccagtccacggtacctcatcttggatctcatcctcagtcaggttcttcattcgtgcgtttgagttgaatgctttcagcgttccagcgacaaaactttaagtgcgcacaaagaggagataagcttcctttgttatctgatcgatcaggcaagagatctatgaggacaaactctttgatcgccgtcttactgcccttttctacaaacttttcgacagcatcctctaatccgttctcgggtaagacgtctagcttctgagctgtcaaatactcctttaccaaatccgccatcttgatcttcccttgtcgctgaccgggcgcgagcccgtcatcgtcggagaggtccagatcaggttgatcgacagaaactttatctgtccgtttggcaaacttcttccgtcgataaaactgtagaagatttcctgggttggcaaccagctggttgaggccttctccgaaacgggtgacgttcgttagctctaatacgcccgttgtttcaacctgtgtagaagagtcaaaaataaggatcgggaatatccaaacataggtaaatcgtcaaagaaggacggttagacgaactttcaaacgaattaatggcttaggtctcttgggaccgtctacctcaggtgatagggacaagttcttctcatcccatttagcattcgcctcggccacacacttcaatacctaaatatgaagaggggtgagaccagaggaaaacattcagacatggacgtcaaactcgtacccatacgactgattgtcgatgtaaagaaaaagaaaacgaggcgtacctgttgtctcaaatactcagttacctttggcttattttctaaattcagcccggtttcttccgctacgactgacagctcgatatgtttcatcacgaacggccgaacggtcttgagaggcatcggagtgatctggaaatgtttaccttggatctccagaagtccgacatgtctatcatgttgcatgtaaaccagaaagagaagcgatcagtctcgactctggttgtctagcgcggcagcagggtatgatagcaagtcggaaggaacgagagaacgtacttgtcaatggcttcaccgtctgctaaactagtggccacactcgagcctggctgtgtgatccagtattgtttgtctgctaccatttctggaacgatccggcaatcatgctcgtgaccccagacgacaagatctgtcgaatcatcaaacatgttctcaggtatatactcatgccggttatgagccactctgattgtgttgacaaagaaaaaaaattgaggtaacacccgtcaatatccgacaaagtagaaggaaagatgaactaggacaaacctgttttgatgcaccagtacaatgttgaaccagttatcgatatcctcttctggtctcaacatcctaactcttccgttccgtaactcatgactcatcctaacatccttgatgtttccgattccatacatcgcaagcttggtcgtcccctttcttagtaggacgggtgagatcgtcaaaccctgcttggctgattcgggacgcgcttcgtctgctcccagatcagtcttcccaaagtagttcagttgaccagagacggacagaatatcaatcgcggaaagagctcctgcctggatagtttgagaagcaaaaaaaaaaaacgcttgttaaaactcaggggatgcctggtatgggtatgatatgaatgaggagcgcacagctgacgttccctggggatcatcatgattgccatgaatagagaagacaggaatgccgacgttgaggttatagtcttcgtaattaatcgctggaaatctaacaggccgaatgatttttgatagacatcagcacgtatatagagaaggcgcagaagaataatgtcgatatttggctaagagacttacgtgaatcctgcggctttcccttcattcggatcgctcagaagttctatctggacgggcctatccccttgagagtactctctgagaagagcaatcgtctgatggagagtgtatcttgaaggatagttctcgtggaagagatcgcctgccagcaagatgaaatctacctgtcgccatcaaaaagaagagacatcagctggctatgtgccattgaagatggacggatataaggagagattattccaacccacctcctcttttctggccagctctagaatctctctaaaggcatcaaacgaatcatttccccgaatgggatccttctcaaggtaccctaaatggttgtcggtagcaagcatgatgcgtatagtgtttgacccatcgtcctctatatcccttagcaaaggagttggtcttgtaagtctgttctctcagaaacgaagacgacatcagcccatgtcttctttcccttctagtctctccactctttacccttgcagccacatagactcacggcggttctccctctgatagctgagatgatactggtggggacgacatgtgtctatacaactgctacctggacacggcgtggatctgaacgagagatcggacaatggcggtctaaagggggacgagcgtcagcgttactgcgcgacgcgtcctaaatgaggctacgcgtctcaaatgcgtctgtcggctggcgcgtctcgatcaacacacgcttttgatttctatctctcatcattccttctgctcacacactcttcctaggtttataggccatacatataccatacgatcacagaccttaataacagagttaaatttgtcactattccgatcaatacgatggatgaagtagatgcctccgatccggcggctatgagaatgttttacaacaggctctttccttggaaacagctcttcacctggttgaaccacgaacaaagtgagattccgttgctggccgaggctgttttaactggttctcgcggtcttactctctgatgtgttactattcgacgagaacagtaccgacaaggttgtttacccacagagagttcgctttcactctggccggggacatctatttgagatacaactcgttcgccaaccacgaagaaatgaaacgagaggttctccgactgaaccctagtcgattcgaaatcggagccatctatactgctaaggtacttctacgagataaaactacctacgcatcttccagctgagccgatgatctctgatagatatcaaatctgaccttcttttccttgtttgtttcgcctcagcccaaagacaagaagacccttcgtccgtcggccctccagccggctcgtcgggagcttgtgttcgatatcgatatgacagactacgacgagatccggacgtgctgctctgacaagtctatgtgtaaacgatgctggggattcattgcttgcgctaccgaagtcttggaccatgctcttcgaggtacgtgttgcgctttgagcttgtctttctgtttctctctatgaatgccactttcggtaaacttaacaatattttctgaaaacaatgcttcgtatcaaatgatgtaaaaaactgctacagatcaattcggctttcagcatcttctctgggtgtattccggtcgacgaggaattcattgttggatctctgatacgacagcattagatctgaccgacgatcagagacgagcgattgttcactatctcgaggttgtcaaaggagggaaggaaatgagtaagaaggtgaatgttaggttcggaagagcacccgaattgcaccctagtataatgtgagtgattcctctctatcacatgtttgttcattaaagatgaagatgaactgaattggggttctctccaacgatctgtcggtaacctttcctcctctaaaaaagggatgcatacgatattctggggaaagactttgctactctgatcctagacgaccaggaatgtttcaagacgaaagaacagtgggaaacccttctgtctcttgttcctgatgaaggtaagtggcctccttgacctattttcatcctttcgttcatcatcgaagcacatcagcaaatctgaaacgagatctatttgagaaactaaagcgctcacctccaagctccgcaccaaatggtccgccaagtcgtacacttcgcgtcaaaaatggacccatcttacggatgcccttccgtcccgagcatccaagaccggatctgccgcaggtttaggaccgaaagggaaaggaagtccgttggaacatgcactacaggatatcgttctgcagtacacataccctaggctagatgcggatgtgtcaaaacatcgaaaccatttgttaaaatctccttttgtcatccatcccggaacaagtgcgtcctcttctcttctcttcttatttgttgtatttaaaggggaaattgtgaccgctcaaccttgtttaactgttgttgtctcacatatttattcggaatttcgacagaccgagtatgcgtccctgtagatcctgcgaggatctctgaattcgacccatcgacagttccgacattaggtcaactaataggcgaacttaacgtagccgctgctgccgcaaagacggatcctcaatctgtagatggggaaaatgggtcatctcaggatctgggggatgagaagaaagtcgtcggttcgtcctttttgcttccatcccttcgatattcctttccccttcattttaggtcccctctgactgtcagctactgactcgttcactacttcattgttctttgtaaaatccttaaagattggagacagacaagcttgaaaccatatgtggacatgctcgagcgacattctcaaggtctcctcagacagactcgagaaaagaaacgaagtaaatcccttcttcttttctttgctctttctaaatccttcgtggctctttgtaagcatgcggatggagctttagagatacggagactgacttcaattctctacttatattcttctctgtatgattgggtattaaaaaaccaagacgcagcgcaaatgtctactgacttttagtcttcaactataacccctcctgtcaatcggaccttacatgtttccccacgatacttctatgcgcttctcgtatgtatgtatatatgtatgtaatgcaaatccctcaatcgatttaaatcgagcttcctttctcctcctttcttctttacgtgacgagtgcaacatggtttagagatagtagtatacatgcttaacgataaagtttaataagaaatttccaacgagagcctacgaaggtcttctttgcaagagagatggaggaaagagagaagaggaacaacagcaacagaagacgacaaacggcgacgggagatgaacaaagacagggcaagataacagcttaaagaaattcaagagaattagaaagagaggataatgcgacccctgatccttactctctacttttttcctcttaaacaccttcggttccactggcaacgggagcagctggcgggactgtacctgcatgagcacgagctgtcgcaggcggagcgacggcctcgtgtgaagcggcgactgcttcttcttcaagtcgaatccgaccttctctagtccgggccgagtggaagaagatggaagccaagtaggtaaagggctgagggagagacgacgtttaagcagaatccacttgataagctgaccgggtcctttaaccagaaaagggagacatggacatacgtagagggcgaggaagatgaacaaagtgaccaccatagtaaatggctttggcttcttgagcagaagagatacaagcagatactcggctgatactgtccagactgttataatcgatgatccgaatcaaccaaaaatccagccaaacgatgagtgatgaagcacaaaagatggaaaatgaggaagatggtgagtcctcaccaaggtccttggttacaaagaccatcagcaaaccaacgacgttgaccccagcaaggattccaatagcctgccaggagtattttgcataagtggccggatctctagactcccagccaagaacaatgaaaccgttgtcaagccattcaagcaagaaaacgatagcgagcatcatcttcatgggagtgtagacaaagagccaggttccggtagaaaagtgataatgtcggtggagagtaaggtaaatggtgcctctagtggaagatggatacaatgcaggtcagcaagtcggatggcggaggaggaacgagattgatagatacgtacagaatcagagaattaagaataagcaagacctcggcgaccatgaaagaccatgaagtttgaagagtctgagtcatgtgagacccgtaagtttgatgctaatcagcttgcaattaagagcaacggacacaagcacaaagtcagacgaacccagaagacggcccagccagccatgagccaattggcgatcgagaacctcattccaacaccccgcatcagcacatccttcgtctcggccgatctggccaggacgagcatcaggcagaatccaatttgaagagcatacaccacggtctattatatttgaccaccagacaaacgcgtgtgatcagtcagtttgttatactcattcatcaaacggataaaaggaaggacggacccaataaccgcttatcatgacagataaaggcgtgaagagcgtcggatgggctctcgagatatcgactggaggacaacccggacaatcaatcggtggttcaagttcaacgttttgccattttgctctaaactacaattttcgcccgaaaaagaatgcaatgcgcgaccacccccaagaagagagaaagcaagatagaaaggagatgagaccagagaaggcgggaaagaaggatggactaactcatcgatggtttaattagactggcacagacaatatttgctcctatagaaaccagcaggctgaggggctgttgaaaaggaagcaggacggatggtaaaggcaataagcgatgtgttaattccgatcgaatccacacaggtttcagccgggagaggtttgaattgatggatacaactctacttacggaaatgatctgaagtcgaacatacttcaatgtcgctcgaagctgctcctgtgtgagcacttggccacctgatggtaggtcgtatgaggacatggctgaaatacaataacggatgggcgagagaacagatggggaggaaggatgggaggtagtaggaagaagaaggacaagagcagaccaggtgagagacaggctatgatatcataggtgatcttatctaagaacattttcatctatcagttacaaattcatgaactgtcacatatttatcttcttatttctcgttctctacagagcaccattcgtgcggtcctcattccactttgtcttcgcaaacgtttgagcgacgagtagcgggaagatgagcgtagcatcggcgtagacctgatgaaaagacaagagatttatggtcaatatgggctagatgtagtcagataggaaaaaaatggtatcagacaaaccttgacagcgggagcatctgctttgatctttccccaggaaaccgcttcgtcaggtctagctccagaatcggatccatcaaactcttggccagtattgatatagacagagtaatccgctccatttctctgcaagaaaggaatgaatgggcaatcaggttgagcctcagcctctattattcatttttaaccattagttcaaggcgaaaaagtcatataagactcacgaaaagcatggcgttcgcgatctgatgcttgcaaacacctccgccaaggatgatcattccagctttcttggctttgacactcatgtcgttcaacctacgaatatccttgacgatatcgatcaccaatggtgtctcagtcttgtacgagtgaaagtagagcatgtcaccgagcgagccatctgtgagcgctggacagaatactgggatatcgttctagttgagtgaaggatgtagaggtattcatagtcagcagaagtgatcatatgaatctagagccgtcgcagaaacacagaataagcagcattgaaagcttctcggtacggaccttccaacaccagtagtacacactgctctcgtcgttgatctccttacccaaccgacggatcacatcggaaggagcccaggtaatggactctgtcttctgctcgaccaccatggcatccaagataggcaatacccaatcttcaaacgcgcaatagtttgagtttggcacaagcaagttacctatccggttcattctgttacaaaaaagaacaaaaagcaggccaaccgcgccagattaagtctttcaagtgctataagcagactggacgcagacatggttccaaacgtaccctttgcctctcagctccctaccaacctcttcaaagcccttttgaccaagataagtctttcccaaacacttaatgaagtcctcctcgactccgccggcagtggtgaccaaggcggagatcattttgtgctttgccagataacagataatttctctcagtccggacgagattaagttggacgtgtagccgagaaagatggccgctttgtcttgaggtggacggtacgggtcgttaggctccggtgtgctcggccggctgtcctcggcggtgtcggcttcgctggattccgcagaaggctctggcctccaagacctctatggcgcgagaaaaagaacagagcaaggcgatattcaatcaatacgtggatagattcttcagcaattgatctctttaacattccatctgcagaaaaacaacaagacaaaccatctcgtcgacgatacggcatgctttggcaaagctagtgccttggaagcccatggtcgcgtagctagctagaaggtcattcagtgaatgttccttgtcaaagttcgggccttgaaccgggatagattctattggtacaggttctgattgaaggagaacattcccgtgcgcttgacctgtagtagaagatgccatgatcgagggtagaaagtgaaacttcttttgggatggttgttgggaattcagtggaagggctgaatgagaagcttcaaaaaaggaaaaaaaaatcttccttaagggaaagtaaaataataaaataataataataaaaatgatgaattatactctcctccttcatctctcacatccatcccatcctattccattccatcctctcactcatcctatacgtgtatctatctccatcggtaactcataatgtcagcttatggcccagctggtacacagcaacaacaacaacagcatcatcaccatcatacccacgcccacgcccccatccatcatcatcatcatcggtctcagacatcccagcagatggcccttcaacagcatcagcatcaacaacaccagcagcaacaccagcatcagcatcagcatcagcatcaacaccaacaatcggcaggtgtcagatatggacgtgccgttggaagtggtagagggattggcctcctggcaaacgaacagggattgggtaatccaggggatgaatatctgttcgtacacttatctgctcttcccctcttcttgcctgtttccaaggattcaatcctcttttcatactcctagcctctccttagccaacctgattcaatcaaactaactgtttatctacctttgtgctggcatggcatgcattcagctctctcccgtcactcgatcaaacaaattcttacactccgattggaacatcttacccgccttcgggttcgtcctacgatgatctcgagcaagccaatcctagtgcaagttcaggcaatcggggaaacaagctcaaaaagaactcgagatgggtccggaaaggaaaggcagtggcttgggggatgagtgctggagagagagaggtatgtctgttctgtcttcatcccttcctcctttcttctcttgctgtagatacgcgtctgtttctggtgcccctgccaaaaggctgttttcaggagcactgacttcgaattttgtatttttgtatttatcatacttcatcttctctccaggctgaagaaaggctacgtgctaagctacgatacactcttgctcaccatctaccgcctgacttatcgcgaggtcggtcgccatcccgttcgctctcccctccattacttccccatcttcgttctccatccccaccaagcgtgacttcgagccatctctctcagctactctctccgcctagatcatataccgagatcgttctatctcctgccatgcggtataccttcgcgtctggtcatctggaggacgcgttgggacagacggcaggtgagttgatcgagggtgagatcggacttagcagaagtctaggcagattctttgaagaatgcagagaacgggggatcggaaagcgagatgatgatgacgaggaagagggagaggaagaagagaaggagaaggagaaggaacaagagcaagaggttgtggaagcaaccgaaggagaagcatcggcggcgacagacctcacatcatcaacaccaataacaaccactacaatagcaaccggagagacccctagagagggaaaagaggctgacggagaagtcaaaagcgctactcaagatcaggtacatatcccggagaatgggagccatgacaagaaagaaatcctagatgtgcacgagcagaaggaatacctcgatggatcaaaccggcttccgtcagatatatcgatgagaatggacgtcgacgatctatctgcatctcagcctcaaatttcctctaccctctcctctcatccaccaaaaaaatctgcggatcgtccttcgatacatgccgagggtcatcatcacggaccagaaggcgtgattgacgacccgactgattttgaacatcaacaggaggttcagctgagcgctttggagaaactgtttgttacgccggaaggagtgagttatccgatacctcctcaacagggaatggatccgaacggtggcgcaatgtttttaagtgtagagatgcagaaggaggcgctttatcgaggcatggatgcactcgttagtttattttcttgctttccctgtcacccttctcatccttcgacaaacaactggactgatctctggttttctctaacatgccaatatgatacatgctcttatagggagaattactggcagattcgagagaatatgtcgagcgattagaggaggtcagagagcgtctcgccggagttggaagagctagaaagcgggtctggagagaaattagggagagatgtttggagaacggagagttaggagatggtagtacggattcgtgagagcaggttagagatcagtatggatccggttcgatgtctacgtttaattattcctggtcagcactttgaccggctcagactgctattatttgttgtcttgtaaattttatctataaagtattctcgtttctggatctgattgctacattgatgatcataagatgtagaaaaggaagtagaaagggaaaaggctttggaagaattataaaaataatgaaatcttattagaactttcctattgtttatttttttgaaactcatcaccttctttccatccttgtcctcaaacactcatcatccaaccttggctcttcacgatgaccactctgtccttctcgtccggaccgataccacaaggtcatcttacccagtggcaagactctggaaggacactcagccatatactctctccaggcttcgggagtgtgagtttctttccttctctcctcaggcgtatctagattcagatcttctctccgaggaaaaaagcatagatagaaagacgtgttgattgacctttccggtcctcctcttctcctccgtcttggaacatcgataactgttctctgtggagaaatcttgtaggaagtcggagcattcgtcacaaagagagacggtactctcacgtctgccaagctcaagacacctgctcacggagagcgagcaatcttctttggaaagtgggacaaggtccctcaacatctcattcctgtgagtgctttctcgaggctcgatatatttcggtctgttttcttgttctcgatcactcaagcagaacctctcatctatttccatacatcatggagaatagctctacacaagaacatatacgctgtttcattcattgcagcagatcgcggctgaatccaacccggcccctcaagatacttccttccttcgtcgcccctcagctgccaaaccgaagtaagtgttacgtttctgaccgtttgacgacattgtcgcattcttgatgctgaagagccgcgagctgaaactcttttcaaattggaaacataaacagtctcccttcggcttctcagattaacttttattctaggatcgcatcgctttatactgagacccttcgacagactctacttctcccaacattaaccgccagcgagcaagatcactgggcatcgatcacccagatcttccaccttgcaaagattctttaccttcctgaagacggaaggggtgacggtgtcgtgggtgaggagttactcgattggataaacatggctgacttggggccaacgacggaggaaggagaagaaatccttggatttagcaacggggatagttgggcgcacgaagagttttggtcatacttgatcaggtaggtttgagatagtggttctctacagggcgagagaaagcatgtgtgtcaaagatgctgacaggttctctttctctttccatggctattcgcgttcttgactcattgattctcaggtcactcttgagaggatttcttccttcgacatctcagttaatctccactctatctacccacccctcacccgttctatcctctatctcctccaagatcgcgacccatctagccgactaccctcgatcgtcctcttcttcctaccctaccgagcgcgctttcctccaagcacactcatcctggcgagcgcaattccggacactttgtgttcctctcactaaacgagggtgggctctcgaaggagcctggggctcttcggatgaatcctctgggcttgaagacgtcgttcaagcagtgttggagctcatgcaagggaaagaagaccgagtgttagaggaatgcgtggattggaaggaggctgtcggcgcatggggtgtttgggtccgaccgtcgttgaaacgagacgacctaccggaaaccatccgaacgatcagctccggtgtgctttcgttggatccggcggctcaggatgaaaccgtgatgtacgcgttacttcaaggagacatcacccagacgatcacctctacgaatacgttgtccgtctggctagcgactcatttgacggacttgatggataagctgggcctggtcgagacagttgttggggcggagagagggttgagagatcacttcgtgttggaatatgcgcttcatctggccagtgaggagggtctgtggaggatgacgtgtgattatctgaagacatgtggagaggaaggcaggagacgggtcgcaggccttttggagaggatctcgctagaaaaggacgagcaggatggaggtgggattgacgaaagcaaagtagaagaggttttcaggacgtacgttatccaattctgctttgttgtctgctttgtgggcacggacggaacgacctgaccgaaacgtgttttcctttctcgttgctctcgatcgatgaacgaaactcaaacagtctacagacgttgggcctagaagaagaaagtcgaacgctatccagagtggtcggtcagcgaatggttcaatcgaggcagtacggcctcgctgtcgcgtactgtgttcgagcaggtgatggaaggagacttgggataatatcggataagattttaaacgtctatgttcaaaaaggtctgttgggtggtttttgtctatctcttttttttcgccacgcttttattctgatcttgcttttttttttctcttccctctcgcttcttgcgataggtcccaaggaattcatcgagcatgtcaactctatccccccatcactcttctcccccgaatcacctcactacatcgcctcggccgcttccggcctgtcgccctcgacgacatcaaacccgacgttcccgatcctggcgagtaaactaaacttcctcccgttgtaccgagactttctcgaatcgttccattccaacgatcttcccaaagctgcctccttactgtccaacatgtttgcatccgatatcgcacccaaagggttctgggctgtcctgttggtcgactcggtggtgatcttggaggatcagaggatgttggtcgggacggaagaagcatatggcttgctgggtcggttggaagaggtcgtttccggttcgagtcactcaccgggtgactacttgggataccttgtcgatctccaaacgacgtcttcctctactggtaatgccccgtcgtcgtcatcctcctcctcctcctttgacgcattcaacacgcccctgtcgacaacatcgaccttcaacacgatcgccaaatcaagaccgctcgtcaacgggcaacggaaaaaaggaaacggaaagtccccgacggatgagttctatctggcaggactgaagggcttggaggtagttaggctggcgttggctaggtatttggctagggatctgctgggttgagagagagagagagagggtgagggagagggtgagagactccataggcttcatttttttttcgaggtttataccctccgagatggaaatgtcctttttttttctccttcttggcctttgcttctttctcttctagagaaaggttgtttgcgtgtgtatatgtgtgtgtttggttcatcttggtcttccttttttgaatcacgatcatctcttggtggaaacccccacatgcattcctttcatctgttcttcttgatttccttctctttattagatttttcatttttatttttgtttttgtttttgtctt

SEQ ID NO: 596 - DNA, 2512 bp, Xanthophyllomyces dendrorhous
  misc_feature (1379)..(1388): n is a, c, g, or t
aaaaggaaaggaaagggaaaagggaaagggtgaagacaacgaaaagaaagaggacgaacctccctccaaggcaagaacgaccgaggggtagaccccgttgatgtacttcagactggtatcgagcgagcctaggccttctctgatcatgtccttgttgacggatgcgagggcgtctctggcggtggccgggtcggcaggatcgatcagccggaggtggagaagcttgctgtttgtcgacgtaggttcttcgtagtcgatgttggcgcttaaaagaattaaataaataaataaataaaagaagagaagagcagagcaaacgaacatcatcgtgtttgattgcattgatcagtcaatcaaccggtacaggaacgaaagacagctatcggcagatgaacgcttacatgagttttcgaccttcggcgatatcccggaatctgaagatggattcctcggcgtactccgtcccgggcttgacgagcttgacgaagctgttccggtaacgatagtaacaacaaagaatgttaatttgagtgtggttctattgttggcaatccccagcttgtgcgtgccgggatttctttcccccagaggaagagaaaaagagagagaggaagaaagtatacaagagagaagaaagaaggaaagcttggagactaacgagagtcgagcggcatgagcttgaggaggcaacgtcttgaacttggagtcgatcggtcgaactttggagaacggaaggacttcctcgtttccactgtagaaatgtattccagcaggaaacaccggcgggtcagtaaaagagagagagagagagagaagagaaagaaaacgaaaaagaaaaagaaaacgaaagagaaagagaaagaaaaagaaacccactagtcgataaacacaacctcgcactctttcttcagagcggacgctcgcttcactctagctctgtaccactgatcgtcctccgagaactaaagaaagagaccaagatttattattttattttattaaagtcgtaaccagttggtctgtcagatgccgaatggacacgcctagctcacaacaaacaagtctccgggaaagaaaagaaaaaaggaaagaaagaaaccgacggacctgtccagagatcaactctccggctttcggactgaacccagggggcgacctagcggaaggagaggcatggaacgatgaaaactcggccatcaacttttccagagctgccccgaactggttctttccgtcgaggatctggacggagaacccgaaaggatcggcggtcacgcacgagacgatcacgtcaaagtacgccgtcgggagtgctttagcggcttcttcgacggctgggtcgtatgaactccaaagctgaagagagagagagagagagnnnnnnnnnnagagagaggtcgccggtgaacgtttgatcagccttcgacacagaagagaatctgccgcaaaagggacaagacggaaagacgacatacgtttgctttgttctgatgggccatgcaacatgaagattgaaattggaacagtcaataaagaaaataaaaagacgattccttcttgtctctgtctcgaaggaacatgacttactcgctttgcctcctcctcggcagcgaacaactgtctggcgaatggcaggctttcggccgtgtacgcatggacctgggccagaccagcccggacgagctcgacagctacgttctccgtcttgttgacgtacatagctccgatgtatcctgaaagaatgacattgaaaagatgtatgcgcgttgagagctgatagcgagggagaaggaaaggaaaagagaggaaaaaaaaaaggaaggaaaaagagcgacacggacctccgactttatcgaccgtctcgaactcgacctctacgtctctctgcatgtatctcgaagcgaaccggtgagattccaccccgtagggttctcccttctctgatgggttccttaccgttctcggggctcggattccggcgaggacctacagggtgagaggaaggtggaaagtagtttatcagtaaacaagaagactgactagaaaaggagagggaaggaaagaaaaaaaactaacaaaggtcaactttttgttctccttgggcaaaagaactttgaatctcgacccggcggctacgaactcgaccacggcggcctgtctgccggctcgcttgaagaaaggcaagaactgagaggcctttgctccggacttgggaaagatttcggttcaaagatcatcggtcagtcatcgcgagagagagagagagagagagagagatttggaaggaagggagggaaagaacggttgagagtgggctggtttactcacctcggaggcatcgatgattcggggaagggccatctccttttgagagtgtaatcccctgagctcggtcacggcgctgttcgcacacagaagatgggatggatgacccaaagctaacgggaggttacaaacgcgtacaggccaaagaaaatcgatagagattggaacagaggcggagggggggggg

SEQ ID NO: 597 - DNA, 1073 bp, Xanthophyllomyces dendrorhous
ggggggggggaggacttacgtttgctcggcaatgatcaatttgtcgagatcaggcgatcgatcctcgtcctcctttcggtgtctctgaacggaggcaaaccctttctcgatcaacagctcggccacattcctgtttccggtcgtggtttacagtttgagatgagtgtgtctttgtttttttctctggaggaaaggcaggaaagagagagaggagagagggggaggatgactcacgcgtgcgctccaccgaaccgaatggtagcacaaggcttctcatcaaagtcgccttctttcggcttgacgtagtcgatcgtgacctggacggactttccgatgagcttctttcggaggaacctgagggcgagcgggtaagcgattggttttccggggcgagagagagagagagagagagagagaaggaaaaaggagaaaaaagacattcttggagagaagaagaagaaagaaagaaagaaaaaaaaaccacatactccttggcttgatcggcccaataagcctgtttgggatccgacgctctacgatgagaaagcgagatacagatggacgagaaagatgagttaggagtgctctgaaaggatacggctccgatgaatgtgtgtatacaaactacatatgggatctagaagaaacaaacctcgttcccctggtggaggctagctggactctgagctcggtggtctgtcctttttcctggacgctcacactatcggcgctccagatcctggtgacggtggcgtcgaacgttcggagcatgctttctctgtgggcgtcggctgctttgcttccggcagagccgttgacggcggcggcggccgctctggctgccggtccggaggtgggcacgtagttttcccagacacctagcttctttgcctgcgccgccttttcggccgcacgaagcttgtccataccgccaaaggaggaaaggaggccggcatgccagtcgagcactttggccaggccggcggcgacgaggatctggctgatgtcacctgcggggtgttgggcgagaccgaagaaggtggaggacgtggtgggaggcggcgggggaagga

SEQ ID NO: 598 - DNA, 599 bp, Xanthophyllomyces dendrorhous
gcctccgatggagaccggggaggagaggaggatgaccttgatggccctttggagaagtcggctctcgacaaagaacttgctctcttccgaaaacggctcgccggtctctgttgatgatggtccgtgggcggaggcgttgactctgggtgctttgattccggcgaggttgaggttgacgaactggtgttcaccctggaggagcaaacgaattctgagggagcttccgtctcggacgttttcgacgattccgtcgagcggctggcctttgtattcggagaggaaggcctgggagtctcgcatgtgaaagtttaccaacggttggtctcgctggagaccggcgtggaggccgatggcgtttgcttctgcttctgcctggagctgtcggagggcgtcctttcttgcggtttctgcggtgtcctggttggccggggagtctctgactgtggcccaaccggcggagacgaccatggaggagacgtctctgtttggcgcgccctaagagggggggggatggcagagaggagaggagaggaagggaagaaaagatttagaatggggatgataggtgattgtgaatacacacacacacacacacacac

SEQ ID NO: 599 - DNA, 683 bp, Xanthophyllomyces dendrorhous
cacacacacacacacacacacacgcttacctgggttgctccggggatggtgcaggttccgtattctctgatgacgtcggtcgagtagacgccgctaccttcggccgacttggacttgtccatcgagtgaaggacgaggatgctgacttctttgccgacgaggagcgttcggaggaactctctggaggggaatgcgtagggttcatcttctcgctgggaggatcccattcggggagctgtgattccgctcaagtggaggattctgggagaggagcaggtatgggatgtgtgtgtgtgtgtgtagatgattgttagtgaaaggcggagaagaaagagaaagagagggagaaaagtgtgctggagagagctgtgttggaaaggggcgtacctttccttgggagtttcattctttggtccggcccgaccacgtaggatcaaggtgtctccagagaggacggctggtggggggggaagaacggagcgaggagagcagcagagaagcagagaagcaagggaaagagaggagattatatgatataaaataaaccggagaggtcgggcgatggaggaaagagcaaacgagatggaaggtgagcgtttggtttgttggagcaaaaggagagaggcagagaaatcaaaatgataaaaaaacggatcttgcctttgacgatctgtatagaagag

SEQ ID NO: 600 - DNA, 363 bp, Xanthophyllomyces dendrorhous
agaatggtcacgtgactgagcaagccaagcggtggactgtaaccaggagggaaccttgagctgttctggcgagtaaccctagcggggtgtgtgtgtggttgtgtgtggatgtgtggatgtggatgtgtaagagacagagagcaaggaagagagaagagaagaaacttggagagaacagatggagaagactgagcgaccagagcaaggataggagagagagggagaggagagagagggagaggagagagagggagaggagagagagggagaggagagagagggagaggagagagagggagaggattgagagagagaggattgagaggagagacgactagagaagagagagagagagagagagag

SEQ ID NO: 601 - DNA, 531 bp, Xanthophyllomyces dendrorhous
cacacacacacacacacagaaaagacaggcatagagagacatagtggagtggagtggagtgcagcacagactagagcaatacactacagcacactacagtatagtcaacacacactcactcgctatgcttgaacctcggccgttctcgctcgccctctgtgtgtgtgcgtgagtgtctctactgtagtctctctagtacatcctctctagtgcatcctctctagtgcatcctctctagtgcatcctctctagtgcatcctctctagtgcatcctctctagtgcatcccccctaatacactctctctaacacactctctctaacacactctctctaacacactctctctaacacactctctctaacacactctctctaacacactctctctaacacactctctctctaatgtctttgtccgtccgtccgtcctaatcgttggccgccccgcccagagccgttgccgttgcccttacactgttctctttgtctctctctctcttttctctgctctcttctctttgctcttctc

SEQ ID NO: 602 - DNA, 2582 bp, Xanthophyllomyces dendrorhous
ctcttctctttgctcttctctttgctcttctctttgctcttctctttgctcttctctttgctcttctctttgctcttctctttgctcttctctcgctcacactctcacactcacactcacactcccactccccctgcttgcccgagcgcgcacgcttcagtggcagaaggggaatcggcaatgtccgctgcgttctttgggtcacgtgcgagcacagcccggtgtcccatcagctctcctccctttgtctagcccaacaatgagaacgaccatctcactcaaatcatcatcatcatcatcatcaacatcaacagcgccgtccgatagaatgtcattcacccactttcttctttcttctttgtctctgtctttgtctctgtcgttctctctctctcttcttagtcctctctctcttcttagtcctctctctctgcgccttcctagtactctcctctcctctccctccccacacatatgcacacccacacccacacccacactgtagagcgcctcccatcaaacattctctccagcatccaactcgccatcggcacaacccacccgaccgcgctcagagatcatctcgcctggagcaggtcgcaccccatcctcagagcgttctaccaaccctggtgggaacggcagatcaataattcaggctggggggtgtgtcctcttttccttttctttttccttttctttttctttttccttttcctttccttttcttttcttttccttatcttctctttcccttcctcatttctcttcctccgtcccccttccactaaccaccccctcctcgacatcacttgaaccatcatccagctccccaacccagcgcccccgagtcctgtccacgcgctgtgctactacctccatcaccaaacgacctgcgccgtccaagtccttcgcccatgggcgtacgaggacgatgcagcctctccaggctcatccagaaaaaagatccctgacgatcgcggcgagtggatcgctctctgctggagcactcactctccagaaaagtacgggatctggcgtacgtcccatctttctctctcttcctctctccctctctccctctcttctcctctctccctcgccttgctccttgctccctctcggctaaccactctcatccttctcacagcacctctctccaaatctggccagacgatcacaccgaaccctctactgtccgacacgttcctcccactgaccccacctccaccggcgtggacccatcccgctctctccctgcccacacaccaagcccacaccacatccccgctctccagacacccgacctacgcccatcagctcgcctcctttcccgcccgagcagagctcgaggtcttgttcctatggggcacaccatcagatcactctctcgaccaccacaaaaccctcccagccggtcaagccgaatgggaaaaaggaagagccctcgtcagagtaaacaggcaggacggccgacccatcaccgtcagagatctatggcaggccatcttggatttgtaggggttcttccttccttccttccttccttccgtgcattggtaaatattgatcaaatcgcttccgcttcctattcctctgtctttttatgtactacctagctggacgagccctctaggatggcaagaaacgaaaagacgtaagctttcttccttctctcagtagcaaagcctcgctctccgtacccgtccttcctcttccgcctcctaatcttccctgctcttctcattccctttccccctccccgaacggaaactcgctcaccccgctcaacgtgcccaatcaagtacacgaccggttccctcatttggatacctatctctcttccgatcgccctaccaaaggcgagatgaacggtcgtctgacaaagattcagagagataaccagcgatgggcttggctcggaaactacaagtacgtttctatgtctatggttttttctttctttctttcttttttctctccacagaagggcggctctctttgttccccttccctcacaaccctccatatcgtgcttgactctcactcacacacacacacacacacatcctaactgcgctcgcgctcgtgttcacccatcccgaaccccagtgtgtttacaggtcttctctccgccatcccgtccccggcatcaagctcgacaccgagagacaggttcgtcgcctggctgatcactccctccgagctcgcacggtttcacgatcaaggggaagccgagcaactcgctgtcgggtcgaagcgaaaagcccaggatgacgccgaggccgaccttgatcttgaccttgaccttgaccttgacaacagcaaagataaaggcaaaggtagaaaggaaaactcgggtccgacccgatcccgacctagaacgcagatgcaacctcaagcccaacctcaagcgcactcgaaaccaaaggcccaggtccatgtaggagatcagatctggaggaggatagactcgacgacggatgaggctgtcagcggactttattagtatcttggttttttctttctttctttttttcttttttcctcttcttccccctattctctttcgttcgtcattc

SEQ ID NO: 603 - DNA, 1561 bp, Xanthophyllomyces dendrorhous
  misc_feature (324)..(333): n is a, c, g, or t
gttctttttgtctgtctgttttgtttcttcgtctttttgttcacatcccccatgttgtacaaccattcgtcctgttctccccgcgcccctctactcgatacacatctttagtacttctcgatctgtccttgtttcaatccttatatgaatatacaccaaaacgaagactcggtcacaacgacagactatagaaaccaacggtgggcagcttggctctccttttctctgacggattctagggggggcgcaaagaattgagaaaaagactgggcggtcgtgcctatcttgatctgaagaagaagggaaaagaaaaaaaaaaaagannnnnnnnnnaaaaagaagagaacaaacacccccccttggcacaaacatcgttttctctcctgccgttctcgtctctgttctttcctcccccctcccccttccctttccttctgcgttccgctgcccgtcaatgtcaatgaatctgtgtcgctctgccaaagaaacctcccagatcggtaacccaaccgctgttccctgttctctgttctgtcaatttttttctgtcttgttgtctctctttcgttcttcccttctttctcttcattcactcctaccccaccatcactttggattgacttgctttcactaacttgatcttcactcttgatgtcggcacgttgtctcttgggttgaagcaatcgctttccttcgtcgtcgtcctccattcccctgctccttctccttcatattcttcttcttcttcacgatcctcctgctctttgactctcgctttctcttccgagtgttccttcatctccacttatacacacacacacacactcattcacgacactcgaattttcacgtaaaaaaaaaaaaacaagcaaggattgcactcaagttgactctcacaaggacgacaagacgggacacacgagaagagaaagagaaagaggaaagaaaaaaaaaaaaggaaaaagaagtggtcatgaattcaaaaacgccgagactgagccatccgattttttactcggcctgaacggcggggaactcaaagtggacgtcctttccggtaagtcgtcggtagacggaggagaaggctgagcggttgaggaagaacgaacgaaagaaaggtgaatcagcatcggaaaggagaaacacacacccaagcaaaccatgtatccatcccttcctaccgtcccccgtccctccacacaaggccaacaaaaaaaaacacaagacggggacctactgtcaagcttgtactcgagaaggttggagtccttgttgtcaaggaagaccttggtgagcttggatccgtcggtggaaactcgggttcgtcgtccggtgatgtcggaagggaagacgaggtcctcgaggatggcatcgtggacggaggtcaaggttcggcttcggggtcggagctgcttgactcgggagtttcgggtgggctttcggagcattcgtcgctgggcgaggaagacaatgtgtcggtccgaaagcttcttctcgagctctcgggtgagcctagtagtcgagacgggtacgcggacgaggaacgaggaaggagtagaag

SEQ ID NO: 604 - DNA, 65863 bp, Xanthophyllomyces dendrorhous
ccttcaaatcgtcagcagcagcagcagcaacaacaacaacaggaagaacaacaataacaacaactcctcttcaactaagtcaggggttagttttttgaggaacaagacaggcacggataaagataaaacagagccattccactgaagtcttcattgaaagactgtagcgaaaagcgttctaaatcagcatgtgttagtgagaaatatcaggatgattgctcaacaagagctgaatgaaaatatcgactagatggttaaggaatgtgaaggatgcaggaaagattgagtgtcgcaaaagaaaaaatctgaccgtagggtgaattgaacacccgtcgtccgcgactttgcgtttcatttgaataaccacaagcggaagtactgaccactatactatacgatcttaacggtttgaatcagtcaataataaattaattttcaacatgtacgcacatattgaagatatttaccgaagtcagaggatatcaagtggatttttcgttctggcactcgttcctagtcatatcctcactgctttcccacagccatatacacaccacccaggtatttcagtaaaataaattgagaaaccagggaatccgctaggaaccttatagctcttcgggaagagagtcttgggactccgcgcaatctgaatttggaggatgatgcctcatgaagaggtaacaaagtacagctgaaataatgtcaaggctgctgaacttccaacgaacactgttgagaatgaccgcaagaccgttggctggctcgatcactctgatgatcatgttttatacctgacacagggcgttcagatgaacaccgctgagattcgttgcacgtaactcgatcaagcatatcttctctgtctctttgtcactttgtctttgtcactttgtctgtctctatgtctccctaaaccttcatctctttgtctcttcgatacttgctgtcagatttggtggaataaagatgtgaacgcatcgcgcaacatgctgcacctagccctgcaccaggagaagaacgaaggggcaagaatgccgggctttgacgctgtttctagtgaggctgatgttgaggctgacacaaactgaacccataacccatggggaccttggtggtttatggcctaaggacacccaagtccaaagggaccatgtatcgaccaccatcggctgaggtaactctcaccatgctttttgcgtataggaacaattagaagaaaaagagaagaaagacaacagatccgatcgagagcgttgcaagaacatggcgtgatttgtgcaagatcatcagaagagatcaaggaagaagaaaagagttataagaagatgagacattaaaaactctattagaggaaacgagaagtaaaagaaaggaaagcccagacaagtgcgccagagacgatgggaagtgtcaggttatcgtctaatccagccggtagatcttgaatggcaaaagcaagacaatggatccgggttaatatatccccagccaaaagaggaagagctcacaaggaaggaggaaaatgtatacgaggactcacctaaagcctccacataagcggccacacagcccacaaagcttcctgtgaacgcaacccctcttctccattccaacactctccaatcgacctgaccacctcgactgcctccacccccgggtccaccaccgtagtaaccaacggcgactataagaccagtcatccaggcggcgacgaaaccggcaagggacttgttgggcgagagaggaatgagaccgaaacacactcgggcaggtaatcgagggttgtattttgattttgaaagcagtcggccgatagtcgatgcggcggtatcagcccaggagaggctgaagataaggtgacatagagttgcaatgcagggttagttgaacaaatcaacaagctagagagacagtcatcagataggcgcacataaggatagataaaaccgcaacatctcttgggtagagtgtcaggacaaagatgacgccgacaaggtaccaaatgacacctgttggtcgcgtggagggaaaaaagcaggaaaagcaagaaaatcagatcagattcgagatcacgtccaagcacgatacacaaagagagcatatcactgtcgagaaacctaccattccacttgtgctgaatgagaaggtagagaaaagaagaagaaaacaaccgttaggatgttcaaaacacaatcaactcagtcacaaatcatgactagacgaaacaacatatcttaccctttccgaatcgcgcatgagagggccaaggtatgcttcataagtcctttaaagcaagaaaaaaatgagtaatttatgaatcagcaaagatgatatgatagtagaagtaggcggaaacagaattaaaaccgaggctaactttgcgaatactggcgatttgaaccgtatgacatcagcaccggtgacgatgacaagtccggccgataacgataatatcaacggcgttaaagttggtgggtcgatggcattgaggatcaatgtgacaacacctgagaggaaatgaatcagaagtgattggttttgaagagaatggtcagcttaaaggtaggaacgaggacgatcaaggacaaaggcggccagtgcgttgggctcaatggacggcgaggatacacgaacgcgacctgtgaaggaagagaagaacaacacgaacctatggaagaatgcaatagctttctcggaacttcgtaagtcgcccaaaacgatctcggcttgatcacattgacagcgctcgacttgagctggtccttgatagagtcttcctcgctcaagactggatgatgaccgttcgttgttgtttgaagaggcgagccatttccggatccagaattagtaccgttcgctaaacgagctgaccgacgaggggttgccatagtttgagagagaacaaaacgagttgaagaatcttatcaaagatacagtatattcttgatcaaaagagagtcaaggagaaagaaagaagaagcgagggactaatataagaaaaaaagaagtaagtctttccctgcccatgggacgattactggagagcgaaaagagaggggcgccgagggggaggggaccctgtgcgtacagccagaagctacaacacgtgcgtacaaggtggttacagctgtcgctttggttacgcctttctttttcttcaattccttgattctttccatcagcaacggcatcagaagaagcagaaagagcatccagagtatacacacacgctctgtctctttcttccagcagctcttgtactcaagttcgttttggtagcatcatccaaaggatggattctccttctcgtcggtcagcccgttcggatagtcggtcttcaagaagaacgacaaactcgccttatgcaaggtccgctgtgactcgttcgatgccgaccgcccccgtatgtcttcttgaatctgaaacgttaaggctttggcagaacatctagcttctgttgctctcctgttccgttccgttacttacttcgacgtctatcctttatttctatccataacatacctctcatggcccgctctactcattgcgttccatccaggcggccatccctcggacgtcttccatccggtcactcttcaacctgatctcgtctccgtttcgatctcctgatcctattgctcccactcctggcactcaggatgatggacctcactcggatgagaacggatcggaaaatggaagtctagaaggttctgacgggtttatgagcggagaagatgaagagggagacaaattgaacagagagcaggaccgtcgtgactacgaacaacaagtcagttcaccttttctttacctctcacctgcgctttgcttgcccttcttgagtttgcatcgtccttcgaaaacttccacaaaattaaacatgcaaaaatctcgtttctatctctcagatcccgtcctctcagacagtcagcaacttccgactgcccccgcctcccttgtcctccaaagagtggccaacagacgcttccgattctcgattcctttctgcccatgcccctcttccgaaacaaccttctatatttcaaactcaaccaacatactctccatcctcatcgtcatcccttgcatcttcacagactgacttccaatcttttatgagtcgatcgcaaacaatgccctctctcaatggctccccctcttcagtcgtaggagtacttggttccggcccgacctccaggtcacagaccattctgcaaaaggcagtgaaagatatgggcgagggcagggatggactttcttccgaagagcttgaagaatgtcggatgattctaagtcataacaggaatttgacaaccaaccatcaacccgccggtaagttgacgagtcagtgcttcgacattcttcgaaataattacgtatcaatgctgatcttttcgtttttctcaattttgatcatgttcttacttcttaaacgatgttcatagctactaaacaccaaccgttctctgcggctagccccctcttccacccaggatcttctattgtgccaactcaaaacgggactcccacccgatcaacctcctccggtctgacccgatcgacctccaacctttccttcttgtctccgtctcgattacgcccctcaaatataacttcttcattcacatcttctcctggtatcaacctctcttcatctactcgctcatctaccggcactcctcgtagacgccctatctatcttggtccaggctcgggggcaactcctaggcgacgacctgatattggccgttctttcttggacctcgagtcaaaccaagacacgaagttggcaatggacagcccggggaagagaaggcggttggataatacgacagagagcgcggatgaagaggctgaaaggaaggaggaggactggatcgtcgagagggcgttgagtggcttaggcgctgccgcttcgccaagatcttcgtccaaggttgtttcgaatgtagattcatctaccccttcttcccctttcacgttcactgtcccattcgagtcttctgttccttctactggtgtgccatccttctcgctctcaacacctcagagctcacccttaaagctcactccacctacaagcttgggccagaaccagtccatcagaactcgaacgtcgcttgcactctccacaaagtacaaaaacccctcgctggtagcgccctctccgctaaggcaaagtacaagatttgcggactccccggagggtaagaaagcggctgtagatgcaggagcgagcccaaaggtgctttcaaaaacttcaaagatgatgatggatctgattagggaagaaaacgtcaagttcgataatgtaggttccttctcccgatttctcagtatgatgtttcacagctgctaagattttcgaaacacttcacatagccttcctcccttaaatccacggttgaggttgtgtcaactccgtccactccttcggcatctcatcgacagattaatgccactcgatctgcttcctcgctcgcttctgtatcacccgcagatatcgataatgcgctcccttctcctgtcgtcagtgtcgctgcatccactatatacaacccatatcaatcttctgggattgttgcttctagtccaagaaggaatcctaggcgaagtatcgcggccacttctcggagtcgagccagtatgaactcgcccgctcgatcaaccttacgtggtattcaaacccaggatcaggtccaggctgagaaactcgaagaaaccaatgtagaatctacgcctacatccaagagacagcgaaacgaattgtttggtggaaagaacgctgggtcaaaaaggaaggtcgatgaagacgagacgaaagagggagataatggagagcacgacgacgacgacgtgctcgtgcttgatgatttgcgtactataaacaagccgctgacttcgatgtctagtccatccataccgaacccttcgtggacgaccgttccctccaaggtgttattcgcaggcgatatgtctatatccggtgaaaaatcgaagcaatctgacgtccagatggatgttgatgcctcacctactagggaaacattgaacgtgctgaaaaatttggagtcaccagcactgaggtcatccaagtcaagtccttcaaatcttgccagttcgatctcatcggccgtcaagcaaagatccataccagaaagtcttacttcttttggcaagactggctctttcggacattcctctggatcgtctgttaaagttgtatccacaactgcaccaaaagcttcgtctccttcgatcatgaatggcacccgaagtaaggatccgcgaacgatcgcactcgacactccttcgtttgtccttccgattttcaacttccgattcgccgcccgactttctccattacctaggacggcagaggagagtaaagcgttggtgaatgcttcaaaggtcgaagctgatcgactaccaaagattgaccttttgagcaacaagaccaagaagaccaaagtcgccttatcgtcctcttccgctacaggaggaggctttaattgggcagcagcaggcttaaaaccaacgacgacgacgaccgataaatggatctgtcctacttgttcgatctccaacactttgagcgcttccaaatgtgtagcatgtgaagaacctcaacctggacccaaagcccctacacccatcgctagcacctctagctttgatcctgtctcaggcacgaagacagaagcaggggtaggaggaggagggttcaactgggcggcagcaggaatgaagcgcgtcactccatcgaccgacaaatgggcttgcccaacatgcggtattctcaatggccttactgatttcaaatgtctagcctgtgaggaacccaggtctgcctctgtttccacctctatacctacagcggacgttcagctggcggcggctgcagcgaagccggctacgggtggtttcaactgggcagcggcgggtatgaaagccccggagaagaagaaaggttgggaatgcggggtgtgcatggttcaaaatggagaagctgattcggcttgtgtgagctgtgaaactaagaggggttgaccgagcaggagtttctttcgtttctttcgtttctttcgtttctttcgtttctatcctttgatttcctatatgaagcgttggttgtctcgttgtctatgggatattgaaaatcatacttcaagggtcttttgtgaaaagaaggaaagtaggatctcttccctaagagttggaagagagatatgaaggaaagaaatctagatttcaagtgttcatcgatcacgacaaagacactgagaaagaagaagagacagaaaccgagatcgtatatgagagacagggaaaaaaatgagcgaggagaccaagaaatgagttgtgtttagggttaagatttgaacaatctgtggatgagtttatgattgatagggctgcgagtaatcggaagaaaaacgacaagaaaaaacgatatgggtgtgacagcattgggacctgatcagagtttcacccggttgtctcaaccaagacaacagagaggaacaaaacaagaacgtagaaggggaggtatgtcatatccggccaagcctcaatcagagctttccattttgccaatcatccaaaaacgcagagagtcgatccttgacagatccaaagtcatctaaagccggtcggatgtcgaggttgaagttgggggatccatccggatcgtcgggagcagagtagtaatcgataatgtatcggtgctcggtggaagtggctggccgtctgatgatccagtcatgtctgtcgaacggaggctccgtgctagagagttaagacaaagcggatgtcagttatcgagactgatgacgaaagactaggactacgaaactaacttgtaagagtcggggaagaaataccctaaagtaaggtatagttgagctttcgggcttaacgtccccggtcttcctttaaactttgtgagttccacctctgggtactcatcctctggcatacccaacctacggccttcccaccgaaggacctctctccaggcgagctcattcagaacgttgtgaacaaacaccatactctcgatatcttcttctggtgcttcctgaccctttcgaaggagcgcgttgtagaactgctgagcagaagggtaaacccatcgtttggaagccggatcaatcgtggggtcttcgtcagaagtgagcgttcgaggaatagttgaaatttctcgatcggtcgagagttcaatctgttgagaatcagaaagccgagactgagaaagctcgggcatctggttcaatggattcaagtcggccaagatgtcagtcggaggggtatataccaagcgagacgaggtggaagaagtggtggtggaagacatagaggaatggtcgatcggacaggcagcagcccctttaggcgcagaagaagtagaggtgattgtagaaactggagccgaagaccctttgagcttggatggatcgtgcatcgggcaacccgcaggaggctctcctgacattgggtgggcagccggacgtggtggagaaggagcaggtacgggcgtgggggcactcggagcgaaagccggattggcgtgcatcggacatccaggcggaggcgccttcatagacccatctgaggttacggcaggtgagatcggaaggaagtgtgaaggaggaagagaaactggatgagaagatgactggcccattgtgaatgagtgtgcagctgggtgtagggatgtgtgtgtgtgtaggtgaaggtcggtggatgagtgagtttttatgtctgttcgtagtaaaagacaagttgggtaagcacagaacccaaaaagatttgacaattaaaccacatgcacaaacaagacacaccgaccaaacagcaaaaggcttaacacaatcaaacaggatgattgtcaagaagcaaagatgaggtgagcaaaacgttgagagctgcagactttgattgagcggcaaccggaccaatcggataaaaagcaaaatgtcgagcgaacgcgccgtcatccgttggtggcgtgtatacaagctgtgtatcacgtgaacagcctggctatacaacctgtgattctgttcttattcggcaacctcattctccttctacagctgatacaccagcttgacaacttgcagtagccatcaacagcgctcgtcttgatgccatatagaagtttcataccagcatgctcttatcaatattgatgcttatcctcatgcccgcatcgcgagttgtgtttatcgtacgggtcgtaaagcctatgattacctaattctcttcgctgacataatcgtttcctatccaaccttatcctgcctacgtggttgcttggttggtgtttgataaattgtcggaatatcaagagtcaatgtggagattgaccactaacttaaacaatcatctccattcccgtcgcatccttcctagaactttcggtactatgtctgcaattcccaatgccgcaaccgccaacggaggacctaaagccaagcctactcccgctccgaaggtaccatatcaactgactcctgaacagatcgcccggcaagaagctagaaagaagcttaaagcacgaaaagcagcagagaaaaaggatgaaccactccgatcaaaggagcagatcgaaaaaggaaaatttctcttgaggacctgggtcgatcttcagcagggatctcaagatcgtcaacctgatgatgctgtcagagtgatgagttggaacgtacgtccgatcatatgggatctaaagaaaatgcctttgagcgaacaacaacgtctgatgatatgcttcttttgcttctcagatcctcgctcaaacactgattcgtaggtgactcttcgcttaaagttgataagaatgtttgttactgtgagcaaactcactgaaatccttgcgcgtgcctcatcgaacacaggccgagatctcttccctggatctggtgagtcctatcacattctctatgatatgcgtttaacatccttactctgaaaacaatggctgatctgactatcaacgcattcttcacaaagactgcttgaaatggaccgaccgagaacaaatgcttatctctgaacttgacgcatacgctgctgatattatctgtcttcaggtagggcccattgccttatcggtttgaagttcagccgttcatttgtgctaactgatttgatctgtcgttcttcactcgcctcatttaggaagttgaccggctagagtctcttatacctcatattcccacccacaaggttactaaagccaagggccatcggaagcggcatggacttgtgatcctccaccgagatgcactgttcgagaagctggcagagaaaaccatctatttagacgagttagagcccagagattcggcaacagaagcggaagcagaaggaaaacctccagcttggaagcgagggggaactagagagaccaaaaacatcggccttttggcctgtttgaagaggaaaaatggaaaaggcggtgttgtacgtcgcttcatctcattgttctgtataccctacatattcttacattgatcactgacctgtcttttctctctctttcagattgtttgcactacccatacattctgtaaggaagttattctacatcggccaactgctttctttctcttttgacaaatctggcaactttcatcttctcaaaatagggcatccgatgtatttatatgaacgaaccaggcagctgggtctcctcctccgggagaccgcccggttccggaaagcgggcgggtgggaagactggccttgtatcatggctggaggtaaacattgtcgtcattcatagctcaagagtccatgtcacttacctcaattcttcatgcgcaccctctcttcgtctcagatttcaacacacagccatttgagccttcgtacactctcctccgaaaccccacttctcccttatctcctacacaaatagccgacattcaaaattcttcggtcatacactcctcagttatcaatgttcgttcgcctatccagttagacaattcttcctctggaacaccagagtttgtatcgccaaattccaaaccaagtgacttatcagacgatgaagagggagatagagagggcgaggccgagaccgaacaaggcggtagtagagacgcaggactcatgaagggctgtcgacgagcaaccgaacaagatggattattatccatcgacgaacttcgagcactctttgcacagtctggcatcgagccgggttgtctactcagtttgtatgactcttgttctggaattgagcgtgcagacggaaaggatccattagagggtagatcgttggaaagccgacggtcagagactgagcagaacgagaagaaagaaatcttgggtagcggtgaaccgaattacacctcctacacgccgtgagtactaaagcatatcatactgtgttgacccttctttagatacaaagaaacaactttaactgactagaaggcttcttcgctatgactgtgtaattgtttgtgggatctgaactgataggctatggcatcttaccttaggtagagttccccttgtttcatctttccttctgctctctatttataatacaccaacttacccgattcatccctttctttttcttttctggaaacagattacatattcctccttccaccagcgacaagaccggattctccaccaaaagtaattcgatatctccttccacatcaagtctcggatttggagccagggttacctcgaaagggaatctccgcctcagatcatgttatagtcgctggagatatcctcttgcacgaatagaacggaccgtccgcgtcttgcgaaatagaatggaacaattttgggatggtaatgagtatttctctcatggtcgaaaagggccaagagtcggatagaacgtagagattgaagactgttttcgttcgtatatattgcatgtgtgtgaccgattccttgactgagagaacatctgcaaagaacttgaagtcctggaatgaattcatacagatgaacgaatgcaaagggggagaaacaatgataatagattaaaaaagcgaagaaactatgaggagacaggaagacgaaaacttatggcgaagaaaaacgaaaggttgaaaagaaacaacagatcgaacgaaacggattccagagagacccatctccgataaaacaagacaagaaaataataaaatagtaagacaacgctttatgcgctttgaatcctccggcctgttcgttgtttaattagtcaagattcctccaccactgccacctccagacaagaaccctctaagtccaaggacgtgtctcacatcacttgtgaaccgaagactatccaatacgggcaacaggtcgagtaaagcctggtcgttcggatcagagaaccaaccgtctatcggtatcccgttggctgtaatggatgaggagtccagagagcaagactagagtaagtcagaagattctcgaccggagagttttggaagaaaaagcagggacaaagagtaaaaagactaccgtacattgatggaaagcatatgacactggcgaattgtcaatcaaggcgaccccacctagatcttcttctaggcaggcaagatctttgacgtacgctccgttctgatgttgaacgcacgactgaccgaagatgagcaagacggaggaaagacgatatcatcatcgtatgattagtctctggaaacactgaaatggagaatgagttcaacgctatacatacctctcgataaagtcgtttggcaaacatatttcgaccgccatcaagccagtcgatcaccgggtcggcatattcctgcatagaagccgtgaagataacgagtgtgtaccacgaagagacctgtcgaacaaaagattttgattttgttagatcaagcttgaccgtattgatggtatgagcgcgaatggactgagaatttacaaaatgcataacataccttcttcaaaaagtaatccacatagggccgtttgtacacatggtaaactgtgcttcttccgcccaaaaagacctcaaccatgtgtccttcgcctcttcctctgccacctccccacttgccagaagtagaaacgatcggtctcgaggttgaatgaataagggtctcgtctaaatcgaggatgagcgtctttggtttgtggaatggtgtcttcttgatccggactggcggaggggtgatatcgaacgtgttgatacctgcaccagaaccaatctctatagtcgtagagctcgatagcgttgaaacaacggaagaaggaggcgcaaggaggagactagattgttggccaaggcccgacgcgagcgagctattagagatagacgatgcagtgagaagtgaggatccaccataaggattcatcaacaggcgtgatttctgaggtcggtcaagtttcgaatttgaggaaagatcatctgatacgggtgaggattctgtgattgatatagatgctgatgagtgtgtggacgatgctggcgtctgtttggaaggtgttgaaggggtgggtagcgatggcgttgtcagtgtagatgaatgcgatgtggatgtggataatgtattggggtcaatggcctgtgtacgaggatctatgaatgacaacgacaggtcggccggattttccaccgaaagaggaggcactcccaacgagttctcgctcattcctgaactctttccttttcccttctctcttcttcgcaaaggagttgattgactgctgccgatgattcgacaccatatcaacagaccgagcacccatgaccaaagcttcagcacaattcgaaagaacccccaacgtctcggtcgaacggcccgttttttccgagaattcgattcatccctagcgagagtctgttggggagagacagatgaggccgatgaggataacgaagagccagatggggatgccaacgttggtcgacgtcgaattgaacttgagcggcgggcccaaaggtcggtctcggaagacaacaacggcgatgaagaaggaaccggtgaggaagacggtgaggccgtagagccgaccgagatggatgccgacctggaccgagctgcaagaggggacgaaggcggatgatggggtaggacgggaggcggtctgaatgtccgagagagaaacctatcgattgaggctagtgaattcatctgtgctactcttcaggcaggctagacggaagcaggaagtggaagatgtcgaggaaacaagctagaacggaatgcgggaacgtgtgttgatgggggcagggaaaagaaagcagccggtgattgccgacctggagtcccgactacttttgtcaggtcttcgttttaactctgcagactacaaacgagcggatgaaggctgataccaacaaccagtcaaaattctatacgagcagccgagtagagaagcgaagatgatagcaacccggagtggaaaggaaaggtgatgatggccaatgatggtagcggaaaggtttgtgttctgatctctcaagcactggggtgagagtaaccccagccgggtccgccggcggttagtcacccgtatttcttagccggtcgttctttaacatccttgttcactttgtcaatatgttgtatgattacagcctcgtcagtgtgccgagaagcttatgaatatatatatgtgtttaaaaggaaaacatgtcgattgcgtccgatagcagttttatgcgtctactccttcttggcattccgctttccagcggccgcactacttctcactcgactcttctttgccttgaactctggcttcccgcccttcttcttgccgaacgatccaatcttgacactctccctcttgctcgacggcgccgcaccacctgctccgtgctccatagcgactctgttcttcttcttggcgagtcgtcgggcaagtcggtcggcatcctccgatttggcggcctttcgatcctccttcgagagatccttcagcttctcacccaacaacgggttgccctttggcaccggctgtatcgttgggtaaggcgttcgggccggtttcgacacggcggtgctgtttccgatggtaggagtggtggaagcggtcgaggtgcttgccgtaggcttcttggaaggaagggttttgcatcgctcagctcgaagcgttcgtttgctgaactgaagatgctttttgtcaagcgagaggacaacgtcgacggagtgtcggtccttggaaagaaaagagcgaacgttcaagaaagaaagatgatcagtttatgtctggaaggaagagtatcggtcacatacattcacactcaatcaaaacaacagatacgaagaaatatactcactcggaaggatacgtaggcaaaacctttgcctaatccagtagccgcgtctctgatgatccttacacctccaacccacctttcatcctcaagtactgcgcctccttccgttccattctcgattccctcagtgacgacccctcgctcctccctcatgaccgcttcaaaaaatgcccggagatcttcctctttagcagccaactcaagattaccgacgaatacactcttcttgggatccgagccggccacccagagggcggatgtagctcgtgcagtcgaagcggtcgaggcggatgctcggatcgaatcaactcggatggttcgttcgaggaaaacggtgccattacaggtttgaactgcctgagtggccgcttcgtatgggttcaaaataggcgcaacattggctgatcggtccggagcggggtgttcgaacacgatgtaggcattgatgtgatcgacttcgggatggaactgttatgaaaatatccagatgatacaacataaatatcagaaccgtgtcgagcagcacgaaaatctcgtgaaaatattggatcaacgatacaacgtacatcttttttgatgaaagcaatcttcttcttctccttaggatcctgataaaccttgccagcatcggcctccttctcctcgtctttcttgccaccttccttctcctcagcttccttctctctccaggtcttggttcgttccttctgtcgtctggctctggtaatctcctcagcttcatccttagcaggcaactcttcagtcggagcagcaaatgcggctgaacggaaccgggtagagtcgatcttggcattcggaactcgagagaggatgtgctgatggagttgatgaaggtatgactagtaacgggtagatcgaggcaaagactcaatatacaagaaacacgcacaacagatacgaaaaaaaggaaagaaccaagaaactcaccttgttcttagctacctcgataggcaagtttccaacaaaaattgttcttgaatccttctgttcagccgtttcgtccgccggaacgtacttggtcttgtttcgtcctcgatccctctttggcttcttctccctcagagactcatggatcaaatcttcctcctcctcttcttcctgctcttcctcttgcaaatcagttttctctgaaagatcagcctcgatacccttgatctcagtagattctactttagaaacagagtcttcaaccttgaatttcttgcgctcgtaagcgccctcaaccctatcgatatcagcctcctcctcttcttcatccgagtctacttcaacaaccgcaactttcttttccgagacctttttcgatgaaccggaattaacaggagcagtagaagaaggatcttgacgctttcgcttggctggttgagaggtagccggagcgtccgtagaggattccgatgttatgggctgaacaggcttgggagtgcgcttagctttgggagctgaagccggagctttcgaaagcttttcaaaacaaacatttttagaagactccattaagatcatgtgcttctgacaggctttcaacagcgtaaaccatgcccagcaaactcactgtagacttgaagagagaatccagctcgggatcagcaatatcgaccttgggatcggcttcctcctttgtggaggaggcctttttaactttcttctccttcttcttgatgtccttcttaggctttgagccttcaggttgagatgactttgtggggtctacagaactagacattgcgtcaatgagcaagcaggatgatgatgatgattgtatgaatgttactcgaaggtagagcggagaggcaagcgaagaagtttatctgggttaaaaggttgaaattcgacgcagcagatcacgtgattatctagcggtgctacacagaagctacaaccgaacgtaatacccttgagagttttttcgtaatcaaaacgccacaactcctaatgcttttccgacccccttagacccgtacgggcccctcccgagtttatacccaacgacgtccatcacaaaactcatcactagctagagcattggcaccatctggctcgccatctgttcatcaacaccctggttaagatggcatacaggcaacagaacacaacatacactaagccggcccaaaataagactctcagtctggacgagtgggagtcaaatgctcctcttgggcagacagaactcggttcggtgagctcagtcagaatctcgtgcgcccagagacgactgccgaccagcctcgtaaggattgtttcaattgcatcattcttctcttatcaggcgatgatggtgtttgatggcaaagatgatgataatgagaagctactatcttacaccggtttttcaatctcttcatagaacattgccggcaatgttcattcagtctctcgtccgtctactcctcttgccggaggtgggcccaacaggtcaaagcccgtacacccgtctcttcttcacgccgtgctctcaccttcttctcttcgatcccttccttctactcgacctggtactccgcctccaggtcatccgtctcaaagtggatactccacaccgccagctctccatatatcaaccgctcagcaattctatgactggttctccaaattgactgcctcactcgaacacgagcaggacgcgctgtacagagaccatctcgccgagattgcagtctatagagaggcttgtgaagtgttgatcgaggaatgcactgatgccgaacgggtttgtgcagagatggaagagtgctttcggtttgtagaggagagaagtaaaagtcttcagttggcatgcgaggagttgttagaagagcaggtgcgaatcttcgctctccgtaatatatcttactccttaattagctctcatgacctgttgttgatcactacagaaccgactattggccacgtctgaagcactcaccttccggttgacgtacttttcgtcacttgagccggccacccggatgctcaattcgccaggctctcatctggtcaccaacactgacttcttaccaacagtggaccggatggaggagtgtctggcatacctcaaagcgcatgtacgcaaaatttacctctcttggtcaaccttttctttatatctctgtacaccatagattgacaatagacgcaacctttttccttttggcgacgtagcgcgactacaaagacgcagaactctatatccttcgatatcaacaatgcttatcaaggagcatgacgctcatcaagatctattcaatctcacaattcaacagccttgggcaggatatctccaaacgtataggtgaactcaacctgtcagaaacggcgctccagacgttgctataccaaaagccccgaacagtagcctctcatctccggccccttctgctcgaactagagtatcgatcgaccaaccatcgaaagactacaaaccgaatgatcgatccagaggccgaagataccggaccttcgctcagtgaatgccaggatgcctggttggccgtcaggcaaagcttgttggcgggcattgtaagggcagaagtgttgaagctagatccgagcagtgaagatctggttgatctggttcgtcaaagttgtttactggtagtcctcttgccctgttgtctgaaatgacgattgcttgtttgggaactggataacagacacgtgcaggatgtgggtacctgaagagattatgcgcggaggaatatactttgttcagacaatttttcgagacaggagacgatcgactcatgtacgttttcaacatctcgcttcttcctcgaaatcttccttcatgttcgctcatggccccggttgtctatttcttgcctaccaaacgaaacagaccattcttggagacattgtgtgattacttatacgactacctacgcccccgaattttacacgaaccttctttgactgtactctgtcaagtctgtactgtacttcaggccctcatggtactagacacaatagacgatgatgacgatgaagaggagaaccagttcgacacattatctccctcttccaattacttctctcaggaaccgttaccaatcgatcaatcggctgttgctcccttacatagtccaaatcacattcgacagaacagttatcccggcctcgtttattctccatcattatcacaacgatccttccactctccaaaatctagattctatggaaaccccggagaaagagccgaggcgagaactgagaggaagagacagctcagttcgatgttgagtccagtcttgatggatgctcagactaggcttgtgttcagagctcaggcggtcgttcagaccagtgtaggaaggttcattccgggcgagaaggatttagactatccgggtaaaatcttggcaggtttgtgcaatttttctagtcttcacaaatcctcacatgacaaagagaatgctgatgcggcagtcatattgacattcttctaccatacggctgtagctaaaccggtagtatcgtcgagacaggctgtaaacgagttgcaccaagaggttgagaacctcaacgacctttcagaaaaagggtctgatgaagatgatgatggagctctgttccgattgccatcgagagaagttcaggaaacctggtatccgacgctgagaaagacactttgggtgcttgaagagctccatttctttgtagacgtaagtaacttgtccttatccatcgtattagctccctgttacaacatcaaattgacatggttatccctctcatctgtttattggtgggtgctggcttacatacgcagccggcaatcttcgaggacattgctcaggaagctatcttgctctgccgacaatcgctcgatgcagcctctgttcagatttcggccaagcaaggcaaagctgacggtgcgctgtttaagattcgtcatcttttgatcctaaaggaaatgatgggaagcgttgagatgatcggaaaggatttgggtggtgaaatgcttggtgtgactggtaagtatttgttgttcactggtctcgcgtacaagtacaactcaatcattgtctttccaattgacccgaattgttctttccagacgcgttctcggctttactttcctccgccatgtcgttcttgccaagcgcgttgacatttggttatggcgggtcaaccaacgcgactcgttcagatacccggatcgtcgatactaaaatggtacgtattgtgtcggctctatatgttctgatagtctgccttgaagatgattgcccatcttgacacgttgctctggcaaaacaaacaattaaaccaacaggatctggaccgtagcttgaaagcgatctgtgaagatctcatcaccatagcatccatagcttcgaccgcccctctccaaccgttcatctctcaagcttccactttcctcgctgcctctcgtccttctttaaattcatcctcgtccgacgtttcaaggtccaaaccgacgtcgaacaaagatttgggcgcacagccgtgggccacaccagaggtcgtgttgaaactccatgatgacgttaaggaagtaatcaggaaggaagttgttgattgggttggtaagctgaggatttacttggaagatggaaaagcggtggacgttttaattcctccgatgcaggttcgtctggtttgacatcaatcactcatacagctcttcgttgcacttggtcccacatggtcacttatatctgtgatatgctttcactcatgataaaacagtctagcatcatagaatcttatcgacagttccatgagatcctccgatcagaatacgacttttctgtctcgtctgttgtatggagtccggtcaagatgtgggactttttgcgggagatcgtcgagccatccacctcgactggaagaaaacaggacgcctgattgaacggatcgcaggcctctagtatctgtggtgccattcggtccttctatgtattgatatatggtagattttagaagttgttggtgtacatttaggccttctcgttgcagtccaccggggtctacctcagatttctccgcatctgttcttcagtaagagccatatgaatcgtctgatacttcattctttcacaagatcgatcagtctcaactcgatctttaccacgccgggtttggtcttcttcccactttttgattttcctttgcctttactagaaccatagcctagtaaaccaccgggcaaaacctttctacatactgggcatgaaccttcgaggtttgtttcgagcgagactggttgagtggcatgtcgatgtgccgattgaggatttgcgagcagtgtatttcttaaacaagcgaagcacactaatagaatacgaggaaaacatatgagaacactaaaggccgtgagaaggaacagagcagaggatgatgaatgagacgaacttaggtgtccacaaggcgtaacacatgcctccgaaggtggacagagacaaattggacaatctgtcatgcaataacaattcagataggatcaagacaaatgaaattaccatgtatagttcagcatgggtctaatcttgagccaaagaccttttcccaagtgaaaatataggtaaggaaggacggtaggaacatactgtattctgtaatcagctctttcgatgcatcctccccttctagatcaacaggaggaggaggaatcacccttctcttgggatgcacccttccttcttccgtcagttttgttgccgacgtgaaattggcctttgcgtttcgtttgttattatcgttattctcgctttgatctcgaagatcgagatgtattcttttcctaggcctttgcgaccccggcccggtctcagatggggaacaggtatcatttgtgagggtctcgaaactagctcttgttctccccgaacgcgtgaatgttgatgggccggcgatagcagagtttgtagtagagcctgtggctggataagaaggagagatagctcgggtgggttcaggcaggttcgaggttgatgttgttgccgtcgatgttcccaatgcaaacgaaccgttcggaggtcgctgaggtcgaggaggaactggcagccgaggacgattcatatctgagggtgatctggatgattcagaagtgctaagcaggatggctgttgttgtgaggggtggcatggcaggaaggttgacaggattgatgagaagtttgatcgaaagagtgtatgtggtgcttgagcaaaatgaagttgtgaaggtcgattcccggaaaatcggagtggtgtcgtcactttcggtcaagtcctcattcacctcattcacccagcatagcaggtatcgctgcacccacaaaatgaacatattgctagctcatccgaggaagcggaaccataagtcgtcagcctggtgaaaccttgattcgtattctcaagaacatagattcaacgtgaaataaaatcgagacatcgttcaatcatgaaacttgtttcatctttctgtacggatatcaagtaatctttaaccaaacactctgcttaggctactcttgaccataccaccgacaacttggccgcccaaaccactcataccaaacatatcgcccatgcctccagacaccgagtttgcccatcgggctttggcatctcgatccgcatctgcaaatgtttgtcgaaagatgatatcaatattaaaatgatgactcagaattccatattccgctctgtccgatataatcaagatattaacgtacatgtaaagccgaggacgttggacaggttgaatactagcgctagcgctacgatcggcaagaatctatatccagccagacccattcgatcaaaaggatgcatgagcaagacagaaagacgtggtatcaattaaaggccgagactactcacgatacgctaaacttcaagagggatacaaagaacaagacagcccacccaaccgggtatacataaagcgcggtccaaaacagtttggagtcgactgcgttggaagcgacagaaggctgttattttggtatcattaggaaattaagatgaatgaaggtataaaactgtcagaaacaacactttcagaagactttggagtgatgtgtgtatacatacgtcgcgagactcaaatacccaagaagactctccatcttcatccacttggttccagtaccttaagccaactaaagttctgcctgcaacattctgctctcaaacaccacatagaaaacaacaagaaatcaacgcgtgaagtttcagtaattgagcttgagaatagagaggcgatatttttgtatcaggaaagtctcacccgtgtcacccagaaatccatgctaagcaagacgacaaccagtacaattgacagaacataattgtcggtaaacagcccgcagagaacgtaaaccgttatagcggctgatctgaagaagtagagcgagaggagagccatctgatatggtttttgagatatgaagttcaaattgaattcagcttgcgaatcggctccgcaaacaagttgggtagcgtcaagaactgaaacataccggatgactacttcgtttgatcatgcccactatcccttcgtctccgttgtttccttcacttccgcttcccagagaattaacgggcggtggtaatcctccatcggcctgtctcggaggtctggaagaggatgaagaggatgcgatgttacctgaaggaaacgtcctgggagtacctggcggagagtttgagtccggctcaatgtctgcggaaagaagcggtcttgtggtggattccatctctgattgactagatcctctcgttatactcttctatctagattgtctaagttggtgaaggtctgttgagtgtgtcgttcagaaagagattgcaagatgtgagatgaacggtcgggttgcttatgtaatcgaccgaacttcatccacacagcgctatcatctcagattgttgaactttcaagtagcatatctcgcttgccaaaggactgcttgaccaagatgttgtatgcagatggaggtttgaccaacgttatctatgcaggagatatgtgctcagattaagtgccaactcatgacataggcaaacctgatcctcggcgcgctctcatctatttccgatctctgtttcacctcatatcattttatttcaatgtctagtttgactttaaccaaggaagttgaacacgaagaaatgaaggataatgctggcaaagcagaagtcggcgaatgcactatgaggtccgggcgtgtatgaaagtccgatcagatgacctgataagcattctgtttgatgaacgttgacaagtgaagtgacaaaatattgtcaggacgtaccgttctttagatacagcttgaaactcggagttcgggttgacctttagatcggcgggtatagacgtagtgtcaggagatgtagcagatggtgaagttgatgtagcggaagaaacaagcggtgttaatgtcgaagaggaagccatgatctgagctcgcaaaccagcgaggagaacaaattggccagcagccgaggcgaatctgagatataaacatcaatcaccaacgagatattggaattagttaaggtgacaattattgtctctcaaacagatgcacgctgaagtgcgtctgcacggccgctcaatttatgcattgtgagccgggttcaatttggaaaggaccagaattctccactgccctctacagtttatcacaacaggcgaaagctgcatgtatgaaaatgaaaagccatgaagacaaacaaaggagactcaccctcccaggaaggcgttgtaaggaaagctcgtgactccgacgcagtaagcgaactgggccaccccgctcaacaggaaaaatagcaggaagcaatcaatgagtttgaccttagatggggttgttcgcttatatgattgaaccagagtgttgactgaagacgagagggctgaggaggtagacgatccagacgatgtagagccggttgtctttggattggcctgggcggctgcctttttgagtcccttgacggatctgagcgtgagtaagacaacaaaaagtcaacttggatcaagaacgagcggagagaggctcaatacagagccagatgacacctacgtgggtgccatgatagaatatagatctatgcgagatggatggtccaggatagatgacattcatgtcgaccagggaagatcagaagaaagagactgtaaccatagacgctcatggctatgcgtaaccagactcctccactcccgctaccttcagttgcttctatcttgtctgcgactgtgatctcccggttctctcgcaattctatctttctctttatcggctctatcttgtccattccggctgatgtttggagttcgtcccttgatgacttgctatatcttatgaacggaagtctaacctaccgatcatgaaatagtggctgactgttatttcctcatttcgttttattctgttcgaccccattcggcaaacaagcagcttctcagattaggtctggatccaattcctctatctcacatgttttcaacggatcactccgaggtaatcttctcaaagctgactgaactgatcaatatccctgaaataactatatactctagctttcgacgcttggctcatcactggcttcttggccggcttgaggcgaagcaccggattgacgtgagtaacttgcaatctgtactcacctctgtgtagttgtcagatcagacgctcaattatcaagctttgcaatcttttgggtttctcattttgtggctcattgaaaccgacgttccaacaacccatgctgcttcgcgcggggcatcgcttgtacatttctgcctggttaggccagcgatagcccggattcctaataaggaccttcagagtgcgtcaatttagtgcagccgggctcatggctcgcttgttcatttggaatcagcaagttgctagaatctgatatttctgcgtatgatatggtttgtttagaggccatcggatggtacctggaaatcggagaatatactctaggtaagtgtgtgataccgcgtctcaactatgacgtggaaatgcatcctaacactactattctgtcatcatctgtatttcaatcagatctcgcacaagtctttcttggagtatgttcttgtgactttgcttcgaagatctgctgacagcatatagaggatgttaatctcaatattttgatttctactatcctcctctagagatcgtcctttttcgttcgagatcgagatcagagcggcagatagaataaggatttagttgactttcgagagctacccagctctttcgtgtcatcggtttctttttcttgtatccactggtttcttaatctttcctttccattgttctctctctgaacttcgtccaacactcccactctatgtgtataacctcccatgctctcatgacttatgacgatttcctatcttcttcctctgttcaaacaaatttgtgtctcccatcgtaagctagcaaacaatacgaagatgtccgtcttgatttggttcattcacgagattttatttgaaacacagtaaagaaaaataacaccgccctcaggggttcctatcgtttaatctgaatcattttctctacttcctgccagggctgacgcttcgtcttcttcctcctcctccacgggcgtttgagggggcagcggtagagggcttgacgaatgcaaagtcgctgttatgcgggataacgaaattgatataagcgcacggagaaggacgacaaacaagaaaaaaggcggagaaagacacataccactcgagctcttgctctaaaagagtcgttccagtagcaccgctgatggcagcctgagcctcctcaatggtggcgtactctaccaaagcgtatccctaaaagcatataagatttgtagtgtgtcgtaagaggtagaaaaaacacaaaaaacggtcaggtgtgaagctttttgttgtgaacgcgtctttcggattcatctctttcaattttctacacgcgacagacaccttcttctaacaagaacactttctctctggcttcctcgttgtctttgatgtcttctaggagaaacatcaaaaagcaaccccacaaccgataagaatggcgaaacatagaaggaaggaggccgtaccttcacgtaacccgttcttcgatccaagttcaaatgcaaattcttgatttctccaaaatccgcaaatttatcctgaacatcctcctcagtcgcttcctcgtgaacaccagtaaccatgacgatatatccctcgattgctgtcagatggcagttatcccagttaaacgcgttatttcacgtatttattttagaatcaagtcgccaaggtcgataacaggagggaaagcacacaagccaaatcgagatcattaatcatgtcagccggagacaggcgaagagctagtcaaatcaaaagaagacgtacacctctgggccttggattccgacaccttttggtccacgctacgtgattcaaggccgtaccatacatgaagatataatgcgaattgaacaaagcatattgaagccacacagtgttagatgttaattcttgttttaatctatatcgaaccataggttctgataatggataagcatctggtacgatatgaatcaggccaaaatctttagcgaccagacaaacaattgaatgagagaagaggaggatcacgagaggaggacgaacatgtttatctagccaattgggatatcattacttgccttttgctgacgcctaaacgttgcaataaaatataatcccccgaatttaattcaaagaccaaaagagaaatcggtgagctcgaaaatatctctttcctggcagttgtcctacaaactcggatggacacaagaacaccgaagaggccaccggatgatagtttccttttcatccgaagctcgtctgtcccgccacatagaaaccaacatgtgcatatatctcgaactcactgttatcgatatccatgtcggccatcgtatcagaaaaaaaagagataaacagtggtagagaggttggaggtgatgagtttggaaagagatgatggcaggagtaattagtctgatcataggcggctttagtttttgatttattttcgattgtctcatggcacttaagtcttaacactatggggttttctcgacacaacatatatcatacatcacacagatcacagatcacatacattggattgacggctagggtcacactatgctgttttgtctggaagcaggtaaagatccaagtgactgtccaccaggcgaagtatttcccgcatcggcaacacttttgtccctacagattctctctgtttagcgcaacgcgtttggggacgaagcagagaacagagatgaacagatcaaacaaagagtcctgatatatcagattggttggctacaaaatgcaaagatgataaccagaagaaaagtagaaagaagaacgaacggaagcgaaagttgttccacggacaacgaagttccatatttccttgaacgaagaatctgttttggaaactccacgctcggctaggcactgcatggccacccgtttgatcgtctacatagccatttgaatacgaagaaaacaatggtacgattagtagtgaccgaaagaatgaacagaagcatcacaattaccgatagacaaactcacagccttgttgtcgctctcatatgggagtgttttcttcatccctatgcttcccgcttcagacggtttatcgtcctcgaaacctaacggcatctcctcttccatctcccataatcctacacctgtttcctcgcccaatgcttcccgcctaggaataactggatccgatctcgatcctttagtagttcctaatactggcgccactattgccggtagttttttcgattctgtcgaacgaactcgcttcataggttcgcgcacagcgagacttgcactgttacaattgcctgttgcaagattgctgttggtcgagatgatcgattctcgacctcgtttgtctcttgtgatggcactttcccgatctggatttcctattggcttgcgtttcttcgtagaggaaaaaacgtcttgagtcggatgcatagcaaactcaggaacctgacggggcgcaggatcgtctgggcgaggagcgcgcggagtggtagatgggttggcagacgaaagaggaacgtatcgaccaacgtggagagtaataatatgagagttgcttgagcggccatatatgatgagattggtacaatctaggtaatgagaggagtaagaaattgttagtccgtgaaacagtgttcaaacatgaaaacgcctttaggtaccaagcgtttcgtcccctaggccaattaggattccgagttgtgttcgaccatcttcatctacagtatcgttcggattcttggaccatgactgaatcagttgtcgcttgataaagttgtgtacaagaggacagctcggatcggtatatctaagccagcacacagtacaccaagaaaggagcactgcttaatcaaaagtaaaacacgagaccaatgagaagaagtatgagtcttacagccggacttttccttggccttcgactactccgtctatagttccagacccctcttgatctgtgggttttcctatacggactatgcctcctaaccggacacttggacgacctctcaagctttctagagcaagacttatctcaatatccgtcgtgaaagcgaaaccaaacggtgaggttagaggaatcgttgaaaactgttttattggtgtcacggtagtgcaaggctcttcgatcacttgaggaagcaaaggtgctcgcctcccagcagttgtggaaggtttgggctgggaagagcgataaatagatggtgttccagaagtacgtgacgcttgaccttgatctgatacaaaagttgatagggatgttgaggctacaagtgatccgagagtgataggaggatctttagtcttctccttcgtggtaggacttgcttttgaaactaaagctgttcccatcatgccacctggggtggaaatggcaccgaggtgcgatatgaaggcaattccatcaaggaaatagtcttggggcaattctaaggcgcctctccaaagaagtcgatatcctgaggcattatagcttaacgaacgagggcccgtcgagttatttcttaaagaagcgagcgatggtctggctggagttgaattggccatctggttctgatgataccacctcaactatgttcgcgtgtttgatgtaaacgagacggtgagtctgggcagttgaagaaccacaaaactcatttaaacgcatcgacgcgtcgacgcgtcacgacgcgttttgactttctttgcttcttaacctccatctctccatccgtataatgaacgactttagatctttttcggcttccttaccagacggagactcctcatcacttattaatctgatatcagataaactcctagaaactcattcagacgctaacaccgtcgccgtgcttgaaagcttcaccgaggttctagattgggatcgtgatggttcgaacgagcgtattgtcagtttttgcttgcttcttctatccattctcgctacaacttgtgctgatctacacagatctgacagacttaaatccttctacttttctcctccagtcacatatacttgcttcagcttctctcgagctcgttccgctcctctctccactattatcacggccagccgaagtccgctcactcgctaatagtttattaatcagaggggttggaacctatggaagtccgagagaggtaatgcttgctgttggcgaaagaattgaagcaatgatggacgaaatagagtaccaggaggatgagactgatgaaagtagcgaagaagaagaagaggaggaggaggaggaagccgaggacaaaagcgatgcagagaatgagagtggacaggggctggaaagcgagagtcaggatctcttagatgaggaaggctttgagtctgaagaggattatctccacgaccatgaccgctcttctgcaaccatgtctcgtccacatccactcttattcgagctgcctacgctcttgaatctcttggttctctccatcccaagacttacgactaaaaaatctttagcaacatgcatgaatctctccactttaatcccaccagtgattcagatgctaccagaatcgacgccagggttatctcgggtagtgatggaccaggtgagggagctggtagatgtgacgagaatgtgggctgaaggaaaggatgattggagtttgaaaggagaacaaaacgtgaggttatgacattctgcttccccaacagttaaacgaatagtctaactcagtttgaacatctgatgctttgtagtcaattcttctctcgatcctcacttccagtctagttcatttgtatcctaatcttgatgttcaatctgcaggttcgtctatcttcgctttaattgctgctatagtacttcgacgctaacgatcgatataaatccatagaatatgcttacgcaaatgaccgtccagacatacgcagagccggcttcggccagaacggctatcagtctgggatggactctatcttggtaagtacgtcgattctcagaggccgatcaacgcttgactaaagttttctcacgacggacactatagcaaacagcccttcggtttattcgaccgatctctccttccttgtctgcatcgtccgaatcaccaaaagctatcgacatacttcctctcctcacctcttcttctcaaggaacatctacctttgcgctccttcttctctcgcatcacctctccacgtctacgatcaccaattcagaattttttgcatcagtccctcccccctgtcctaccagtccatctagttggttggagaacaccttagaatctgggacagtccgttcagctcgttcaggcggaattgtctgggttcggtgttgtctttctgccatcctggattcttccccatcaacctcagtttctccgtcggcatctgtggatgccaaactaattcgatcattatgggatatttaccttccaccaatggcaacatcgccatcgtctatctttcgacaactgctcttcgacacgctgaagcagactctacatgctcaaatcctggactcgacaagagatgcattggctatcgttcacgatttggtgaagaggggtggagaggcaggtccaatggtcaggatcactggagttcattttttgagatcattgattgtagatcgtggcatagagggaagtgattctgagtttgaaagaatcggtaaggcgttgcaagatgttccgtttggagaaaaagatgagaacgagatgttttgctgggagacaatggaggatccaagaggagagacgtggattagaggtcctggtccgttctttcttcttacttctctggatgatttctttcggtgtcgttgatgaataatgtatctctgccgtaacacaggtccggctttcgtcgtcctcacactcggagtttaccaattgttattgaataaagatccttcttcgcttgtcagtcttcaagacctgtatttcctctcgctcttatattctgtcttcgaccctaatctgacgtatggctgcccatccttgacccagccccagactattgtcaaccaccttcgagcgcttccagagacgtacctccgtcctcttagggcgcagcttgatatccgatcaattcctaagttaaacgatacagaatcggtcgatgcgtttgaaacggtgacttttgcgctagagggtgtcgaggacgtttggaaatcatggaacaaaaactaggtgactgttaaaccggtcaagagctgtgataaaatggattggacggcatgaagcgaggcacgagattggagattgacagcacatctcgatatgaactaaagatatgttacctcattcataaatatgagtagaagaggcgaagcaataccattattaaggtaagcatcggatagagaggagtatattctattcggatgaaagaaaaaaaaacgatcgatttggccagttacagcatgattgtatgagttgtctatcgatatatctaacgagcctcggcctctactccccatgtttcctccccctgtttccaatcccattctctccttccaattcgttcgcctcccagctttctccagttttccagccctctcctctgtcgctccttagcaagagcaacaaatccagtcgggccgaaccaatattcagcatgctcggtcgggccatactttggccaagtaacggatccaccgaaggaggattcaagttgagatgtaggggcgtgttcggctatggatggagtagatggaagaataagctttgaccgggtcactaagatacgtacagaaccaagaaatgttttatttggtggtgagtccaatgtcaaaagccaaagccaattggcgaggaggatgtagatggaagatggacaaaccaggatcaaggagcggggtgatcatcttgaagaatgcctggacaagccaaggaacattgatcacgaacgctgttccaagtctttgaatcgaagttcaagaggaagatagaaaggatcgatgatgtgagtggatttcctacgcttgaacattttaaatctaaaataagaaagcagaagagctatacacttaccgctcagggtagtggtcttgcaggctagatgtcggacggcgcaagagaaaagaacacaagcgcaaagttcagccaaaacatttgatctgcataaaagaccgaacgagcgacttcaaaaagggccaaacgaacatgcgaagaactttgatggaagtcgatgttgacggagatttccctcgagcagcgaaattgatggccagcaccaatttctcgactcctgccagacatttcacaagaaagaccatatgaaatttgagatgatatatcagacttgagtgtcttctctgaaaccaaaggcaagatgtgtgaagaaaaagggcaaacctcgtggcataaggtgttcacagagcgacctgatcagccctcctagttagttagatctaactcttcacagcggctctatactttataatatagcaagatgatgagagatgctcacatcgtgtagaatacatgagcaatttgtctctctgattcggctgtattctgaagaccgggacgcatataccaaattggtcttcgctgattgtcgaatccccagacgatctgcttgcccgtttcattctccggtctaaatacaatatttttgttattccgttgagaggtgtcagtcaaaaaattgaatcattctggttacagtttttgtatgaatgagggatcaacaatcaggacagaacaacgaaaaggaaaatcgagggtgaaacgaacgagatatattcctgtgtgaattgatcgaccccaaactctcgtctccagagcagcgtctggctcaaccggtcggtcgcatccttctcgttccattttgtcgctctaagaaatctgagcaagcactcttctgacagccacatttcttccagctcatgcaaaccctcggtgtacccgagatcgatacattccgaggaagagaactgctttgtcggcagtggtactttaaaggctggcgaggcaaaatgtgctttaagatttgcgagcgacgttttctgcgctggtgtcaaaagctctaccgagaaaggagattcggctggcgccgatggaagagatgagtccgggtgctgaggaggtagatagagagacatggagatgatggtcgacggtcaaactggctgtgcatcgaaagatcttggtgaagaaatgaaagattagtcttcgcttacgtgatcatacgcgcccgaaatctcttttttctgtgttctctctcttccttgtccctcatcgtcatcatcaaaccaccatcgttctctgttctctgtgatctttctgatagcgggtacttcgtcctcaagtataaagatgacctcttatcatccggatagtaatcatccgtcttgggaagtctcgatcggtcgggatccgataggttctcataggtcggataacgccgttggcgctgatggaattccttcggataatccagaagacgaatcaaactcatccaagaaacgaaaaattcagagagcctgtgaggactcatctttttcatatatatttttctttgcgtccggctgagtttgatatatcggtattgatgaccgtcgacatttcttgcaggcgatgtctgtcggcggcgaaaagtgagttgctgagcgtatcttggcgttttcaccatcgttctatccatcgctcgtttcttctactatctattccgctcttttgttaatccaaataaagaaagcaagggttgattcgatttatcttgaattatcaaatgcgcactggatcgtgtcgtagcaacgatgcaacggctttgagatgcccgattcccgtgagttccgctccggcctgtcgcgtgtccggtcgcgtcatatgcccggtcggcttctcaaaaatgatctatccgcatgctgaaactcaacatcttggccatttgtgttggtttggactgataatgccttggttctcaggctgtagcacatgtatatcccttgggatgacttgcacgtatcaggaaacaagcaagaagcgaggtccgccaaaggggtccgtatctcatactcatcgtactcttctttcggccgaatttagtcgtggatttgttcaactccgttcgctaactgacaatcgttgtggttatggctgatctgtcaaacgttgtctatagttatgttgagagtctagaaagtcgactggccaaatcagaacagcttttagcccaggtaaatcccacccttgggacgcgtcaagatcggccaattctatgcttatactgaactcccatactgatactaactcgatattctccctatatgatcaaaaagctcaatccaagcatagacattgaagcagaactagggagtcctctcgatcggtcgtccttcgctggccaacgaacttccaaaaagatgcccaattctcctaacgaaggacaaactcattctcctaccccggatcagccgtccgctcaggtacagatctcacactcgaaagcagcagtatgatttatcttaaataagcaagctgacacgtgtgttccttctctcagccgttgaaacaatatgcttcccgctctcaaccataccaaactccttcttcgtcttcctcatcttcagccatagcgccacagcatgtcaactctctctctaccgaatctttgtcgcattctctctcagatcacccaaacaaagttccagtctccaacaatcatttcgggtttgttgaaacaagagctgcccctcatagtaagcccaaatcaggaacaggagatgatgcggctggaggcatggtggatgaggaggcagatttgaagtcgttcgcgcagctgcatcatcgagatgaacaactatttaaaaggtgagcgcttcgcaaacatcatctgtttcggggcagcagcaacgctttcggtcatcacataaaccggtttcgctttgaaataagcggacttctgaagcaatgcaatctttcttctgattctatttacctctttcatccaggtttcaaggaaaggtttgtcacaacgcggtactattcatccaataatgatatgatagactgatgtgcccgctgtcaattgtttcattcttcgggagaggagattagtcctccggattgcctttgctatttgcagccatagggttcaaatatggagtagatgcaaacagatgtaagtcatagattattggtcgctcacgttgaattgccctctaagttggccccatatcttgcgttggtatggacgtgtttggcactctatcagatggtcaggaaatcaagttgcatcggacaacatcgcgatctagattctggaggattcgttcgtcttcctcctttactcgtctgacaattcaaagtctacgctcaaacatcctgttccaaccttgggtatcttcaatagctccatgggaatctactccaggtgtcttttcctcaacttcgaaaatatcaaagcctacggaaacacctactccaaataggaagagtcttaacggagataatacaatcctcgaagattcaatagataaaccaagaaatcctcaactggaggctatgatgtctgcgaacccgttcgcttcatggcccgatcagggacttgattggagattaatcgaaggttacttcaatagcgttaatatgacactgcccttgttgcataggccgacattctatcggttcgtgcatatccctgttttcttccatatattgaatctgttgtcggaacggggggcagacatgagagattatctgttctttttgtttgtctcgatgttatcgatatgtttgagcaatagctgatttgattgatgatggtgggacttgacagacaatacgcttctcaactatacaacactgaccccggtttcgccaggatctgtctgctcgttttcgccattggatcttatcaatgcaacgactctagagtccttttcccaaaggaggatggagaaggccattatggaatcgattctgctggttggacttactgtgagtcacaaagacttattatgttttacttcgacgaatgtggttggtgcttactaaatcgatcacgagcagaccatgcgttcggacggatgattaggcatcgactggcacccaccgaactttgggatcttcaggtgtccgtggtaaggatacccctgcaatctgagttcataatacaacgattacactctactagtttttatcttctcatatgcatatttctcgtgatttttttttcagctgcttgttcaattcgttcggtttgtcaaaaattgcatacatttatcgaagcttagggttgccatctccttacctttcctcaacaactttgatattcaggcattcatctcagccaggcgcgtgttggttattagtaggtgagggattaagatatgcccaggatataggagttcatcgaagaggagtcaagaggtcgtcagatccagtagagaacgagcagttcaagcgaggattctggtggttcgttcatctgacccttctatctccgtcaaccagttcttggttctgacgcagagtagcgccgcctcacgctttcacagtctatacctacttgaacgggagttttcggcttttttaggacggccaatagctctagatcaagagtaagaatcggaatgtttcttgccctcgatagatccattgtttcgatatattgacgagatctctgcgttttatccacttttgatgcgaatctatcacgaacagtttcgacgtcggtttgccagcggaatgcgatgacgattattggcagacgggtgacccgttaactgctttcactcagccagccaatctgccttctttggtatcgtcattcgtgatgaatattaaacttcataaaatcttgtctgtagccttgactcagctagtacgttgatgccatctctctccctgccaccttcgcctatctcttctagatgatcagataccaaccgattttgctatctgtattactgttctcccagtacaacatcaaaccagtcagtcagcaatcaaagacccctgtggatgttgccgcagagctggacgagcaagcacacgaatggttgctctcggtacctgatcagtaagccgtatttgaaccatgcgcatgatagcaaggcaaaagtctaacaatgggtgtcttctgttgaaaattagtttgaaatggaatccagaccaaccggactcgatattttaccaacaatctgtcgacctccatctgaatttcaatatggtccttgtaagttctcctccagtttttttagtctgataatatggttctctttgtcgagctcatctctcttgtccattagacatatatacaccgaccattcctcccatctccaagagcgccagtatcaacatcagtcccatcgttcgtggcttgcatagcagctgctagtgctgctgcggacattatcgatagctattaccagaagatccgtgctccttaccccaatgtgttcaatgctgcctacgtgagtttgttttatctaaattctgtgtcgcatcttggacccctaaaaagaggacggtcagtaatgtgaagactcaattcattctttaattatgagatgattcttgtttcaacagactaccgcgctgattcttctcatcggatattggacggctcaaccgcttggcttgactgatgcggaccttacaatgaaaggtgtcgaccagtgtttgttttcactcgcagaaggcgagaaggtgtactttggagttggacgagctaggtgcgtttttttcaattgctttctttctaattgcttcctttttgtcggcaaaccccacaatatataacaaagcacagaaattcactcctaatgatgtaaacttgctccgcatctactattctatcaaacagagatgccatcactgtgttgagagctcctcggatagatagttcctccaacctgcagcctatgagatcagatggtaaacgtacgagcacatctgccccctctcataagcttgccgcctcccttaactcgtccgatctatccagaacttcctcccacttgaatgcgcctcttcgctcctctcatctgaaaggcctgactgccgagtctgctgaatcttccgatcagccttccttccaccagtccctctctgatcaaatactcaattcttcgtcatctgatacgggacagaaatctcgacacatagcatctgccgccttaagcacaacatccaatcctgctttcacccctccaatattctctccaggttcgacaggcagcatgtatcatggatcaacgccggacctaggccgaggtggagggccagcaggttctttccttggtgtatacccggacttcttcagttcgaacatggaaggcgaagatggttctgtggaccgaacgatgagcctcttcccatcaggagatgatccctgtttcatctctgatctctacccctcagaacccaatcggccggcccaaccatcggctccagccttggctccaactcagactcagtctcaaccccaagtccaacctttggagtcgccgcaaacagcagatcaacatcaccaaaaacatcacttacaaaccattctacactccacttcggtcggcgaccaatcttcatacagtcaagattctcttgaccctgctccatatagctctagcctgcattctatgcatcagcctcagtatcattatccattgcctccaccgccaccacatcagttgtataatcctccaccaagaacgctcaatcaactgaaccaaccgttggtctctcaacagatacaaagctcgaattccccggcacattggatgaattagacatctgatatctcaaactttggtagcttgtgatcgaaacttttaaaataatatatttgtcccattataacttccgatacgcgcttctccttgaatccggattgttatagactcgcgtctagccataaagatccccgccatttatatcacaaacaaggaagctgcggtggcgttagagatacatgttgaaaatagcgaacgagcgagccatagcagggcgaagatctgctcatagttttactttggctcagtaaaccagttgacacccaaaacgcctgtcgggaggcaaagggaaagaatcaggatacaagaggtggtatatgtcagacaaacatgttacgatagagatgcgtgatcgtcagggtgagaattgcttactaggttcatcgagagtctgcgaacgagacgtcgagtcgttcatgtcaaccaagcaaaaatcatcagttcttttatcatattggcagcagcaataatgaggataaaggaatgaaaagagagcatactccgtgctggtatccgagcagagtaagtcctccggggtcagtcgagaaattggttccagctgccaaagggaatccacaccaccgactatacgcattgagccccagtatcaaacaaaaaaaaaagcggagagaattattgtaacatgatcggaaggttaatttgtttcttgggtacttgcatgtttgaaagccacaaagaagaacacatacgcgataaagactcgactaaagtggccgtgagagacgatgcagatatccgcgctatctcagaaagaaacagaaaatctgagcttggttacttctccccatcttgtggcatggtagatatctttgtattgaccatgaagagcgatgaccagagtaaaatccagaaaaaaatagcaaacacgtacctttcagccaacgaccgtcgctccttctgggacaactcactcttcccctggcaccctctgtcctcagcctcccgatggatgtttctaatcttttcaatcaccctgtccactctatcttgcatctcctcggcagtctccccagcgtgcttgtcgtccgaggggcacctgcgcatattggaaaacagggttacacgacaaacaagctcgacttggttcagagaacccggaaagaaatgaactcggaacatacccatctcgccagatcttccatcctggtcgaatcttctggatctcatgagtgtgcagtccctcgaaagctccgtacctgtcatcagatttagggtatgaggaaatggacgattctttcgattcagtatcctcttcgaaaaaaattgacgtacttccattctccaacctcttcctgtgaattaaacaaggattcaagatgcatggatgtaagcttgcgcgcagaagtgaaatggtacaagatgaagactcgcgcgcaccgaagtctcccaatgtttgatgtcgaactcattcttgcagtgttcgaagagcaactcggccgtcttttgagctatgaatttagcgtttaatgcaggtccagtgtcagtttcatattctgaagggctaaagacagccgtaggcatctatggccaagacgcttgccagaaaggaataaagaatatacagacctcggactctaggactgacgattacgtgtgtcaatgtcttcggatcaatcaattctattgttgcgataaaagagaagaatgaattgaacgcaatggggttgatgaaaaaagaagtcagcacgattataccatctatacatatagttgcgatcaagtagatagagactgactcccaggtccggtgataagaggagcattgttcttcatgacggtctctccgttctgagttagaggtatatcagagactccggtctgtgtcgttgtggttcatatgtgaaaacatcgagtaagcaggagtcaggcaagagctttctattttgaggagatggttgcgtatcctaagaatcaggaaggctcacgtgtcgaccgttgattgaccattccgtctcacctgttgaatacgtcaaagtaaaacactcgagtttcaacacgataatttttacattccctcagagacaacagttaggataaatctcttaccgtgacctatatgactcaaggagtatcagagagagattgataggcgagagagagatatatgcccgaggatgccagaaagaattgagccaaagtcgagatgaaatggatgggatcagctctccttgcaagcattgattgttaagtatcagcagatagacatagaaatatcgaaccaacgtacggataaggtacactctaggcattcgaggagccatggttaatatatgtgttcgatggttgaggtagatgaaggaagcaaagagacaagatgacagacgagaaggttaggaaggagaaaatctccactctttttctaataaatctcgctctcttttcgtatgggccgttgtagtgattcgacgaatattctctaatgccttctgcaattgtacagtcatctctcacggcttaaagctcgtaagcttacctttctcatcaacaatcactacggcacatccatcttcctcgttcaatcttattcggctcgatactacactctatcatggatcacggagatcactcgggtcacaatatgccctcgatggctcagaaatgtactgtttgtattggactttccttgaattcatacttgctgtctttcgacagaactgattgaactcacagtttgatcttctattctcaaatctggcgttctttctggaaatttatgaattgacaacgtacgcagatgcacatgctattcaactggcaagtagaaggtatgcttcccaggaaagcatgtattcccgaattgattgttcatttgtctgatctctcaccttggtcttatcagatacttgcgtcgtctttagatcgtggcatatctcgaactggcttggaatggtcatgtcttggtaagaatcttttgttcttctcatccatagactcgcagtagtttcgactgtaccctgagaatgtattcctatcggtagcctggctatcattctaatcgctttgggctacgaatggacgaagcataagctcgctctctacgatcgtcgggtggcagcttccttatttccggcaagaacttctccaagtcgaacctcatctggaatgagctcgcctactcaagactcgcccacttatcctatcggatacgtgtaagttcgacatctctacaaagcttcttgtttgccttagccagttctcttcctggtcgatggtccgattgaatcgacttgcttttggtttgaatgatctccagtgtgggtatacctccgacagcccggttggttcgtgccacaggatatgctctatctgtttttatttcgttcttcctcatgctagtcttcatgacatacaatgtgagcgccgttcgtttgactgttctgttcctatcgatactgatcggtattttcaactgattcatacagggatatctcatcctggccaccgttgtgggagccggagtcggacactacgtttataaccaggacatggaacccctgtaagtcaatccgatcttgctctatatatttcttgctcgtattgcgtgctgacttgatctaacaaataccccagctccgtcttaaacccagcactttcctcttcaagtcttgcctgtcattaggtctttctttaagcaccccttcttctgcattacttcttcttcggattattccttcggcatcacagctattcattcaatactctgtagttgggatttgttatcttctgtccttttcggtagtagaattgtgtatgagatgtgttagtattttcaaaacgaaatgtttcgctaactcacggccgatggaatcatcggccccatcggcttcacccgtcttctatgaatttatggcctcggtatataactccatgacacttacacattcaactcgcaactctcaagtttcaaccaaactcttctctgtgcacggccaatcatgacacctacaataacaacaaaagcggcaatgtcgacagtatcagctgtgacctctgctgcgaagccagctcggaaggctatgcgttccggattgcagcgagaagtcctcaatctgttcaaaaagttcgttcgctttctcattccctccttcatcccctcttccgtcttttttcatccgtccgttctacattcagttttagctcggttccaatgtctatccagatcagactatgtacttctttccattcattcgctcatgtcttaaactccaccttcatgcagagcgatcaagattagcaaatcaaaaccgatcgaagcccaacctcagttccttttactctctagatggagctttcgtcatccggcgttgaccacacgagacgtggctgctatcgagcatcaagtacgtcttttgtttccttcacctccaccctggactgtcgacgtatcagaaagacacacttttgtcttgctgatgttgtcaagttctttccgaattgtcgacggacgaccgatcgatcgatcagatcaacgagctctctccagacgtcatgctgattcttctcttcttctttttttcttttgaaccttacgttgaaaatgaataaaccttatagattcgaaagggcacgagaacgctagaaatgctttcgtccccctcgatacgcaaagtcaacacgacagaagagatgaggacatggtgggaggattcgatcaggaaaaagtatacctagagcccttcctctagatccagagcgatggcgacaaccttgaacttggccaagatttctcgataggagaatggaaacttaacgatcgataaattccggatagatatatgtgtgtttgccttgtctgtgtttcttttttttcttttcaagtatatgtctccatcctgtcttggacaatcccatgaacgagggacatctcgcattcggccttgctcagtgccgcaagcaaagacagaatggcccattccaagacagcgtccatagaagcaaggatcattcagctacgacccatttcatacatatacaagagcagtctgtttggtcgtcagagaacagaaacattctgcatccgagtgaaactgccatatgaacgaagaccaaagagaaaagtctcaagagagaatagagagaaaacaaagagatcaaagaaagaagagagaggttccaccaataaaccaagacgagtagagcttgtctactcctcatcaaacgtctggtcggcctcagctccatcgtcctcctcctcctcttcaatcccctcggacaaaccggccttcttggcagcctcggcggaggcatagtccacagttgatcgggtcgatcgtcgggatgaagtaataattgctgaagggtcaatctcggaaaagtcctgtgaagatacaagatacgcatcgagtccgaggggcatgagtaaggtgaacaaggacgaggaaaccccagccttgtttggagggcaaaagaaacgataaatacctcctcatcttcatcatcctcatcatccatctcctcgtcatcatcctcatcatcatcctcatcatcgtcctcctctacgggaacctacattcgattatcgtccaaaacattcatccatgacgaacaaaaacaacgaaaaggcaaacgaaagtcacgggtatcagaaccagaagttttctttatgtcagaccatcagatcgatacattcttgacgcatatatgaacccaagttctgacaggtatcagcaaagagagattccgcccgtacctctgcagctttgcctttacctctaacactatcagtggcgttatccagagcaggagtctctccgacatcagaggtagggagagtagtagcgtttctgtcagatgccacaatgtatcagaagaaaaagcaagagagcggacgaatgggagaacaagttagggttttcttttgatcaagttgtttcgtgcctggccatattggcatgaactagaagggatcttctcatactccctttactataacatcgccgaaagtgagatgagaatgagaatacgcacttgatttcctcagacatggtttttgaataaatgatacgtaaagatcaagacggaaaagggtaatgaattgatgggaaggacgagagcaaggaaaagtgaggtggttggagatttgttgatcgagagatctttccggcgcgcaaaccgagagcacatgcccttcgacgcgttcacacaacaaccctaacactcgcaagctatcaatcggttcgtctattcatgcctgacgatcatcatacatccgcatacggatagttttcttacagaagtagataggtagacagaacaaagtaagacaggtaaaggaacggatgagaccggtcggtcaaataagagtaagatattcatgtccgcccatgaggtcatcatatgaagaaggtggggcaaatgagaaacaatgggcgagaaaagaacaagcagtgtcaagagcaaaggtgctatgttgagtgtagtattaagaaaatatgtgatgcaaaagaagtgcgctaccataggccacttgaggaaggacgaaaagaagacaaacatggaacaagtgatgcaggatgaacggaaggttaaaacagtgatggaagaataaatcccctttttcagcacaaagaaggcaagtttaaaaacgtacatgaagaacagaaagagggaagaacaaaatggtattaaatgtatacaccaatcgccgtagatcttttctaatggatacatcaactagctggatggcggtggtggcgacggtgttccctgatggtggtgattatcagcaaacgaggcgatgtgagaaaacgaaggtaaagctgtcgtgttgaactggcgaccagatgaatgagaattggaatggggcgaatgagggtgagaatgagaatgagatgggtcggcagtcggacctccctaattgataataaaacaaggatcaagatttcacatggactaccatcagtctcttttttgttcatgtcttactttcccaagaatatggaggcggggaaacgactcactacctggaacatcggattgatgtattccctttcggataaattactgctcgatatactaggcaactgtagactacttcccgataacgcatctatcgcgcccgtacccgcccccgcgcccgagtaccttccataaggatcgaacgaccctcttgacgaagacgatgcaagtgactggacggacgaataaccaagtcggtttcgatgtttgaaattcttgacgagttcactctcaacagaatccgacatgtgcggtaacgagtataattgtggggacgatgtcgagccttgtgaggaaactgagtaggcgtcagtaccatagccatgcccataaccgttgctatagccggaagcgagtgatgaagggtattctcttggtggccgggctggtcctggatcagaatcaatcgactgaaaggtgagcactgaaggtgactggaaggatgatgggccttttcctaaaccaagagatgacgtcgaatgatcatcatctccatcccgacgacgagatttatgtcggctcagcaaatctttcgacgacactccgggctgaagatgagagagagatcgagaatggttcgaacttgattgtgggaatgagtttgcgtgtgttagatgcgccggcgctgaaggtccggccggtggatgagcgccatacaccgacggtgattgtccatacccagtaccctccgagtgcttctctcctttctcaattaccccagccttgacagcatgcttgtgagaaacctcctgttcgaccaatcggtctctcttttgcatgactgcccgagcacgttctctggcagcagcagacgccgcctctcgtttcgcgagctcatactgttttgcctgtcgtttcgcttccttctgtgcggtctttggatcaagagttatatccccgctgctgatcgaggcatccgtcacgttcgagatcgattgggttcgttttagtgggacagagggtgacggtgcgaatccagaaggacccacacccggacctgtagctggttcctcaccaacagacgagagcccatgttcgtgcttcgaatcgttgtttcctccaaacacggacgccagaccaccccacttcttctttttcggtgccggaacggttggcagccctgtggctgccgtcgtcatagtcgctgaaggtgctgccttcgtcgccgttgctgtcacaggggcatgggctttcaaaggttgcaccattgacggcggctgcggcgacggcaacgggacagtctccgaacgtgtctgtattggggggatagattgatgcacctggccccttgtcgatgaactgaccgataacgacgacgtcgccagggttgcaggattcgagagaaggtcaacgttggctgaactggcgtagaagctggagttggctgtacttgtcgaaccattagaaagggcatagagttgggggtcacccgatgtggatttacagtatcctccgttggaaggttctccggcaggttggccataagactggctgttgctatgagtgtgacggtgttgctgagattgggaatgatgtggctgttggtgatgattggacggcacgtcggctggcgaagcaggctggggggtggtggaccagctcggagccgggttcaatccatgggcgggtaaacgtttaccatagctcgacaggtctgccgctggaagatccaacttcttcaactgatcgaccaaagccgaggcgccggttgttcgacggccgttcgccaaagaagaagacgtcagcgatcgatgatccaagcttggggactgatcgtaaggcgccctgggccccgcagaatgatgggaaatagaggacgacgacgaggagggcggaaggacaacaggcgaggtcggatctcggtattgagggaagaacagcgctctggaagggattggtgaaagtgagttggttgaggcctgaggggcgggtaaggtccggctggcggaagcaccatctaccaagctgagtggtaagttcgtcggcccgaccgacgggccgggggaatgatccgaatggggggtcgttcgggaggatgggtgcgatgggatcccggtttctacaatggtggaagccacatttgtcgacgatgcagccgacggaaggtatggttgatggtccgcattggatgggtttgacgatgacgggggagcatccggcatagcgggtatgaatggagtcgcctgaatctgggggacggtctgtcgaaagtatgcatgctcgaggcaggctcgtgcggtgattcgatggcgaggattataacgtagacattcggctatacaatcaatcaatgtcgatggagtggacgcatcgaagaacgaagaaaacaaaggcggtgacatctgaaagaaacacattgaaaatgaaatcggccttagtgttaccgagtcccgactgtaaactgaccacaattcaagactcacttttggaaagccaaaaccgacggcgtgtgccatcttgatccctcgatcccatgggcctcctcctctgatcttgccttgttcatcgaggccatactttctgctcggatcacccaaaattgcacaaatcttgtaaacctggtcgacctcggactggccgggaaagatcggctttaagttgacgatctctgctagaatggtaccgagggcccaaatatcgaccggcgggccgtattccctacttctgaggagaacctctggggctcggtaccacctggtcgagacatattcggtgtagggtggcttggagtcaatctctctggccagtccaaagtctgcaagcttgacgatgacgatgacgtcagtctctgtgcgtgtgcccggtggaaggggggtctccctgacgggaatgtagtcttgaagacctatggtggtgaccaacaggttttctggtttcatgtctcgatgaaaatagccggccgagtggatgtgatttaggccagagatgacctgatgaaagattgatgcgatcaacccgccagccatgggtcgaccccgcctggattttgtgagttggtaaagattgccctccatgcattcgaatacgaagtacagctctttagacggctgcagaaacgcgtcgtataatgggatgacgttaggatgtggcggaatgaaacgcagggactgtcgagagaaaaaaagatgaagaccgaagtttattacgtgcaggacgcaaagaaaaaaaaacaggttgtgagaaaacagagaactcccaacacccgagagaagaagaggaagagaagcacatgaggaacagacagacctctagttccttcagttttgctgcgtcctcccaacctcgttcccaaacccgtttcattcgtttgacggcgacaagtcgtttgccgacccattctggacgcgcgcctgctccgcattgcatcgggctgagagtggtgcctggtggaagaggcgagtgccagtcacatagccagaccgtaccgaacgaaccgtcgcctacgagtttcaccggagtatacgatcgtggggcgtctggaggattaatagatgggcgagtcaggaagaaagttcattgggttgttgatcaaagggaagagagggaagagagaagataatccaaagtaggaaccggtcaattcaaaatacacacaaccaccaagtgtagaagcaagagaaagcatcaaggatcaaagatcaaagacatggccctcggattgggcatcagaacgacttaccaggtggtaacactccccaagagtgtgtgctccttctggtttgtctcgaggaagagctctctctgtgtctccggcccgacaggttttcctcacccgaaaccgtcactgtcggattactcctgtggccgtcgggcaacgaagacagtggtagcgatggtggtggatgaggaaaagagggaagctggtaagaggaaggcagctggtgggcggaaggttgatgagaaggtagctgatgaggagagggctgatgtgatatagactgctggggagaaagaaccaaggatggggaggaggaagaggaggaggaggaatggtgatgggtttgatgggccagtcggccttcaggcacaggtggtgcgaggagggacgagttggaaggctgtctggcgtgtgtgtggtgaacgtgtgggttttggtgaagggtttgcctggatgaggatgtccagttgtcttctacgagggacatgtcctccacaggtcgatcctgaagatcaccacgcagagcaaggtaagccacggtagagagtagagcagacgcagaggagtagagtgaagaacgactgtttgtgggcgaaacaagagcagataggccaagactgatcccgatagaaagggaggagaatctaggcgtccagaaagtagttgatcgttcgtggtttctagtgttcgaggtgattaatatttggggttatgtatggcaaaggacgaaaaccagatggtcagctacgctttccacttgccgagtgtgagagaaagtcaagaaggattctaggccagagcttgctaagcaaacgaaaaggagagagaccagagactaaagaacggaagagagcagaaggagagagggagaaggagaaagagagagagagcaaaagaggtgctaagcacaagaacgggattcgcggctatagcctaaaacaaagagagaaaaaaacatcgcgtaaaccttctcgcgggtccggaatggatcgactaaagtgcgtgtgtcgtcacctctccttctttccctctctccccggatcaatcctcttttctattctaattctctctgtctttttgtctatctgcttttgtttcctttattaataataaaaagaacgactatgatccgagacgccaagtagaagtttgatgtgggttgaatctacccagacaaagagaactataggactacgaagaaggacaagccgaaaggatgaacagagatttcagactcaccaaagttgacaccaggattttcttgaaagcgaggatttttgtttttattttttaaaaaaggagcaagataatatagaaagttagaaggagagtgagaaagaaaagacgagagaataaagagagagagaatagagagagagatagtgagtgaggacgagaacgagaacgataaaaaggaggtgaatgtgagtgtaagtgtgaatgtgagtctggattcgggcgtaagttaagacgagggagaggagaggagacaacgcggaaacgaccgagtttcggcttgggtttacctgcgtctggtcgggtgagttccagaagggattgtggccggtgtgtgtcgtcgactttaccctcggcagcctcctcacaaggtttaagacgtacgcgagacgatgctaaaccctcggtgtttttaaggggcaggccgccagaggttaatgcgggcgtggtgtggacacagacactaaagacaccgaaggcatatacagagaggtaaatgggcgaagatagttattacgcggaaagaacgatcgattacgaaacgccggggaaaaaaggaagagtttagagagaaagtatacagtaagaagaagctgtcagacaaaaggcctcgaaagaaaatgacactagaatgaataccaatacaatggataacaaacaaaacagcgtggatgtaccggaagcgtcctcattgttgtagttctcgctttcccattgatcaacactcatgatagcacagccccgttcacccagtcacgattgtatccctcccagcttccgccgccacaaacgccacacattcatacacgcacacatgaacctctaagcctcagtcgcgcccccaaagcctggactgtcggtgtctgagctttcattgtccctggtccctttccagtgtcgcgttctctgtgtgtgacgcgattaaagttacaatctctttttagttttccagcgtcattcacctcttttgtgttttgcgttggaacccagctggcgccccttctttctttcggttcacgagactgcgcttacttttcacaatactctcgcgtctgtgtaggctgtcgtcgcttgagctcggaagaatagtaacctcgtctgttacggctgatctgactcatagctctgtccgaccatctctgtgtctcttttgtggaacacacagtcaatatggctaccggtttaaccatcgtattggtcctgttgctgtttccaatatctgtctatcttctggtctaccgaccaccgagatcttcgtcgcctagccctgcagctacatctacacattcaaacacccctcctgccactcttccagcgagactgttcagttctttccttcatccggccgaccaatttgaggacgaggacagaccgaaatggagtccaagtccagaagaccagctccgggtgagaaatctcttactacacaggcttcccccagagctcgttctgcccatcttgtcgattgcgcagtaccactcggtcatgtcgatcacccggaccgatctcgtcaacatcaggcgagttctctctctgtttgtatcttgtcttacatgttcccttgcccgaactgatcaccgaggccattgttcttctgcgtctctaggaacgcgagcgtacggtatctcgtatccgacccaattcctatacatggtcgtccagaagaaatcagacttgggatcagaggccgagaccagggctggagtgactttccgcaacattatggtccgtcttttcggtcaaggctgagcaacagtatccttgtcaccctttccgtctcccctctcccctctccgtctccctcctccctcttcgctgtgctggtttgtttctagctaaactggctgatttttctccatttcatacactcataggcacgtatgtaggtacatcctcatactaccaagtctgtctactgcgtagaaacccagatgggaactatcaaagccaagatcaaacagacttctggtcagaagatagcttgaccacctggtcagaagtcgaaaactccagacaaaccgttcagtataacgtccacgccggacaatacatcaaagctcatcatctcatcttctccaaacgtcagcctgaccaaccgttattgttagcagcccggcctggtgaccgaatcgcgctagtcagtaatcattcttttttgaaagagcctcgtccatcaagttatctgttcactcaatcccggaagtttcctttctttttgctcttctttctctctcccttttccggtagatcgcaacagcccaatacgtaggctgggaaaacagagtctcgtgcgtttccatcctatagctacctctgaagttaaactctcacgaactcttgcccattgacgaccctgatatgcagtgcggcaagaatagacgtctacctttctttctacaacggtcttgcgaactcatgaaaacaggcatacgattccggagtatctcacttgttttttgtattgtgtcctagtacttgtgtgtgtgccttcggtccttttccatctgctctgcgttcctcccattgccaatgcacgcgttcgaacgcatctttcccatcatttctttcttgtattcacctttaatcatcctcagcagagggagagactggttcatctgtgaacgttccgcctgtgttagtaacaactcggttgatactagacggaagcaaaccccgccatccaatccgatcgaagagcaggtcagcgagaggcgcagaaaacaaagctatgtctatgaataaagaaaacaagatgggcacaaactgatggacgagaggtcgggcaatggccatgactcgtaaaatctctttttgaaaatcgggctgggtgacctgttcgtctgtgtaactatgattataagacgcgtacagtatagatccaataaacgattcagtaaggggaaaatttaagccacgagagtaagaagaggatgagcgcactgtttgatcaccgctatacttcgaagcttcaataagtcgatctcagggtgatctttcgggtatcccataggtgccacttttagttccttcataaggccgggtaaacatcacataccaatcatcagggaaagattcaaagggagcacaggaaaaacgaaggaaagatgaaaacggggagagaagagagacaaacccgatcgcctccaaagacgttcctcctcctggatggcaatggcacctcaatcttttgccttttaccgcctttgttttcgtcctctgacgatgacacagcttccgtccctttcttcttgccctttgatttggctttcggctttggtttgagaaccgcgggaaggggggaaggctccccgaactcggcgacaaactctggggcagagatgatccggcgaaacgtttttggggcatctgccatcgactgtctactcacccgtatgaccaaaagtataatcgggattaagaaacccaactatcaggaacaaacacgcggggttgacaggcccactcggtaaagctcaccgaatcaatgcgagttcctctttcccaggctcccatacaccgacagccaagatcgactgatctcccggcttaactgtgtttggattggcaacatcaaaggggtggtcggcctcactaaaagagcttgcggagggtgaatctgatttcaaacgacttactagataggtggtagtgtccaaagatccctttcctacctgtcctagagagtgaaacactaaagttcttcctgtaaataccgagaagatgagaagatgaatggaaggataaagtttagatcagttggtgacaatctgtcggaaaggactatatagtttgtccgatcaaaaacatacttatatggagtcttgtcattggaaaaacgaactatctccagtatgattcatcaagtcagtctcacatgtccgtcctatcgcacgaatctgatctatcaaatggttctgaccgtctctatatatccggtgctatttatgatacataaacgaaacagggatccttttcatcaaattcggcgcaggttcctgaggtctcgacgaaaggaaggacaaaaaaacgcaacacgcacaatgatatccctagcgggcaggaaaggaatctcttgatcgatatccatgatgcctggtacaaggatatctacgaagtcgacaaactctttttgcgcctgtcgaaagacgggatcgtgtagtgcgaacctgacaagtacgttcagacgcgtaagcctgtgaatacccctatcagaaactttctcgcgacaaaccattgtcgatcgttattctctggaatggccaacttggctagaaacttcagagtatttctcgagatatgaccaggaggtactgtggtataggtgacacggagaaaaccacatgagacatagagaagaaatatataaaacacaacggaatgatgaaagatgatcctgttcaaaaattcgaaaccaacctagtccttttgtcggagctttggcgattcgaccgacaaccttgattccagtctcctcatctgtatcttggtctgccacatcagaactagaaccctcgtcatcagagccatcgtatgtatctccatccagagttttggatctcttgacctgtctcaacggcttgtgcttctttcgagccttgccgtcatccatatcggacgagtccggctcggatgaaatttctgttgaatcagattccactggtggaggaggtacgtctcgggcggcccgatgaggacgtttgagaactggtggatctggcatgatgagaaaacccaatggaatcacaataggtcgttgagcaaaaggatgatcgagctggtttgttggctgagtgttcgaaaaaatggggagatcagccccccccccgcaccacggaaacaaacgtcattgtatgattcgatatatttatgatagctcatcacataggtaacatttcgaacccttagtttgttcgaagcttcggctctattcctccatttgccttacaatcgctccgatatctatctcttctttctttcttcctccttctctctttttctcgacaactcttggatgcttgaacaaatctacatcgctcgtcatggcttccgacttagctggctcactaataattggacgacacccacaaaactcgcccgagatcctccactcgcagcttacggtttggaggttagtttccatcaagcagagctgaaggaatcggattaatctttcttgctgatcgcagtatatattcttgtcgatcgttccgttctctgggatgtgatctactctttgaatcaccagcaagccgctcgattagggacacacatggcgtctcctccagatggactggtcagtgctttgctctttcgcatatccttcaggattttcgtaaagtaaattcatctattctattcgttcctccttttcatcctttacagcccgttccagagcttctcttctcctctccattttacagatgcgttcagacctcactacctgtagctcaagcactcggtgtgcccatccgtttggagcatggtttgggagaatgggcgagttttggtcgttatctcttaagcttcgatatctcatccgacgggctgacattctctcactaccatatcgtatacagtactctcgaatacccgaaacacccccttataacttgcatcctcgtccatcagggccccgggagctgtctcagcattttcctgccgactctatttgcttggattatgattcgacatattacccatccagaaagggagagagcctctcggatctgttagaccgtgcatccaaattcttgatcgcgtttcttaatagaatagaggtacatccatgccattgcgttcaatccgtcatatttgtagcgatatctgaagttatgaagcaacgactaacgacaagcaacttcttatggggatttctcaattctaggtagagtttccttcggtcaaatcgatagttcttgtcggccatgccgcttccgtcattgctctcgggcgggcgcttgttggagatccttcgctcgagattgtcgctggatgtgcaagcttctgtcggtataaattaaaaaaaggaaataaaggcacggttggagattatgatattgcccagaatggagaggccggttatctagagaagggcgtggaacgtaactggacggtttgtctctaccatctgtactgatttcggtgcctgtcaggacgataacatccgatctgacatgttctcatttaacagtttgctgacgtggtgttaaatacagacggcgaagtcattgctgtgagcgaacccttctgtggtcttgttgatatgttgatttcactggataagagctcaagtttgattcatcccctcatcgataggatcccggagttcccggtacaagcgatcagaaagactatccatgtggaatcgcgcctggtaaggagcattacctgatgtctttatcgtctggatcatccttggtttcaagtgcattatagtctttcatcaagttttgaatacaaggattggaaaggagtcggaggttactgtgttatctattcagaaaaattattgttttgcaatcattcctactctcactcttgtctgaaagacatcaacagacatagacagaagatacagtctgtatgatcagagtatggagaaaggatacaacagacaaccaaaaccaacatagtcgacgaagctttgaactgtttccgtcatttgaagtgagcagagagataggtgatctacctaaatagaggttttgtgaccatgtgagccgtgtaaccatcaacctgcctggcagtaaccaatcttcctcaactaacgtccctcacccgttttcacttgtccaaccaactccacccaccaactcatctagtttcgttcgcttcggtcttcctcaactctttctttcttctatccaaagaacaaaatgtcttctgaactttgccctgtctatgctcccttcttcgtgagtatcgtctttctcgattggcattgcctctgttgttcccctcttttttccctttttgagaaaccatcaggggctgatcgatcgggcttacgcctcatccgttttttcttttctcatacaatccagggaaccatggtttgtgtttttgtttctctttggtctgtacgcagctacagatactcatactcttatctatcgtatttcaattcttttgtagggttgcaccgctgctattgtcttcacctgtacgtatcaacgttcttgaaaagatgggaagaaaaaaaagtggagatgggaatttagattacctgcagatctccagcttggctatcccctttgtctctatcgcatcctttaacccatcaggctacaagaagctgatccgcttgtttaatccgatatcttgtgcttgcgattgaacaggtatcggagccgcgtaagtcataatatctcacactggacgggagggatggttggatacggatggtggcgatcttgatgatcaggatcttgttgggttcgaggatcaactaaactccttctgtgttctgtgttctgctttccgtctgttgcagttatggaaccgctaagtctggagtcagttcttcgatctcctcatatgaatcgactgcgatgatggctaataatttctgtttgaacatgttttgcaccctcttcgtttgcttatcgtcaggttggaatttccgccatggctgtcctcagaccagatctgatgatgaagtgtgtggttcccgttattatggctggtattgttagtaatctcaatttatatagggaggatgtatctccgactatcgagcgtggcttgttcgtcggtgagacgtgatcggcatcatagatgaactaatttttgtattgattgtcgaactccaaccttgccatgacgacagatcgccatttacggacttgtcgtttctgtcttgatctctggtaacagtatgtctggggatacgcttcttgatagagtatctagaccgaaatatatactgaacatcatcgctaattcggtacgaacgttttgttagtcgcctcgcctatgtctctctacgctggattcatccagcttggagctggtctctctgtcggtttggccggtttggccgctgggttcgctatcggaatcgttggtgatgccggagtccgaggtaccgctcagcagcctaggttgttcgttggtatgatcttgattctcattgtacgtaaacttctttcttatacggcttgctcgagatttggctaccagaaacactattaaccagacaattccgcatacatctatcactagttcgctgaggtgctcggtctctacggtttgattgtcgcccttatccttaacacccgaaccagtgatgctcccaaggtatgttgacaatcgcagttattgactcttaggacgatagatttctgaccgcatttaccttacatgctacagtgcacctaattgacatcgctcatacaatggcttctacatgacgcgagggaaacggagaatggcagggcgatatggttggatacgtggtcttgttgttctctcttacgccgagctctgaagcaaattttcctttcgtagtttagatcctttgagtgatagttgtgaggaaagaatgccacgaggagagttgtttcttcgtatcttttctttccttctttttctcttcttcttgccattctttaccttatatcaattcgctgcatttttggttgccggaactgtgcactcattccctcttccaacctcacgcctgatattcaagacacagtgacatatctgtacactcagttcatttgttgatgtgtctaggaaataatgagagaagggtgataacggacatgttcttgagatggaccggaagtaccggattatagagaagtggttcaacagaggcaaggtccttgcacgtgtgaactaattgtctcttgaccttcacacaaatattctattatagatgagatattatcatctgctcatcttccatctctcagccactgtacaacccgacatacagcctcgaaggccttatctttcaagttcttcatggatgatcagtcgtgtatacctcgggctccaatcacagatgatcatgctcccgcagacactgcccctcacgctcagctggtttccagttcaggtctcgagcctcctcttgtggtagacaatcttactttaggtgatgaacttggctcagcatcatcactttttaaaaagcctccaacgaaacctaatcctgtattgggactcgttcgaaaaatcaaagacaagagttcgactcgacctccgatgggctcatcagaggcttctggtagaggagcagaaggaaaggacgaatgggtgatcgttcaggatgaggccaacgttcaacacgagatgaccgtcaatcaacagtttgcgcaggagacggacttgattcgtgagaaagatcaatctcgaagagaatcaataggcagtattaggcctggaggaggttgcgtgtcgtccccgtcgttcccaagctacttcccagatcatcaacaggctgttccagaagagcctccctctgctaaccctgaagccgattcacggcctggtttatctacttgtggggaaagtcctttggtctgttctccatcaaccgccgaacttcttccttctcatcgcattccgcccgaatccacgccagacatcacacccgcatctgcatctgcatctgctttagaaagtcacgatcatgtcgttgttcccccttcggaccaggccgtactcgatatcaatgctcctggtcgtcagtttgaacctcgccccagcctattacaaaattattctcagacaacagcatcgtcttctatgtcaagctctctaatgaccacggagggaacagtgccgagactcttgcaggagggagtttcaatgctcaaagtttcggccaagaaagttcagcagaccattttcaaactggatggcgacaaaggaactattgaatggccaagtaagaaggggggcgtcagtgagtatagttccttttctatcattcttgtctcgactgagaagagtatgcattcgctaaattagaaaaaaacgtcgtctttgatcttgcgcgctttttctaaacgtagtcgacattgaaagcatccgagagattcgtttgacaaactctgcccaatccttcatcgatcagttctcgtataccactcaactttcccctgcgcatgcctcgcgttggattacgatcatctatacttcaaccgctacttcgaacaataagctccttccttcctctccgacgacgtcttccggcacgtccgtcggaactctcaaatggaaagcacttcatctggtagcactcgattccaaatcgtttgccgagtggtccacagtacttcaatccctctgggatgccagaagggagctcatgggtggaattggaggactcggcagtggattaggcgaagggggctcgatagaagagaagcgtaaagctgtttggatgaagaaacaatggagacaggcagaggtagcaggagaagtcaagctcagaggtccatcaggtgagacggagagaaatggatggttggactttgagggcgttcttagaatatgccgaaggttaaatattgcaagtagtaggcgagatctgtatgcacggtttcaggtacagtccctatcttttgtggtggttcatcctcttctaattcactcgatctttgaaaatctattgaactctcgatttgtctttctataggaagcggatgttgacaaattaggacatctggactttgctagttttcagcgattcgttaaaaagttgaaagagcggaaggatatcgagagactacttggaagaattaccaatggggctggactagatgaacaggggtttcgacggttcctccgagaggagcaaaaagttcggttttcgtcaatctttggtcttctgatttgtatcatcgaggatcaaatcgaattgactttgcgtttcatttatacttcaggtagatcttcctccctccgagataacaactctctttcttcgctatgccgccgaaatacctgcggatagtacttcaacaacaaaccaacccctcatcttgttggaaggtcttacatcctttcttctgtcatcagacaatagtgtgatgtctgacagttcatcgaaagtatcgcacgacatgacgaggccattaccggaatattttgtttcgagctcgcataatacctacttgataggtcatcaactagtcggagacagcactgtcgaaggatacattcgagcgttgctccaaggatgtagaagtgtagaacgttagtcctctgttctcgagcttctctcctaactatagtactatgaactgataagacgagctcacatgtcgtttgttcatgcatctcgccaaagtcgattgttacgacggtgataatgagccggtagtctaccacggaaggacgctgaccagcaaagtgcctgttcgggatgtcgttcatgcaatcggcaaatatgcgtttgttgcctctccttaccctatcatcatctctgccgagattcattgcagcgtggaacaacaagatgcgctagtgcgaatacttaaagaggtactaggcatccgattcttgagtgaacccttgtctggatgggaagacgtggcgggcgtcctccctagtccggaagatctcaagcatagaatcttactcaaggtatgcttcagtctattgattcagcattcgttcgaactacagttctcttatgagacccgtgtctgtgttgtcaatcatgcaatttcaggcaaagattccgatccctaacgagaaagactcaaacgcggtcatcgacggtcctttgtctacggaaacggactcgacgagtacaaattcagaatcagggtttctagaaggtggtaagtacattttttcaagataacacagcgatctgcttcacgacaaagctctaattataacattttatcctttctttgaaggtttacgaaaggcttctgctcttgtctccggagtgaagcgccatgtatcccgtcgaaagagctcgagctctgataaaagatctcctccaccttcgagtaacacaaggccccaacactattcgctctcttcaaacgatcgatctactcttcctacagcacctcctctgaaggctgctaagcccaaattttcaccagcactcgctcaagttttgatctataccttgggcgtcaaatacagaggcttcaacaaaaaagaggtctatgatccttctcatatgatctctctttccgagcgcactgctaacaagatcctcaagcaaagctttcctgatgtcgtgaagcacaaccggacccatctgatgcggttgtatcctagtgttacgagattgggtagcagcaattatgatccaatccgatactgggcagctggagcacagctagtcactatcaactggcagagtataggttcgctcaatgctcttcatacatctcgtcaggttaggtagatcactgaccatgtatatctcacgttcggattacccgtagacactgcgtacatgctgaatggagctttgttcgctaagaacggacgcagcggatacgtcctaaagcctgctcctttaagaacaaaatctaaggatgatcaaccgaggatagaaaaattcgttcttcgaataaaagtatatccgttcttcgacccttgcccttcttctactattcctcagctatgtacacagcagagttaactctcgtttttggtcttatcatccgtttcctgagatcatatcggcccagcaacttccaagtttgggcgattcggatagacaccccaccatcgatccgtttgtcgaggtcaccgttttcttccctgatattcttcctgcgtcagcaagcacgtcagcccctttgtcaccaaatgtggtctcctcgtcctcttcagcgccactgcaacttccaaagtcatcctttaaagtgcgcactaagacagttgacgacaatggattcgatccggcatgggaagagaacctgactctgccgttccggtgcgctcaagacatgcttgatctggtgttcgtaaagtttgatgttcgaagagaaggcacagtagtcgatgcgatggatcagactatagcgtcgtattgtgtgtccctgggaagtatgaatcaaggttagtgtttcagctactgctcgttgtattaacgcattactttctcgcgctgttgcgggtttcgccctattcaattgctctgaagttgatcgaatgccatttattcgtacaggatatcggcatctgccactactggacaaacaactcaatcagttcttatttgcatcccttttcgtgcatctcaacttgagttctggataggcttttatagcagcatgttcgctctgctttgcactttacttcaatggcatatacatcattgcttgctctgccagttcaaccaaacatatcagaatctatctcgtgttctgcttctctactttcttcactctcatctcattgatcaagccattcttgaataatttatcatagtatatatat

SEQ ID NO: 605 - DNA, 5451 bp, Xanthophyllomyces dendrorhous
atttatcatagtatatatatcatgcgcagaacaatatatattttctctaaaaacattaccacattagaaacagaagggataaagagttttgattgttggtagaagcgttacaacggctacatccgcgtctcacgcggctcgatcggctcagatctaccatctcaaaaacacattctgtctcgaacttcatcagagctgtcatgttcaaacacgtcttctccacttggagtggatctacaatctctctccgacctgtctgtctgcctcggtcttatcagctactcagacagtcatcaatccggttctactctactccttcggactcttccgctttagatgaaactccagatccccttcattaccacgtccttccttccgtctctcgagtcgcgctctccttcctctctacaccacctgccatacctacatcaagcaccattctaggctatcttcccctcagtttggcaaataaccaagatgtcgggctgaatgactttgaagagaacaaaccatttgtaggaaagctgcagcaggctgtgagagagtgtctggaagaaggggaggaaaggataagtgcagaagcttccggaagaggagaaggttgggtccatgtgtgtggtgaatatattccttggatctttaatctccgcgatggacgatttctaatgttgacacttcctgacttggatgtttggtttggtggacgatatttatgtgttgtagacgatcggaattaccccatgccttcccggaccggagagccagaagatctcatcggatcagtctatgttaaagatgggaaggtagggcacttagtcttcctcttattctatctatttctcttctttcgtctcacttttgttcgaagatatacgccgactgttgtgagtattgatgctaaccactcgaatacttcatactttatcaggtcgtcccatcaacttatcaaccgatgaactcatacagagtccttactaacaacggacctcctcaacctccaggaatgatgtctaagcttctccaggttctcgagagaacccacgaggaagagtcaaaatcagaatctaattaagatattctcatataaataccacgagtacatgcggatttggttcttatgatttcgtcgcagatagggtgtttggtctttagccttcctcgttgtcttcttagctttacgcatctgtctttcctcagattgttaatgtccaatggctgttagatgttcaaagccagagtagaacgcagtctttcaagcgattactccatattatccacctaaccgtagtgccggctacccattctcgattaagtgacgacagcccagacagcaaggattagagtcttctttcaaaccaagttctgtagtctgccaaagaaaacgctctttctcgttcaaagaacaatcaagacagtttccacagggtgagaaagcgatcagatacgtcccacagccccgatgtcgtccgtcggctactctgcaagcaaagaacgtcaagagtcaatccacttcatcgacggcctgccttggttcgtgagaaccaagagcaaaagaccgcatgtcctccgtgaaggggtgtgggtggagtatcagcatctcgctttatgtggtgtagctagtgtaaactagcaagaccagttatatctctatagaaatgaatcctgcagagtctgtagagtggagggaagacgcgtatcaaagcgagacaaggtcagctattgaaggaagaaagcgaaacccatagggggaggaaagtgaactaacgtggtcaatgaagaaaagcaaaactgattgggcagaaactgacgaatttataccctgggcggagggaggtccgagcgtcacgcacgtgacattcaaattcacgtgtttcgccagaactccgacaaggttcttgcggagagtacccatcctttttgtatcaaatatctcgttggcaatcattgacaaaagagagaagggcacaactggtacaactcttatatctgtaagaatagctgggtctgagattgatgtgaccttgaaacataactggtaggcgaaccatcatcaaaatatacatttctatagcacaattgaattctatttgatctcgttgacgaaactcaacacggccttctcgtttcgagcgccaactaaaggaggatgaacggtcagaaactggtttcgtctgcctcagcgcactaacgcttactagtttctatagagaacacttactaaatcggctgacctcctttcctttgcggaaagcaacgacagtaggaagtgaggcaatctgaacaggcaaattgatcgtctatttagtcttacaatgtcaatccaaggaacaagtaacaggtcaaaacacatgtaccttgtacttttgagcaacttccgtcagctcctccgtatccactgatgatgcatcatcagaattacgagtcagtgaccaaaaccatgaaaaaaatctagagaagcgacgaatactaaccagtcacaagatcacagtttgcttctgcattgtttgccaccttggtcaagataggcttgagcactgtgaagagaagaggaagtagtaacagaaagttagtaggtactcaattcagctcggtttttatagctacatgcaacgaatgacatactcttgcaaggtccgcaccaactgaaaagacatattcatcagacaaagtgaaaaaaactccttttcagcatactattcaatagataacgaccccttcttggcagatacatcgcttactcggcgtagaaatctacaaggacgactttgtccttattcgcgttgagcacttcagactcaaacgtcttgacgtcaacagaactgaagatagccgaccgaagaggtgtgaccgagaatgctcgcttgggggagccggcaaggttgttgcggagagatgatcggacagcgttcaacatgatgtaaagcaatgtggtggtggatagctgttggacgaatgtagaggttctaaaggcgatggagtgatgatgaatcaacacgtgatctaatttgcaattgttacgcttgcacagctttaaccctaacattccccaatttcaatctaccatcgtcctcctcacgttctgatgaacctatcggtcatctcgcactcattcgttgttgaatcctcttacgtcctcacgcctcggtagcttgtcaaccacactatggccttcgagatcccttctcacctgaggaaggctgtctcgacttcagatctagatgctgaagcctctctcaccccaccggcttcggttcatctcgaccggcttcttgctccgttgatcaatgagccgtgggacagcctaagcgcaaaacaggtggccacgcatctggatgtcgtcaggatggacattcaaagcactcaggcatgtctgttttttacctctatgtttttattctggccttctcggaagatctcgagaattcacaccgaggtgcatgtgggtttacatattgacttgtaatacttgatctgcttcttcttcccttctgatggacgcgttgaaatggtttttttagaaaagcattcatagtctggtcaccgaacgatacactcaagtgtctagtttgataaatggaagtgttaaagtcaataagagctcagcgatcctaaatgaaaagcttgagaagctggagtatgatgtagacggagatgaaacggtaggtacgcatcatctgtacagtgaatagattatctccgctcacctggttccatacccggttcaaacctgtcgttctcccagtcatccctcattcctcatttactcgagaccatcaagacacatgcccatattcaacatgacctttcccatgaatctcatcatcttcgctttctacaactactatcaacatacaagacgaccttctctcaacttttgtcgacccccgggccgagccttcctcgatcggtagccatctgtctagaatgttccaaacttttgaggagggaagaatggacatggactgattcgcgaggtgtccgtaggatggagtcactgagacaagatcttgaggagagattgagagttattaaggacagagtgagcgaacagcttggccgaatctttgagggtacctttgggttagattgggacgctgtgggtgggattggcgtgatacgcgttcaggagaacgatcaaggtatgtccgaccgagttatattcccaaagcggcctatgctacgatatgcacatcttgttgatcgttcgcgctacgttgtttctctaaaagtttctttccaagaattgatagattccctccacaccttggcgacactaccaactcttctgaatacgctggcccatcgaattttaaatcagatattcattcctctacttcaaactccagctttcatttcaccgtcttctgtgtccaaaataaactctcttcatcgagctttctcatcaagttactccaccgactcaaaactggccatttttcgattcatggtcaccaatgacagggctggttctattgctcattcgaatagctggacggaatgctcttccgcgcaacccatacttcagtctatgattggcttcctgtcgactgctttcccgtcgttcccttatagttcgaaagatacatctcccgatactactcgaaacatttcagaattgctcgcacccttgctctttccgttggtcgaaaggcaccatcttcaaccgtgtttgagcctgatagaatcaccactcgacctcccagcctttatccagatatgtgatgattttacgcgctgggaagccgaaacgaccggcggatcgagtaccgagttggcgactttcaagtcggatgtaggaatccggtgggctaagttgaaacgggccaaacttttggaagacgttcgggctgtcttggtccagccgaaaggccgaccgagtgaaggtggatggagcggctggacgtgggagaaagaagtgtgggtggatgagcatcaggtgctaggtaaagagaaaggatcagcagacaaaccagaaacccacttgttgggaatggaccatctatcgtcggcggcgacgatgacctccgccgagtcagtgttcccggaacccacggtatctctgccatcggatatagctccagccggagacggggatgacggctggggattcgatgaagatgatcagccgccggcggttaagacatctgttgtgagttcagtggaatcatcagcgttctccactgttgaagtcacatctcctgtggctgaagaggaagacgacgatggctgggggtttggcgagacgacgcctcctcctgcgccggctgctgtgctagctccctcgacagaagaaaatgatgatgaagaggacgcctgggggttcaactctgataccgaacgctcccaccaagaatctagcgttccttcctttactaaaaagacctcgacggctgtacccaggcaggctaaacgactcgagcgcgtacaagcaaagtttagtgggtccaattt

SEQ ID NO: 606 - DNA, 32899 bp, Xanthophyllomyces dendrorhous
atttaggagagatcggtcgatcgttatcggctggttcgacaacatcttcagcgcaccggcgggtaagttttggctcaggatccggttcgaccgccgacgtatccgaaggagctgagcaagatctggtgtcacggcctaggggtcggggaggaatgaagttgggtagaaaggtctctgggactgtgatcggttcgaattctaggcaaccctcggtctcgtcatcggccatggatgtgtctgatcaggcggacttttccgagccatcaccagcgccgatgaggaatgagatttcgatggatggtcaagaatcggcgcaccctgaaggaccgaggttgatcaaagaacggtatgtagtaagcgagaggatgaaagagctcgtgaggtttgtggagaagctggttcggatggccgaggagctatcttctgtcgagtacgtctttctttttgtactcaaactttattgaaagcatcttgcgcctactgatgtctgtatacttggccgtttctagaactaaatctctctcaatctcgtcttcttcatccgagacgttgatgcgatcaatttcagacgtcctgtctctctaccgagcgatcatcccagtggcacacacttctctcatcgagtcctcacccgggctggggatgcaagctgtgaacgatacggaatacctggcgagcatgatcgaacatctcccgcttggccgaggagaggctggaaaggacgatctggtgaaagttctgaggatgtctggtcagagatggttggacgtgatcatcgttcgtgtcattcccttctcttctttctctcctcattgcacgatcaattttggagcgatttgatcttaagtccagctcggccaccttgtccgttatcctctcctttgctaacaggatcgacaacggacggcgttgaacacgatactcgatggagctggtcggtttacagacatcagtctcgaaaaccgggcgactcagagtgaccgtgcgatttcactaatcatcgaccggatgacggaactatcgactgtttggaagccgctggtcccgttggatcgagcattcgtcgttctaggaatcttactgaatgaagtgctggacaggatcttgcgggagatcattgggctggacgacataacgaccaaggagagtgagcgcttgaatgcgctttgcaaatccctccatccgctagagtcaatcttttgctcgtactctgatgagggcaccggtgggtcgccatccgcggtggtctcgtacgtaccgaaatggttgaagttctgctatttgtccgagatcctggaggcctcattggcggacataacgtacctattcgagaccggtggattggtcgatttcgaaaaggccgaactggtctctctgctgagggcgttgtttagtgatacgtcattgagagcaaagaccatcgacttggtgcttggtgatttggccgggaagtagctgagtgttcgaggagaggacgacgtcgcggtccagtagtgtactcataaactcatgaggtcttgatgttttccgtaaaatacgaaaagataaaaccctcaaaagccacacaggaacaagaaaaaattgagagtgagagaagaacgcatgataatatgtgtatagagatgcatgcttagaggaataaatggctgaaagcgcgccggccgttgccactgtaatggatcaagaaaaagcaggatagagagcttaagaaaagaaaaagtacaaggttttgtttggggcgagggaactatccgtagaagagatcatagccgagggaaagagagaagcaaggagggcatcagaccaggtgaaagagacaaggaaaagcgacagagagcaacccggaccaatccagagatcgtgtgttgattgggcagggatgggcaagactcgaggctcgagatgactacaaactaggatggaggaatagtctagagagagagacaaggacgagaggacaaggagaacatgctggagtgctatgcactagacgtaggtctacaacttggagaaccatagtaaaacattctgtgaaaatgaagagaaaagcaagggagttggaaaaaaaggaaggacggcggaagcgagaaccaacaagaaagagaacagtaaaataacagagaacagagagggtcgggagaagaagaggaaagagaaaggaaaggaaagaaaggagatgaaagaactgagagatagacgcctcaattggagctcaagaagggcaaaccctcatcagattcatcatctttgacctcgaaccgactgctggtcgagacgggctggcattcggcagcaatccggaaagcgccgacaatggcaaccacggaggcatagatagcgtcttcggaaaacacagaaagaaacatattgagggtcaggaatggacggctcgatggataggagcaaacgtatgggacacaaagaagatgatatctcacaggaaggcacgatcgcccaaggggcattaagtccgacaaactctccccagtagaagatccattccggtcgactgacagcctttacacttccaccaacccactcatcgacgatggggatagcatagtagaggatgagaccgtatagctggccaagggagacaatcatctgggtagggtgtctatagggcgactttgcggggatcatgtagagcgcgagagcgatgcagagcggtccccagacgagctttgaaaggaaagaaggacaaggaaaggaagggatatcagaggggttcatgcgcatttgaccagatggatacaaccaaagatgaagaactcacggcggtgcaaccttccatgatgtacacgaacgggtcactcatgatgtaccgagaatccgagagagctaagtgtggcaagggttaattagcacaggcacaagaagggggcacacaaggaatagagaccgagacgaacaatacatcttccacatctgtgcttctatccagtttgaaccggccatcgagctgtggaacgcagcatagtagcctaggcaagacggaaacacaagaaccaaccaaccgttcgacgtccaacggaagaaagagcgaaacatatattcagcatgtggtcgagcggaggatgtgaacacatgcttgatacataccttcaaaggtgatatggataatgcctgagccggcgaaccacatggcccaccaccattctgatgacgggagcggtctctgtcggaccgactttcgtttggtgataaaccatgagaccgcaccaagccaagcggccagaacgaagaaaaagacaaggagaaggacgattggatggatcgtgtttgggcgatagtctgggatgaggatggcaactgggtagaatgggtggagcgcggtggtagtagtggcggtggtggcggtggtagcgttcatggtgaggccggtagaaggggttgagatggaatctaggaacaaggcacgacggaaggcacgatcgagaggaacagtcataaacaggaaaggaggatggtcgagaagaaagaaggatgaagagatggaaaacgatagacgagggaaataaaaggaaagaacagatggagggaccaaacaggtgaaaggtaagtgccaaatgagggagcaggtcaaattaagcaggcacgcacctggacacctgggcacacaggcacccgcctgggtacccacactaccagacaacacaaggcaccaaaagacccggcgcccaatcagatccggttcaaatccctctggcccgatgggtgtaataaagaaatgagatggagtatgagacgtttaacgtggggaagggcggcttgatttagtcagtcggtcgatcgatctaggcaggcagtctcaatcgtgcctggctggccctggctcgcagtagcagcagctgctgccgccgctgctggtcccattccttttgttgcctttatgccgccattcttctgtcgccgtagcctgtgtagcccggggcgatcagatcgcccgggttctccacatcgaagagaacgggtgatgtaaggcagtcatcagtgcgatatggcgtggctgcgcagaattacgcgcacaatctcaatccaaactcctcgcgtacggcctgggcctataaacccgaccgggccgattgtgttgggtcttttcaccttacccgcccccccgagagattgtggtgaatgaaccgggccgagaggatatctgtagttatatgaatgtttaatgattcgcaaatttaggctttattactaactaagcttgaatcgtcgttacggctagtaaccgtagccatatccgtgcccctcaactccctccctcctctctttcttcggcaccttctccctcgctccctcgctccgtcctacctacctaccaaccatccccgggcgttcaaccgtacgggcaaaccagtgatcttatcgaccgacataccctgtatctcatctgcataacttatagtgtcgtcatatagaaacatacgcacatattctcaagttcacatacatacacgctctcatcttgaatcagcaatcttggtagtcctcgcttccgtgccagtcggcttcgaatggtttctcccaacacctcaatctcctctccctcctcatcttcatccgcgcctaccgcaagggctgctcggagtagaagagaccgtccatgtgatgcctggcaagtcctcggctttacttgtcttcctctctattctcgttgttcgctctcgttcttgcatccttttgttcatcataccctccctaagtctttctatgctcttggctaatccgatatgtctcctggtcaacccttctctcatagtcgagcagcaaagaggagatgtttcaagtttgcgaacgagccctgtgtggcctgcaagtctagtctccaggcctgtctgttcgaaaacccaccgaacaaacgtccgaggacagtacatccgacaacaggtccggaagatctgtcagataaagagccgaccgtttcatatgccgacccagacgcacaaaagtccaccccgaagaattctcacaagcatctgatcaatagtttcagtccagatacaaattcccgtcctctcctttctcgtctgtcatcgtcatcctcttccgtaaaccatctggttccggattcatcctccggacaagatagacgtcgtccaggccggtcagacgatccatcggctctcggcccgcccaccgacaacaccggtcctctcccgcctatcatttcccaaggagaattagaaggcccaggccgcaaaagctcgaatggatccagccttctcccttcgagctactatcctcctccgatgatgactgggtacattactccgatatcacacccacccactctgcctgttcatcgcaaacccagtctaccactccctccaatctcaagtccaaggagcttttcggaatctactcagcgcccatccaaagacatctcctatcgggtcagtctctttactcttatcttgttcgtcattggtttgtctatccaagcctaagtcgtccctcttacacacacacacaggatatccacccggttgctccttcattctcccaccctagtgcccaggggccactagcaagaatccttaacagagtaagactaggtggttctgattatgaccattctgaacggacaacttcagaagccaggtttgagcagtcgtcttctcatatttcccacctttcttccgtatgtactctttcatcttgccttttgctctagatttaagtcttctctgtcacaattctaacccttctattgatctttactcttttcctcccttcaaaaggccgactcacctcctcttagcaatgatccgactggatccgaatccgcgctctccaagccgattctcgattcgtcccgtttagctagctcagaacaacactttgcctcctatcaatctgaagacgatccctctcttcttgcccttccctccgattccgctccttcggtggctgccagtccggcagacgggacaagtactatccgccaggttgccggcattcgtgatcatccgaacggcaagcagagtcgcatctttttcgtcagccggccgacgttgccctatccaagatcgagaaccggtaagggtgtcctcctcgacgggaccggtcgtggtgcaaaaactggcagcaaccaaagcccggacggcgaggaagtagacggtggcgaggttcactatccggaccctcactttttaagggcactcgaatatctagagggtagctctccaggaagaattttggacgtgtatgttcaattaatttttcatctctctcttctccttgttggcctcagcgccgatgcgttgtcatccgttgaaattcatgattcttcttacgcccacgtctgttttgacttggcgctcatcgactcctcttccatgaatcacctgaagatacatcgctcttaccctcccagctatgccgttcatcaaccttcatcgtctgagaaactgtctgacgactttgccgccgactgcattcacttatccgagtagaacgctcaccggcatcttagcctctacggtcatgtatgatcccaacctcagagggctatacaacaaaatctggccagagctctacgaaggtctgacggcagagtacttacagccccgactccaaacgttgcagctcaccctgatagatctcacctcgagaccagacgtcaatccgggtgggaattctatttccatcgctcgagctatcggagctgcccaactgttaggtctccatctggattgctccgactggaatctgcccaaatgggaaaagtgtttgagaaaaagactttggtggggactttttgtcgtagacaaggtacttctggtcttctccttctttctctcgttctcttcattcgtctgagctcactctcgtacatcgtctgacttgatattgcactggccatcgacagtggtatgtttcaatcgacctacgcatccgtttgtccattttagttgaccatttaataatcttgctcccgattttattaggatctcactgtaccaaggtcgaccatctcatatccatccatcgaactgcgatgtgccccttctaaacctagacgacttcgatccacctttcaatccggatactttgaatgtcggcagtccatacgacgccccatcaactcctggctcccaggcaaacagcgtgacgttctcccgagaagccaaagattcggccgactcgtttagagcgctttgctcactctccatcatcctcgatcacatgctcgaagaattcttcaccgtcaaggcacaaagcatgttgtttacgaatagatccagcagaaaggcaaacagagtcacccggttaaggatcattgagagctttggcggtgatcttgatagatttgaacgagatttgccttacagccttcgtctggcaaggcaagatgagcctaacttcgagcctgccacaggtgttagtaagtgaaacatgtccccctctttgtctcttgctgatcaccggactgataatgtaaaaacaaccatccacgatcggttccagaatctctacagctcgcttacctgggcctcactatcgttcttggtcggctcacggccgacctgtttgatccggaggatgaagcggacagagaggacgtcgcgagggtaatcgaatccgggctggaccttgttgagaacgtggtgcgctttaccgagcgtctgaccctacgggacgtaaactctttctggattagttgtgagtcccttctttgcacctggatgggactaatgcctttgttttgtactctatttactttggctgagtcttttttctttttttttcttcgcatactcttacagttacatcataccatctatccaacacactgtcccttctgatccgctgcgtgctcgcgtcaaaaaagatttttcttgagagccagttcgaacggtcaatccccttattacgtcgattcatcgccaccttaacgacacaccaccaggctcctggattctgggatccagccgagcgtgccttggcgaaactcatgtaggtcgtgtctctacctgacattttggttatatcgttctcacaaacactcaatgcctgacacctttttttctctttctcctctctcttgcccttaggtcgttgatgccgagtgtgagcaagcttgttcccgaggtcggcgccatctggagagtcttttcagatcaaatctggcatcaaatgtgtaccagcccgtgcgtgcatgttctatcttttgtccctgaattataccatcagctcgttctcacccttaatgcctttcccacgttcttctattgtaaagaacgtctgacgtgttgatagcatctatccctgtccctgcgccttcgaccgatactcctgttccggtcgacaacacctgggcttccaacctagagacagcttcagacggagtcactctgactgataacgaaacgccccaatcaaaccaagccccattctccttaggagttgatccacaagaacttcctgtaacggatgcgttgttcagtaagtgttcgagcctcttcaaatgctcaactcgaaagtactagttaaaaacaggttcatcttttcttctctattcacccttgataggctcccttccaatttggtcgaacacatcgaacgagaactcgacagcttccacatccagaccaaatttgacggcgaccacggcccggccgtcgaaggatgatattccagcggatcacgatcaggcgttcgagaccatcattggagaggaagatctttgggccgggttgggtaatgtcgaggggttcacatggatgcaactcgggttcgagggctaaatttatttatttcctttccttttcccccccttcttgaagggtgagtttctttcggttcagtttagatttccgacatacataaatttatatcacttttgccaaaacgtttctcccaaatatatctagttcatcaatatcagtcgccatatagacttttcttgatcgttaatgcagaacagaacatgatgagcaagagaatcagataagtagatcagggagagtgtcacgaagaaatcaaactcataaaccatcttagtcatagtcatgttcagagcttggaagaacaaataagagccggaaactcggtgaagtgatcgtgaactctgatcaaacgatggttaaccagaccgaaggaacgggacaaaaggttgtatcagtacgcggttcgtcaaggtttgtgattggaatcaagagaacgtacagtgttgtcacgttctgtacggacgcattaaaatttccaagaaaacaacatcaaggccgcatcaacaacagtaacgaaatatcctacttcgagatatcaagaagaaaaaaaactaaagagagagaggggaacggtatatgtacgaacctgtgcgatcccccaagaggattgatatcccgctggaccaattccatctatgccgttgtccgacatcgtcccgtacacatgatcacagatcagtaactacctctcctaacatttcttcaatgatatcgcggcggcatgacgtacaagcatgaacgagtccgatgggcctagaggccttttcagtgagagacgagctctctgtcatcttccacggcgcagccggcgagcgatgtggaacgtgaacaatctctctttcgactcttgctcctccttttctggatggtctcagaccgctttgtatccgttatatagtcgtaggggagggaaaacgataagccgagatggacttcaaaggttctttatgagagaaaagatagaaaaggcctacacgttgtgccgaagtacagggatattttcccacccttgcccttcatatcagaaaaaagaatcagattagaaggcatagaaggaggctatcaaccaaacagcccaattctaggtatgtttttcgaagaattgtgaatatttaccatgcgataactctgggcaaagtgcatacgctcgcttcaagattgtttctgcccgatcaacatgcacgctgaggtcccaagaacccacttcctgacagcctcccagaacgacatttccatctggtcgagggatgatatctgtagttgttgtttaattttttgaggtatgtcataggacctgttaagttacaaaattcaagctggtctcggttaagcaaatctcacgttgaatcactcacagcacgatccatcagtgtaccctatccaatcaacgagcatcagtggtggtcagtgatatatgcaatattagacgatagatctttcatgtctcacctttgatgcccatatctgttttcacatggggagccctcacaagacagacttgtcctctgcaaacaatgtttatatgtaagactcttaccatcaacacgaaatttcaagcgctcacacggcaaggcgcaaacggacgtaccggatgggttcgacatcctgatcaagcactcctcccagactcttagcgcctatcatatcctcaaacccaatcaaagaatatgctcctgaccgatcagatttatacatataacgagatgaggatcgatagagacttaccgagacctgtacagttgaccactacgtcagccttggcgacacctggcataccattggctgcctccgagatactctccactcttcgccttatcaatttgacgccggccagccgaagttgatcctcgagccagggaagatatgtcgctggtgctagcgatagaatctgttttcatgataaatctagacgggttaggattcggcgagtagcttggagccgaaattatcaaggggcgtaaacgtacagtcgaagcacatcctgatttaactcctctacagcatagatcgtttcaaaaggtgagttaatctggagctaggataaaacagataaatgatacatactctggaagctcttccttcgggatcactcgaaactaagtcgagcaagacgatgagcatcagagatcagggtcagtgactttcttttcgagactggaaacaccttcacttcaaatattcacatcttcgaccagatcccgataccattccgcctcaatgtcatccgatacatcttcgagaaagtatctctttgagggaatcttcatcactagaccggtagggatgagtgacttgagtttgagactgatggttttcaattcacatgtcaaccgataggaaggagctttatctgaaggacgataataagactcactaagtggcctcctcccaagcgtttgttcggaggtcgttccagaactggaacaaattgccgtttgaatattgataagctttcatggcgccgaaacaagagaatacagtcaaacgacacctacactatgccagttggcgccagcccatggactggcaaacccctgagaatcaaggtcggttggtaaatctctagcgacaatagtgacctctgtgcatcgaaaatattgtgattggcatctctttttgaaagccgatcatagaaaaaaattatcggcattaaaataggctgtaccgtatccttccttggacaagcagagggcagaagtgcatcccagaacgcctgctccgatcactgtgtactggtacgaggaaaaggtcagtataagttgaagaaagcaggaaagatgatccgaatagttcgcaaacggcaggttacactgaccaactacgtgctttgacattttacgatatcggcaaatcctactttatcagcttttgtgtgtgtgtgttcttacctattccggcgttgatggctgcaagaagagaagattgagttgtagacgaagaggagcagggcagcgaatgtacgagctagtcgaatttgaaaataatcagatttggccgaggccaacgagacaacccaattctcatccacaaccgttcttctctatgcatgtttgtggccacatcaaacaacaacatataagatatacatcaccacattttgtactgtactggccttcttgctgaagatgagacaaatcaggaaggatggatgacggccaatcttacagaaagtgtcgtgtaagctgtttacacaccctgagagacaatacagttcgatacgcatcttcgttctatttctactacatactcaacgatggcatgtccgatgaaatagcgactcataccagggagcgttgacccagtgatgtgtatcttgactgatcacgtatctcgctgcttcatctgctccgtcgctgacggatctctagacgttgccggtcgtcgttctgtcctatcggacttgcccgatgtttttctttatctatagttttccagtttccagtttccacttcttcaccttctcttccaaccatcatcggtcatcctttctttcttcttttctcctttccgtacacacaatggaaaacaatgagagaacaccccttctcatacccgtgggtgcagcagctgtggatgcatcagctgctgttcccggagatctgtcaaaaacccgcttccggctactcatggccggactctggacaatgacttttgtggctgccttgtaagtttaccttaacgaccactacttgttgtctgctgcatcgttcgcagcttatcctcccttgactcttgcccgggcagagatggtactatcgttgccacccttgtatcaagtattggctccagtttttctgcaatggagagtgcaggctggatcggtacttgtgagcgttatcttttggctgctcttcttatctttctcttcttgacggagtctaatccattttttcgagaatatatctagcatatctactggccagttgttgcttcactcccctatatggacgactgtgtgatatatttgggcgaaagggaagtattgtgctggccggaagtcttttcgcaagtggaacgctcctctgcggcctggcagcaaacatgttcgtcctccgtccacggttatctcttatcgctagaccgccatccactctttgcttcgtccagtctaaggctatacctgactaagcatacatgctctgatgatgatatcaggaaacaattgatagtctttaggttcctcgccggtatgggtggaggtggcttcgcggttgttggttctgtcatcgtctcggatatcattcccctcaaacagagaggactctatcagggtgagctaacagctcagttcgaaacgcgttggtccagaaagtccataggactcatagtttcaccacttgtgccacacagggtacaccaatttgctctttgggcttggaggagctcttggagcgcctttagggggattcatcagtgatactattggatggtttgttcccttcgatatgtgttccactttattcgctgacaaaacaatgacaaccaaacaaagaatatgcgtgaactaaacgcaatctattacatgttcgatatcgttgcttgataggcgagcggccttcttaggtcaaatgcctcttctcatctcagcggtcagcgtcatctttttcaacacgaaggagcctgcctcgtaccttagcaacaagacctctaccgctgagaagctcaagaagatcgactatcttggaagtttcactttggtcacctctgttggaagtctctgcctagcgttgagcctcaagaccaaaggtttggcgaaatggagtgatggcagtatctgggggatgcttctaactaggtcagttgacttttcaattactcacctgatactcatgaagaatatttttaacctttcacttttcttcttcagtgcggtgtccatggtcgctttcgtacttgttgaatggaagtttgctgttcagccagttttgcctatgggtcttcttggccaggttcgtgcatatcaaaaatccttcgatcacgccatacactcttttgattgattctgcacttgccttctctgggtgatctctacagcgaactgctttgttctcccttatcgttcgttcgagatggtttctgattctatatgagataagatcactcttaactcactttcttatccatctgaattgtactttgctttgtcacagaccaatttccttcttgcggtcgtgacattctctattgtgagtagacttttttctcggtctcttcaaatctaacggctccagctgatgctgggacctggatatttaaaatccttcatcgaatagctttacaatatacctctagtgagtgtcaaagttaacctcagatccaatgaacagaccttatcattcttactcgacatgcttccactctgttttcattagttctttactgccgttcgacttacctcgaatgccgctgctggcgcgcacttgatcaccaactcggcttcagtctgcttcggatcgctcggtgccggatggtacatgcgccacaccggaaagtattggaagctgcagctgattgctgcactaggcccattgttctcgaccatcgttttggcgaccgtgtggtgagaatacagtcggtttcttcttcccgctcaagtctgtccatcgttaacctctttccaacacattttgttacagggattacaacactccggagtggattctcaacaccactcttattcctgctgtgagttgtgattcaaatgatttttttcctttcctcttgacatgtcactcaatcataattgctacatatctgaaattttcagggattgggattctcgtgtgtgattaccactactttgctggcattgatctctagtgtcgagagggagaatattcctgttgctactggaagtaagtgatcgtcttggtttatccgtgatctcgaaaacaagaagaaaacgtctatcgttgaaaggtagaggctgaatggattcaattgtctatgttacctcttcaaagtgtcttacctgtcccgaacgaccggtcaagtcatcggagtttctctctccgccactgcctctcaagcgatccttgagaagagtcttcgatcaaagatcactggtgaaggttcaacacaggtacgtccctccgtcatttcgctatttcggaccagtacctctacatgatctctttgacgatacatctgacgcccccttttctcctttctttgttcttgtacatcaaataatgtccttggtgtagatcatcaatgacattctgcactctatcgattacattcgagaactcccagcggagttgcaacaaatggcaactgatagttgggcgaccagtcttcgatacatctttgtctctcaagctgttcgtctcgaatgttccctattctcttctctcttggatgttacgaaaggtgaggagatagttactgacatagagttcacaacggcctgcgcgtttcttttgtctgtcatggcattcagatcttgtccttcatctgtcagtcttgttattcatgttggctacataaagagcttgcacgaaaactgactcttcttcgtccgctgtctcacattcaaatagtgctcgtctgtcttctcccaatccgggaacaccccctacctgattcggtggacaacagtacgcccactcagccatctactcccgttgaggagcgtgcttgaacgatgcaggcttgtactgggccaaaccgcttcatagcagttcaatgtaaaatatcgtatttcattcgaatgggagaagaagaaaccactcctagagctgggcgagcgtcacatcagtggacggatgaatatggtgtaaggtgtaaggtttgatcttttatcattatagatgcttatgccccatgaaactttatataaacaaaacaagaagaggaagatgcaaaagagcagcccaaatgtaaggaacgaaagatgtgacttagagcctctggatgacgacagcagtagcggctcctccctgtttttttaatgatgcaaactttgtcagcttcactcttacgtctgagaggagacattgagaaagacggaaagaacgtactccgttgcagataccggcaacaccgatctgtccgggctgaagagcatgaacaagggagacaacaattcggcatccagacgatccgatcggctacaaacaaaagagaggacgaaatatgaatggctgtgcgataatgagtatctttgcgagagagacaggatggatacgtacgtgaccaagagcgacacctcctccgttgacctggttggaatagcaatgattcaaattgatagatgctttagtaaataaaacatctgacaccttcagaaagataagtcgtaacttacgttcaacttggagggatcaatgttgaggatcttctcggcagcccgggcaacgacggagaaagcctcgttgatctcgtagagcgcgacatcgtcagcagagacaccggcgtttttcaaagcgatggggatagcaacggtaggggcgatggggaactcgataggagcgatggcagcgtcggcaaaccctggaagaacgagcatacaaggacgatgagcgagttgaatcatgaagcgagggtatgagccatgaaagtttctgcgaaaggagaagaagacactaaccaaggatcttggccataggcttgactccgtgctcctgaaccttctctccggtcatcaaaacgacagcactggcaccgtcgttgatacccgaggcgttggcaggagtgatggttccaccctctcgctggaacacaggcttcaaggtgggaacctttgagggaatgaccttcttgtagtcctcatcctcagccacaacggtctcgcccttggggcccttgagggtgaccggagcgatctcggcctcgaacttgccagtagaccaggcctcggctgctcgtcggtaagactcgagcgcgtgctcgtcctgagactctcgagagatcgagaacttggcagcaatgtgctcggcgcagttacccatggggaagttgttggatacatcccaaagaccatcggtctggacagagtccttagtctggaaacctccaaagccagggacagttcggggaacgaggaaactgtttttgttgttgtcggcggtcaaggcatagcatgagatcaactgagattcgagaaggataaaggccaaatagaccaatggctttacaattaaaataaaaaaccggcactcacggagcgttggacatgctctccattccaccggcaacgacgactccccttttctgggaacctccgaaaccaccaagcatcatgccctgagcggccaaggtgatggccttcataccagaagcgcagaccttgttgatggtagtagaatcggtcgaagcctcgcatccggcggcgagggcgacttgtcgagcgggagactgtccggctccggcttgaatgacctagaccaggaccggcagtgagtttgatcagctcggatttccatctcacagacgtttctgctaaagggaaggggagggtagtaacgtgtgccatggagagtgcacacagagggagaggcggagagagggtatataagaacaagtgcttacctgtcccatgtaaagctcctcaacggcgctgggctcgataccagctcgagagatggcggccttgacggcggtggttccgagctggacaccagtctgggacttgagggcaccgttgagagttccgatgggcgttcgaacggccgagacgatgaagacttcctggggagtgaaggaggactgtcggtgaagattaatagagatggatatgaagatggttagatcgataagacagaagagatcaagagggacatgcacgaagaggagaaggagccagcctgtgtgcatgcattcattgcagcggccatgtgtcgagaacgatgaggaacccgacgcgttagatccggtcagatgtgaccagaacgatacgatgtgtatttgtgtgtgtgtgtgtgtgcgtatactatactatactatactatactatactatactacgctatactacactatactacactatactgtcctgcaaagaacaaaagctaactcaccatgctagagtacgatctaatggaagcaagagatggacggatagaaaagactgggagaaggtgaatcttgatggtggtcagacggaaggcggcagacattgttaggccagcaggcggctcgtgcgcttttttttttctttctttttttttcctagtctttgttggggccttgtttttcagtggggcaccgttcgccgcgtgcgacggagagatgagagtgaggagtgaagagacgggaagctggctgggctagagaagtagaatcgtacgatctttcgtctcctcttctttcttatatgacgagacagagagacaggtggacggtatgatggtgagatgatgatgatggacgcttacaagacaactcggctcgagggaatccttctacctatcgtttctccggtaatgcactcgccggttctccgctcgagagaactcgaacgttttctttcttcgttctcttcgctttccgacggctgcaccgacgtgattgtagttctgttctctttctcttcaccgctaggcttgaatgttcactactatgaccatacatacatacatccacaccccctacacacacacacatctcaggaacccaccgtttgatgtccatcgtcccacaattgacgcgaggggaaggccgcttggtcaagtgagcagagagagatgacggttgctatggcaacaacagttagtaatcatccttgttaaccctaacaaggaagaaaaagaagacggttcagacttgaaaatcggactggccgtgtttttcatattctgctctaaagtcattctccccgtccattctttccgagcaacattacgcgacaacgagcatcaagtggtgagtgagaggatgatatatctatgtttgtcagactctccggtctcatgaatcccattgttaattcccgttcttcttctttctcatcttgtctcctttttcgctgctcggtcatctcttcttggtcgccacgcaagaaaattcaaccaaacatctgttcataaatcctttcatacctcttctctttctttccggtttcttcttcaaaagcaacactctcaaggaaacaaaagagccaaagtttcatccaatcgtgaaacaaaacacaaatgtcctccgctgaaactccggtcgccgtctcgacgggtctctcgatctcgccttcgacaacttctctactttcgacttctccctctggcgtctcgctcgcaaagtccttaccagtgccgcctcggccgagtacgacgccgattaaaggtcagatgagtcgcaggctgacgtccgagtcaaatccaagttcaccaaacggctcttcttcggtcaagcaaccaaagccaacgccggcgagcaagagcgttcaggatctcgtcacccagtttgaactccgagctagtccgagtaaggatgaggtttccggtggaagaccgacggcctcacctctcaaacgatccgtcagtgggttggcttcgagtttgaacggaaacggtaccagagtggctggaaacggggatgccgcaaaggcaactgctcctgctgctgttaccacttcgacaacttcgtcttcctcggaccacccctcagcgccttctccggtcacatcgccttcgcctcagacttctggtctgccagccgcgcctctagtttcggtcttcaccaagtccacccctgaggtctctacggcgtcggaggaaccaacgactaagggtgctaagcctattgagaccgagccaaagtcggctgatgctgctgtagccgttatctctgaatctgccacttcaacttctaccgatgcctccgctactcatgattcttccaacgctcccacatctgaaacccccacaactcctccagccgccccatccacagctgtcgctcctgtgagcacagagtcaacgaattctacttctccttctcctgccgtctcttctgccatccccgctgccccctctccctccgttcctgatgctactccgtctgaagctccttctgatgccccctcactagcctctgggccgcatccgttgaattctgcgtactgcctgttcttccaagacacgtcaccgacaaagaaggcgtcgtccaccgcagaggacacacacaacgcgtactcgcatggccaaaagttgattttcaccgtccagacggtcgaagagttctgctcaagctggaacgcgttgaggagctacatccgaacagtcgtgaattcgaatgatggcttggtcggattaaaacatgatagcaacctcaactttttccgagagggtgtcaagccgatgtggtgagtatctcttacgattcttctttgttcgcgcgtgaggacatgtggggaagagagaaagaaagagagagggagaaagaaagagcgcgcgcaactccttctcggttcaaaattaagagatttgacgagtgaatttgaaccctcgtacactttctagggaggacccgatgaacgcaaaaggaggccgactgactatcgcctgccaaaaaggtcaaatcgacgtgatgtatactcaaatcgttctcctccttgttggttctgtggtcgagatcgactcttgtccgacgacctcgtcaggaggtactatctgcggtgctgtcgcctccagacgaggaagaggggatcgaatcgagctctggcttggtggagagactacgccggatgcgaactggattactcgagtcaaaggtttgtctggaagctctgtgatcatcaagcaagcaagcagtcaattagttctgaccaggcgttcgcacacacattcccttttttcttacagatgtgttggcgacccagctcaatatgccagagattcgggatgtcaagtaccggaagcacttttaatcgacgaagccttccaaaggaaaggcatggttcgggttggacaggcggaagagtccgccgtcggtttgaaattgtatatatgcgtgcccattcggattaggatacaggaaatctttgttgtcacttgtaataagaaaagagagaaagaaagggaaatagatcgactgcgatcgagactatccccgcaggcgatccccgcaatggatgcttttttcatttcttcttctgatgaattttcgacttgccccgcgtaattccgcctgtgcgccaagtcagggcggacattgtgatatcttgcggagtaattagaaagaaggaacgattaaaaacttgatagttccagctcgaacgtaaacgtcataacgaaggttccttgggacctgtggctttgtagtctagaatgacgaccgacaccctctttcacatccgtcagctctctcctgatgcctctctccctctgaccccagacaagatattttttctttcttttttggttttgaaaaaacacagatatcggagaatggaagctttctctttagggggttccttatttatgatgatatcgtgcactgatcattcactcacttacttgtaccattgacccatcactctttttttctcaagtacacattacacacacacacacacactcactctagtcctttgcattcgttagatacactctcactcatttcttccatacaggcttctccaaagaatgtctcgctcgccgtccaacatgccagaccttccagaggaagaccaaccgggatcaccacaagtaatcatcactcggcctccagataccccggccacatcgtccggtgcaaaggacgcatcttcaacgccctcgcctgaacccagctcatccgacgagaaagttagggacctgtcagactctcccaacgggaagcgtgtccaatggcctgaggaacttgcacagacaaagtccatcccggccggtcaggaggtcctcgactttgcagagtccaactttgcacagtctggcagatcgtccgattccagagatccactcgaccaggccgagtctcatcccggtcaacaacctaccgatgaaagcccgagcgacgaacgcgcagagctctcggaggcagaggagaccaatctgctcgagagcatggaggtctttgtcgacccggacgagacaaacggccttccggtgctcaacccagagagggaggccagaaggatcagagaagaagcagaggccagggcttctggtaagcccggcctgttcagacgacgaatgaagaagaagaatgctggccagacaaacacatcggacgagctctccatgaacatcgatcactcgactatcggcgggggagcaccgagcggcgaatgggttgccccctctacttacgcaccgtcttccacccatgacggctccggttcagattctgaccgggatgaagattacgagactcgagagcgccggaaatttctgaccgaatggcgattgagaaactcccaagacccattcaaactcccgtcttcgaaccgtaaagctgtaggtgtctgtcctgattgttctttcatgtagtgcctcgatgactgaccagatttacgtcggatcctaccagaccagtactacttcctctcgtccaagctcgatcaagtctggcacgaaatcggcctatgcctcctccgaactctcagcctacatccgcactcccgccggctcaccccccatctctccctcaccatctgcgatcgatctgccggccacaactgaggtctccgacccgaccgggtctcctgggcaaaaaccgtcgtctctcggccagcccaaaaagaacaggctgcaaaagatcgccaatactccattcaaggttgcccaggcgccactcaagatcgtcaaatctgctgttgggacgccaacggaaaaggctctcaaggatatcagttactttgccggcgcaaagactgctcttacccctgaacagctagaggagaaggcttgggagaaggaaaagaaaaagcgtcagaagagggaagaaaagaaaaggaaggaaacccagtttgtacgtgggcatatgcctttcttgtgtccacatcacctagtgccttcccaagtgctaacccctatctctattgcgcggtattgttctgaataaagatcactaagcacgtcgcggaagtcgtcaataagcagaacttcctgatgaagcttatgagggctttgtgagttgctatccgaccggcagattcttggaagataaacacattctcaccgttctattcttccatttgtatgcagaatgatgtttggtgccccctctcagtgcgtagacctcagttttgaagcccaaaacagaccatattgaccttttgactttcattgccgtttccggttcatattcgtcttccatcatcagtcggttggaggcacaaatgctggccacagctcgaatcctggaaatcagttgtcaactcgtatatattccgagcatcatgctcatcagtttcgaagatcctctaacaaagtcttctcaaagcaaggtgtgctattcattcggtctctcgatgctcataacagatatgcttacatccattaccctttgttcagttcttgaaacaggcaaacgggcttgacctcggcaaactcctatcggcgcatatgatttattggaatgtcagtacatacaactcgcctccgtacgactttgtcattcttgaagactaacggtacacatgttgaaactgtaggtggtacatgacaaaattggagtggacgacgctagcgccgccttagatgttctgatgacttccaaaccaacatatacattatggcagaacttacttatcggaggtctcgcctcagctttcatccttccttctgccttttacggatctttcatcgactgcttggtgaccattccgctagggatgcttcttgtctttgtacaagtaattgtctgcagaaacgatctctatgcgtctctttttgagtgagtctcaactcgttgccttctgaagagaatttttgaagctgatggtagacttggctctcttcatcatcatgaacagggtggtaatcgccattatcaacaccttcctggccgctctcttcagctcctggggagatcaactctgcttctccgccttggtttctggaggtgttgtcttaatccttccaggattcatcgttctttgtggaagtctaggtttgtcttcataacctcattgacctaatgatgagtaatatttactcatcatgtgtagtcgtcaactctttcttcaatagagcttggaaaccgttccatcatctctggctccgttcgactggtattcgcactcctttatgcattattccttggatttggtctatccatcggaagtactctatggtatcgttcctattcagtgtactattgacagctgtgtatcttagtagcctgattgtaattgcacccacctcttctgatacctcgaatactcagggtgagaatctctggacggccgatcacatggaattatggtcagttattacgttctaccttttatgacctgcagttatgtctgacaaaggttgtttgacacagactgctcaccttatcggaaagacaatccgccttggtacagggcaaccattccacagtggtattatttcctcacggctcgtaagtaacattcaagcttaaagccatttgttatgaacctcaggtgttgtcttgatcgagagctgatagaattcatttgacgacccttcccttgacgatgtagcctctttgtgagtttttgtattcatcagccatatctatgaatctcacaaattgatgaaaaaacctacgatatgtctttaccctctattccacagtgtgcttctactcgctctcaggaatggacagcccttggttagaaaagaaacattaattatggtcgttattggctgcgctggtctgttttatctttgcttctttgctcccgtgcgcgttctagtgctgatacataaaccatgttgtctgtacaggttttgtggccaacacgttctcgggtcgtgccttcaccaacagacccgatctctgctcttgtatcggagcttgtaccgtcggacttttaggtggtctgtacgctcgtttcagccgaggttccgcttttgtcatgatggtgagtgagagttacacactggtcttaaatagtatccaaggactgacatgtccgttttcatcaggttcccggaattttattccaacttcgtgcgtatatccctgcctttccaggaaagtaacgaaagtttgatgtgactgactcttcttgaaaacgttctggtttctgtttgtgtagcatccggtctggcggataacggtcagtagtcctttattctatacgagaagcttcgactaacccaggtttgtatttcttgttacgaatctcaggtggtctgttgaaatttgcaagtgaagcgactagtggcgatgcggattcttatgcttcaggattcgatgtggcagaacagctcatcgaggtggctttagggctcacgtaagtgttttattcgccaagaacaaaatgcattcaaacccgctcgctcttgatattgactaaatcttttgacattatcctcattatatgatcagtgtcggtctattccttgccggtgctttcttgaatttgttcgtcagtcaatccagacgaggaacgaacttgagtagtttctaggcatacatccagatatatttcaatcagaccgaacatgcggtcggtgttcactatgcgctggtcgcttggatagtttctgatataatgttttttaacccaacaatgcgcatgcctagactgacgataatcaccatgatgatacataaagattcacaaactcaacacattttcactaaacctaacactgacattaggaagaagacgatgttgctttagccctcaaatcccttcctaccatgagtccttcttcccgatttcactgaactggctgaacttcctaagtattctggaaggatttgctcgacagaagttaaaacttcctgatcggtcttgattcctttactagggggtgaagaagacggaagatcaagaggggggaacgacgagattacttgtgcgaatgaaacatgggtcgaagggagagggtcggtgacgatattgttttcgcggagttggttgacctactcatcgaccatcagttcaaacacgtacgtaatcatgaacggatgttggtcagactgagatatctgatgaaaaaataaacagtacacctgtgtacatacctgagatcgagtgactgtgagcaagttctccgggaattgttccatgaccaagccttgaacggagccaagcgcaaatgggacgctaacaacaggcctagataattctgcatatttcagtgtggtctgcatgagttctttgtaggtgtagactgcagatcggtttatatagtgagcgcgtatcacataaggctggtatcagtatcgctggttgaagcacgaatcaaacgttccctgtatctaaaatggattgttgagattaacaaaccttttggaccacctgcttcgataatcttgccgtcaacaagatccgctatctccggatttcttcggctccggctgacaacctccacagcccgtgcgatatctccagcatacacctgaccgtgtgtacatgcgcgtgtgaaaagaagatgattgagatgagagaatttctataactggtcagaaatataacgatgctcacaggctggaaaagggatgcaccacctccgaacactggaagaaacggaagatattttgccagagtcgcaaatctctgcaatatgctcactattttatcatcaacatcaggctgacgctttgctgcatgtgtggaatagactcaccgcaaaaaatccatcacctggaccgaatattaaggagggccgaatgattgtagccttgggtgactcggagagaacggcttgctctcctagtcctttcgtcctccagctatagtaattagaccatatatattcttcagatcatttggggaaaagatgtatagatctttcgagtaagttgactgactagtcgattgacgaggttgaatttgccccgatagctgagatatggatcaacttggcccctgctttttgggacgctctcgcaacctacaagagaaatgaaagtgtacagacacaacgagaaaatgttgagcagtgtttcaaacatcaacctatctggcatgatctcattcaacatacgttttcagctcccttccattgcacggcttcaaaaacaggacgcgacccatacaaaatcctagagtgaaccatcaagtagaatatcagcctactatgcctaagactatgttcgctattcgagtacatcgagaaaaccagaactgaccccacaagattaatcacaacttcagctccctccaaagcctcatctagccttttattctgtcctctgtcagtaatatcgattccggtatacggcgtggaaatttgtttgccgagatgtttgaggtctgtgtagagcttatcggggtttctcgacgcaagaaatatctgagacctggaagaagcggcgatgagagttttggtgatgtatttggctaaagcagcgtgacggttgatgtcaaagtaaggttgtgtctctatacagtgtaggtgtcgagaacagaagaaacgaacctaagaaacctgccccaatgatcacgatcttagtcgatggcggacgtgcggtcgacatagcagcagtgagaacctgtttaatagggtttgttgagagaacgatagtagatggtgaaaggttggacaaaaagcatgaaacaaggaagtcgactggtaaactaagatgaaaatgatttaagaagttcacaaacatccgatcgatcgcgtggacgtgacgtcagcctcatggatgcacagattgtctcttgcatttcttacgttcttctttttgcttgctatctgtcagctgttggtttgaaatgtacgcttcatttgtgaattatgtatagaaaacatccaaaaacattttttattctcatctagtctctacatgggtcttatcactctgcaggcgtcttgactgcctcttcagtgctttcgggaattgtgagaacaacctataaagtcgacaaaaattagcatggagtgacaacatgcaacggagtcgtatcaagcaccaaagtcaaaaatggtttagccaacaaacctttccaatgttttggttgttctcaagaatctcatgagcctcctgaactttgttccaatctagttctttgtgaacgacaacatccaggtcgcccgtagcaaacttatccaagcatgtatccttgaaagaagctaccaatgcgttcatgtagtcttttggtcgagatcgaagagctatgcgggaggataggattagttcatctgaacgagatatagcgaaaggttgtaaggctaagataggaaacctactggttccatgaatagaaagctttttgaagagaagcttggccaaagacaaggtagctttagacctggttgaccaaaagttcaacagtaatgttaattgatgaaaaaattgtgaccatagacacaagtgtaaaattcgatatcaaactcacccggaaaggaatcccagacagatcatccgtccttctttagcgagagaattgatgtttttctcgaagaaatcctgcaatcatatcacaaccgactgtatgaatatctggatattcactattttcgatcgtgagaactctaacctttcctacaaaatcaatgacctgttagcgaagaaataaggcaaaaattagtgtgcggtctgtcgatatcagtttgaagagcatggtgagaacaggaccgacaaggttcactccagtgtttttggtctgtcgaagaatgatctcgtcaaactgttccgttctgtagttgatcctatgatcaggagcactcttcatttccgacagcgcttggagtttttcctctgatccagcagtagtaaagacttcatgtgcccctagtgatttagcaagttgattggctgcaatccctaccgcgccagctccagtatgctacagcgcaggagataacaagtttgcatcaatgatatgctttcgtgtacaaggcatcgaaagagacctactatcaagactgattggccacgttcaaatttcccagtctttttgagagcatcgtaagctagaaattgtatgaaaacacgaaatcagacaacagtcaaaaacatatggtttgatgtgcagttgataccagtaggacaagaaggacgatataccagtcaaatatgtttccataaccccagcggccttcacgtgagacatataatcaggcttttcaatcagagtgccaccagacactgcaatgtactcggcatatgcaccctgagagatcaaagtgacgaagatgaataggcaagaggtcaatataattacaaaaaaggaagcctggtgatcaaacatgttgtgcaaactgggctcagaagatgaacttcccaacaaactcaccccgtacgctagaccaaatacttgttgaccaggcttccaactcgagcttcgtgaagacactatctctccagaaaactcaacgcccatgatagggcttgcgtcaggaggaacaggatactgtgatgtggagagaagtgagacgggttcgagacaagtgagacgggattgagaaaagtgtagggaggaggagagaacgcacatttcctgttcgctgaagagtgtccattctattcacaccgatggctttgatctacaggaatttgatgaaaatcaatttaatggaaaaacacagtaccctagatatgatatcaatcattcatcaaacaagaaaccgggttccatctaaccttgacgaggacatgatcaagcttgatttcgggcatatcagcggttccgatgtacatcgcagatgccgggcccttgtcaccctttatctggatagctcgcattgttttcggaatgacatattgaggctccttctcagacgttgaatttggaagtgttgaggtcttgttcaaatcaacatcagaagaatatgctctatacgagcatcgagagtgatgagaagaccgaagaagagatgatactgaacgggtaccaggaacagctttgagcctgctggagatgagttgcatagggactagaaatctggacatatcgtagacggtgtctgtctgcaaaatatatgattagtaactcggaggtttgaacgatgagagggtgatgggtgatggaatgtacatattcattgaaagatgcacagccagttatatcaggcgattcgtacaaatatattcgtacgagattagctgctggaagcaacctcaaccgattcgtctcaacagtctcttcatcgtctcaagcatctcccttctagaaaaagagaacacttatagctgcctttcgttcttctaatctcacatcaccatcgtcatcctacgagtgtggttcaagccagctgaactatggaacattgggcgctgcgagataaaaaatctgaccgtagggtgaattgaacacccgtcgtccgcgactttgcgtttcgattgaagaaccacaagcggaagtactaaccactatactatacgatcttgatgtttgctaatgggccatggcgacctagggtgtcaagatgcgcgcacacattactggaacttcagcagctttgacattgcttctgctgtaatttgtttctccttcttttgccatcaccctccgacattcgtgtgcgcgaagtcctaggattttgcgaaaagttgcaggcttcctagctggtcccttctgttttcctgatttctcagtccgtttcatcgagacacctggatggtatgtatattgctgtgggaaactagggaagatatggctgggaacaagtgccagaacgaaagatccattttaacccaaatgagtaacaataccaatacgaaacttcaggtttgctgacagtaacccctatcgatgcgttatcgcccatgccttgcgattatgcatatacaacattggcttttcccagatcgtgaagtatgatggcatatggtgagtcatctgttttctcatgttttgttatataattgtttgtacatgcatggaaatacttctaacactctgagtgtcctcgtacaggattgatatgaacgagcccagttcgttctgcgaggggtcttgtggctcatccgccggttggttcttttcgttcgatcacacgtcaaaggcaactgagcatatgatctgacctctatctgggtgctactcaacagacctgaacaatatcacccctccattcttgctgcccggacaacccagtgctgtgggcatagccgatcagagtaaccctccgccagtatgttgcttaccacgaccgtagtaccattctgcatgcccatgaccggtctgccgaacgacacagggtcttccggtatgactatgtagtccatcagtggctgatatcattctttatcgcccatccgtcgcaaactttgagaagcttcccttgagtttacacctcgtgtgctctcgtgtcctcgaccccactcctagagcttgtgagactccggttttgttatttgatgtttttgacttgatcgcactgataggtcatttctcatcgcttctttttcgttcaaagaagatcagtactgatgcgccccaagttgtagcacctcatacccatctccaatctaccctaccctcgcttgatttagaggcggccactatcgctatcaccatccctctcactctttcctacttctgaaccggagcaggtcgctataccatacaccggtcccgtatatgctctcggagactctctagccggtctgttagacatcttccagaatttatggatgaagccggatggcgctaagcagttgttaatcgtgaaggaagagatggatgagtttggtgagaaagcagaaagaaaaaatcagcaagggtcgagtgcccatcgttggaggcaaaatcttaaatgtaagttaaactggattggagacaaacaaagctttcccaatgatgaaaagcgagattttacaagagatgtcacagcaaatctagactgaattggcgacgaatgtcaaagagacttacgcaagcctcgaggtttccttactgcacagggaggaacgactgctacttcaattcaacaagtttttgcatgaccaagatacgtccgcttcctccgaagctgatgtctgtaagctatactcaactttcccttagttttgtcccaagacgcattatctcctaacttccttccaccactgtatcaagtcagacaccttcaagcagaccagtgcgctgaatataatgcagcgttattctggtcatcatactggcctactcacgttggacggaggtacgttcaatattcaagtttgcgcagatagtcaaggtgtcatcgatgctggctacagtgcgttaggttgatcgtttcacttttttctgctgctgtctgtttcttcgaatatatcgtttagagagaggtcgttgagagactgagagtgtagctttgtttgctctgtcatcagctgcctggcaacaaggagatattgcattcaggaacattctccgaatgatcaggaaggagatctcggaaatggtttcttcagactcgaaccaacccggtgactagcttgaagcttgtgcgtccctgtcctcccctctgccgatctgttctgtctccgaagctcatcggctctatatatatcattaacgtacctgtcttgatcgcgtgtacagccaacagatatgttccagaagccggccatcaagctcacactcggtctcaaacattgggctatccagaatgccgaagatctcactgaaggcgatgacggcacgaaagatctgggtgccgaattgatgtggacacatatgaagtgtgacctgacggacaagtgggcctgagaaggaaaggaagtttaattgggccacgagaagtgtacatcggttttgtttatcttctccttgcatcattcattgatttatagtttgttagatagtcaccaggatcgaagcaacgtatgaaatgatcggctccctccaggaagggcggcctccgaaagctgtgccgaccggcgtctatctggcttggcatgagactcgtgaactggttcaggccggatgatctcatgtatgaagttgatcaagaagtgtttgttgatgacatccgggtatcatataaagcacgttgaactcttcacaaagctctcaacctcattcaaccgtgttctaatctatcatctacttcttattgatgtctgactcaaaggcgcccaactacgaacaaacgccttcctactctttcttaaacgcttccaacgggc

SEQ ID NO: 607 - DNA, 775 bp, Xanthophyllomyces dendrorhous
tgtccctcctttccatagtcaactttccatttctcacatcaccgggttcactcagagctcagagactgcagcactcatgaaccaacggctcctcaccgagttgtcgtcgcacttcccagacccatctgatccatcagccaaattcgatcttggctcagatcagctgaacgtagagcgcaagactgaagttcgagagttcttccgaggaggtatgaagggtgtgcaagagatctgggacgaccacagcaggaaaatcgacttggaaattagaaagaatgcgacgttcgaaaagattacaaaagaggtttgtaaattctattctcttgacggttcagctattttcatggatttgacctacaacaatatgtatctgattttcgcatttatcctttcgaattgtctacgccttacgacggaagttctggggcaggtacgcctcaaccgaggctcgatttggagttgatctaactggagcagtgagggctctatctgttgtctattgtaacgcttcttccgatgcttaccaaacctcgtccccgcttgagcaatctatagacattgagacttaatctctccatcgaaaagatgtgagcctgctgactttcctcaggatacgatctcatgactgactctttgcgacagatccaagattggatggacaaacccgacttttttgagtaccaagcgcactgtaatcgctcaagcgatcgcgaggtctgttgatgttttcttccccggtggaaatccctgcttatcactggctctcgttgaacat

SEQ ID NO: 608 - DNA, 411 bp, Xanthophyllomyces dendrorhous
tttccagtgatctctggctgtggaccagctgacgcatatgatgcacacgccgctccagctggtgtatatatcacaacatatgatgaaggcaaagtgagcggatagtcgtgacggcggttagagcagtcgtagtcgtcgccgtcagcagcatgtctcaacatgaagaatgggtcattcaagccagttgctgatatcttgtctatcgatcacacactgaaagcctggatggctcgaaagttttcagcctttactgtacatctcgtccatcagactcgtacgtctgatggttgctgacagcagttggtactgggtcagtccatctgtttgccacaagagcgctttttagaatcgcagctgagttatgcgatctggctgatcgtcggggtctcaattctcactgaaatagagtca

SEQ ID NO: 609 - DNA, 45947 bp, Xanthophyllomyces dendrorhous
tcctggttgatctcgttttatttcatttcaatttgtttcaattttttatctaatcatcttctttcttcattctttatcttatcctctttttaccttttctttcttgtttttccttcatcatcttatcttcacatcgttgtttaaacagcaacgatgagtgggagtgttggaattattgttggaattatctgttcgaatccttttctcgaactatcagttcgaattaccttctggatttctttatgtcggaatcattccttagatttgttctcttccactttcaacccattctgtctcagtcgacatcttggcagatatcttcttccatcgtggctgtttctcttagtgtcgtcttagcttctctgtgagggcgaaagggcccgacaaccgtttgttgcgacttggttggctgtagagttttcagatgaggatgtatgtggaaggctcaagctctcgaggatctaggaagatgccagagtcataggcatagatgtaaggatagataggacgaagatacttcgaacgaagatgacagaatccaaacttgagagaaaagagaaaagaggaaaaagaactatggggaagggaaagcgacgaagtcttgtatctctttgtcgctcggcatgtatgcaagcctgaagggatgcaagatggaaagattgcaggcatcaagagtgtgaaagataaagagggtaagagcattgagaaaggtcagaggtaagaacacgtattgtcaagatagtatgcaaatgcatgcaagatataacacgcggtcagattcctgacacaaaagagggaaagagatgaaacgtgtcgggctgtaaaggcggaagtgcccgacaatcgctatgttataactaggatggagagtgatcggatttattcagtttgatcaggttcagttgcaaatttgctacgatggatcggaaggctgaggccctcgaggatctatgggagtaccaaagacaaaggcatacacatagagatagataagacgaaaggtgtttcaaacaggggcgacataatccacggttaagggaagagagaacaggagagaacggaagaaaaagggaaagaactacatgggaaaaataaagcgatagagtaattgtatcatcttgtcgctcgggcgtggatgaaagacggaaaggatgcatgcaggtatcgagagcgggaaggtgggaaagacatatagctagagttgtatacacggcatacaacgtaggtcgcctggttaaattcctgacagtggttgatgagtgatgtcttcgctcttccttccagaacaattctcgtatataattccacaagactgtctgtgagctcgcttcatgcatctcttgattttcgtgcgagaatgatccgagctctgctgatgtttggaggagaggtgagcgattcttgtgaatattttatcacgacgcgtcgcgtgtgataaacaacatttgcacggaagataaacacgaaacgctcaaacaggcatgttgggtccttgattacaggatcaacactcatctcatttgattatcatagactcgacgtcaatcctgaaagcttccactgaattagtggcatgctgagtttcagtgtaatatcttatcatcaagtctttgcgcctcatctacacctcggcctttctcaaattcctccgcttgagacttttcgtgttgccatctttttctatcatggatgatagtcgcaattcgccttcttcgtcgttctctattgccatcagcaaaggtgcgttatcaggtttgttatagcactttctcatctgctcgggttttaattggaaacaaaaattacttgatccacagatctacataccgtgccaccgacactttcctctctgtccgccgtagatccagaccaatcaatactgtaccctaccaatatcacacaacccgaggagctgcttgctttgagcaaagagatcttcgactcatacgaccgacatctatccactgctactatcacccgccagattcatgaaaagctgatcgaagagctcgacacctcgatcagttcgaaggaggcggagcttacacgtctcatgaattgtcttcaggtggccgaaacaaaacttgccaaagtgatacatacttcggatgtacaggatctcaaggtgaatctcgaaattgaactgtctaatcttctcagagcagaagccgcttttgaggaagagagagagatcagactgaacctggaggcgaaacttcaaaagcttcaagaggaagaggtattgagaaaagatcaggcgatcaggcatcaccataaagacgatgatgttgcagaacagtcacgaatcgatgtgctgaacgcagtgatcgacaatctggagaaacgactttttgaatcagataatacaaatcgcgatcttcgtgtccagttgagtgagaaaacccgggtgcttggtgtgcttcaagagaaagtgagtgtcttcagtcaggtcatcacaacatcagaaaaacgaaagaggaacttaccatatcacagtcaaatgtcccgaccccaagagagcagcttgcaaccatacagcctataacttcttccatcccatcaccagcacctatatcagttgaatccacggccacctctccaaatgatctcggatctcaaaaggcgataatcgctttggctgcatctcgtcgcgaggtcgctcaactttctttgcgactccaatccttgacttctgcggccaagtctgatcgtgatacacttcaagaaactcaatctgagcttgaaaaccagtggaagagagcggacgaacactatgatgacatacgacggatcagagttcatcgtgaccaattaatcgaaagcttggccaggtccgacactgaaatagcagacttagaggggagggttgctcagacagaatccgaacggtacgcgttggaactcgagcttcaacatttcaaggacggtttaggagagagtgctcaaattaccgaattacaaggagcaaacggtgaactggagatgaagacaatccagctacaagatatgacaaaggtgagtgctctaaatcttctcgatgcttacatctaacgaactcgagacattgtcgttgctgtcgggagactcatgcggatttctccaaaaaatcttgctcctttgcgattcagaaggcgcacgaactctcactatcacttcaagcagctcttcaagaaataagtgaactcaactctcgactcttgtcaggaacagatcagtttgaccaactccgcgctttatacggggaactcctcaattcacgcgatcgttacctctctgagtcgcaagagtttcagtctcaaatcgttgtctatcaagacaaaatcaacctactttctacggatcttacatcaaccaaacgaatcatttcaagtctccagcatcaaatacaagatgttgaggaatcagcttcgcaatcaattcgcgacgccaaaaacgcttacgaaactattcgggaggacagggatcgcagattacatcaaatcaaccaagacttgtgctctcaaactacagctttggaatccttgttgatgacccagacggaggagcgacgaaaatttgaggatattgtcagggagaaggcatctgccgaattggaagttcaactgtcaaactttcaatctggggcaagtagcgttgaacttcagaggttaaataagctggtaaatcagttgaagaatgatgattctatcaaggaggtgaaaatcatgcaacttctgaagtcgaaagctgagcttcatgaaacaatggaaacattagaaatcgctttggactcgaagcaacaagaactcgaacttgtacgtgtcgacaacttgtctggttttttttttcaatgttgttatttgatgattggttgaaacacattcaatgaactctaaacactctgacgcaactgcatttgtgccggcacgataggtcaagcgcaaatttggagtacgaggggttgccggatctgtttctgcaccggaccggacaaagaccatatcaaatcgccgacaatctatcgatccatctatcttcgaagaccattccacaagagcgacggctacaaagacttcctcgacacccctcaacattttgacaccagttctcactagtcgaacaagtcgttcacgctcatcgctagccatgggtacccctggccttcgtagagcttcggcctcttctttccctgtagctcctctccgaaattctatatcgtcagcgtcgacagatcccgctcctccgctttctgatttgtcaactggaacatccaccatgatggtctcagactcttccactattctgaaaaagggggaaaatcttgaagcttttggtaggagtgagttactatcgtcttcgatggatctgtcgagtgtacctcaggataggtctgataatagatcaagaaagtcaaggttgagtcggtcaacatcagccaattcggagagctcgaagaatttggaagacaaggagaacatcttgagattgtgatttgctttcaacactttcttctctttttctagggagattctgatctttatgtcaaatctcaatcttctattttgcatcttcgaaattgcttctgtcttccttcttcgttgtaacttgactcaatttgacatctcgaactaattcctgttcatcgaattatttgtataatagtcttagatatagacaaaataattcttttcgatagacctttacacctatcatcatctaattgtcaacgaagacagagagtctgtagaccacgacgtacagcccatttgactcatttaggctaggtgaaagagaaaagatacacatgtgtgccgcacggttgcatgacatttgatgtatgtcctagaatatgcttaatgttgagtatgatgtacagacatgaacaaggaaggttcaagcaaaaagcaggagagtaatagagtagtagagatggagctaattcacagcggcggacaataaagtctaccattcaaaatcagaacttgctttggcaaacaggtagtctttcccgtttacatgagccattccatccttgaagatcatcttccacttgttcttcacacgctggacctagttatttgaaacaaaacaagaaacagaggcaggaagggataatgtttgagaaaagacttgaagttctgatgtgttcagacgatgacttgacaacttactttgtcgtatacacagaacacgatatccattccctccagagcaccggtatctgcatccttccctacttcgtccgcctcgtcgtcagaatcatctaactcagagttaatttcttcgtcgccaggatagataccctgggcgttggcttcgtatggtacaggtactgctggtgacaaaggtacagcaggcgtgacaacggaagttcgttgggggggctcttcggtgtctgactggagatcaccggcagatgaactggatgcactctgttcattagttgtggccagcgacagataatatgtaatggatggtttgaaaagaaagaagtcttagccagggcttgtgttgttgttgttgtgatggttagttgatagtcagaagataataggcacactaaccctatcatctgagtcctcgtcctcatcgtcgtcctctccacctcttagtctcattgcatcatctccacctcccttcaaggagccttgccattcatccttctttataggaagtccagacagcgatgaatatgggtaggatgttgatgaaggagagtgttctgaaggaagaggtgtaggtggagcaggttcaaagtcggcaacgtgtgattctagaagcttggattcccatttctgaataaaacgcggggtgtgatgagtacaatgatattgataaacacaagccagaaacggcgacagtagactcaggagtgagcttcaattgcgttcctcattgtagagtttagttggcagaaaaggatgatgtgaagataatatacaatagggggatactaaggacgagatgattttcttatatgacgatggactttgcaactgacctgttggagcagagccagcatatcctcctcgacaccaaactcgtcaaaatccgctcgaacggattgtactacatcatcaataatgatcctgtagatgtttggtacgattcggttagacatgttgagtttgattgaacaagagaggatgatcaatcaaggcggacagggtggcgaagatgggagtttgaggcaaacaaatcaagtggcaatttttatttatactttcttcttcctcctcttttctgtgcttgcgaatctcatcttttcgcactcgtcttcaaggctcagtgaaatttattcacttcataaccgtaccagattctggtttaagacattcattatatgcgagcatacatagtactgttacatgtttcatttataatatggttttcgttattattttattccggtacatcatggggtttttcaatgcctttagccactcgataatataccacgctcgaatcctttccaaccgaggcagtatagatgacgggagggtccgactctccttccgtgctaggtgtacattctttagattgaggaagtccagcttcaatatatgctggatgactcaacagggaagaaaacgttgtcttgaacctaagcgaatgtagcgttgaagagaggatatcaatatcagtaaggagtcgatcaaaaacatcagagagatgaacttctaaccatttggttgacaatggctgattgagcgccatgggaatcatgacccttggtctttcatcctcttttctccagccgagcagaaacagcctgatctccttctcgtccaaggtagcagtgggagacgtggaaggctcgacaagaatcgaatgtagttcaactcgatgccatttctgagcttgtttcaacaaaagttcacttcaaactttgagttcgatacgagaacgctataggcacatctctatgaggacagaaaatagactgacacaatgtcaaatcattgtaggtgatgaacaacgaaccggcttgagccggagcctgagtagcgtagggctctaagatcttgtactattgttatttcaaccgttcgattatatagatacaataactctcagctgctgtgtcattcattccaggacgcgcaatccggacgataactcacagaggaatgaaagtccatcgttgcggtgaagtgcataaaactacgaaggttcattgtagatgcaaacgactttgagatacacatatataaacatagacgaaaatcaaaatttaatcagataatttatccccgcggtcgctccgctccgctcgttggggaggatgagagcagcaagcaactacaaccaaccaaactggcccatctcggataccttttgtgtttcttcgaatctctccatcgcccataagcctcagaccaagcccttagcatgctcaccgctcgatcttttttgcgaactctcgttaagcccgcccatggtctgatctacattcctttatctcgaatgcgaatagggaaagaaacactcgactgatattatacttgtcactttttttcttggccaatatttataccacagcgagcttttcgacgtcctccgtcagattggctgcctccggtgagttttatttccagcagcatcttgaactagagcccctctcatgcctcgctgaatcccataccttcctcattttttccacgttttgcgtttgtcacttggaatccaagcttttcgatttccagccatgtaagttgtgtgaattacaacattctctgtttcatcaatgaccatctgaccaacctgttctgttgtcctgtcatacaaaggtctcctactatgactgagggaggaattgctgagtggaaggttaaggagggtgacgtattttcttcaggagatattctgcttgagatcgtaagtcatttcgcttgacttcgagcagcggcatgtttatgtatcgaccgttacagttaaacatatcgttcaatattcattatatataccataggagaccgacaaagctactatcgatgttgagacaactgacgatggtgtaatgggcaagattcttgtatgttgttctctttatcctgtcaaccctaagttggacaaggttggctttgataatatcaaaacgtctgtgtatgatttatcaatcgtctttaacttgccattatatagattcctaacggcacgaaggagattaaagttggaactttgatcggtatcttggctgaggagggagacgacttgtcgtcactatctgccgatcagttctctgaatctgacgccgactccgcttcgcctccttccacgcccgaatctagctctgccccgtcctcatcctcctcttcgtcatctatagaaccctcgacctcatcgtctcccagttcgtcttcttctcatcactccgcctctgattactcccatgcgcaagctcttctccctggagttcatcgcttgctccttagctccggcctcgagcctaacgtgattaaggggctgaaaggtagcggaaagaatggaactctcacgactggagatgtattggttgcaatgggcaaactgaagaatgtatggggaagcgttgaggctgagaagttggagtttgatggaaggaagggagttttcactcggtttggagtatgttcaccctttttaccttctcgactatcatgtccttatcgcgtgtatgctgtagacaaagtcagttgcatcgtctcacacacattctgactcttttcatttctttgtcctattcattttaggcttcagccgcccctgcggcgtctaagtccgatgtccccgccgtcaagcctagcccgcctcaggatcctttgtctcttcgacaagctgttctgcagggtcttgtcactcgagctcagcctgcatctgtcaaggcgcccaaagttaccttcgaagatctgatggacgattatgttcctcacggatcaagatcccagtccaagccagcaatcgttgctgaagctaaggtgacaccaaagaacgagtacgagggactgtggtagtctatgacctggttctttttctgatcttctttgcttatcattttgagagaaattagatagtgtatgatgtggtcgttggtgcagtgaggtagtctgaggggtgtagagcaaatgggtttcacagttctttcatcatattctttctctttttgtggttatttggtctttctttaattatccattcagtatgttttcttcttattctcaaacttatcgcccaagtatctgggaaaaatgaagtttgattgtagaacctataggagacgatgatatctgcagaagttgacgcatactcaacaagtctgaaatgtcacaagcatagttacagtctgacccgatttacgcgtaactaaatcgcaacaggtctttggcctatcagcagtgtgccaatattcctcatcgttctctttctcaaatttcctctcttccgcagcagaatccaacctcatcatttttcattgtcttctgagaatttagaacatcatacatcatccaaactctctgcatcctgtatgttcaaacttccttcgttacgattctgaagtcgtaaattctctatataggaagagtttgactcgtgttctacatcgtcttacatatttcgtctgcatttccgcacttagaaaagcacaaccaaaatatatttaggcatgcttcttcgtctatccggcgctcgctctcagttcaacattagacggttctatgctacagcatcgactcctcaaactctgattgagaagatcgtccagaagtatgctgttggtcaacccaaggacaaaaaggttcgaagtggggactacgttatggttggaccagagcatgtgtgagttgaggcgccggcggatttttcctaatatcaccgttatgccgttaaggcagattcaacgcaatagcatcttttcaagattagaagacgagaatcgatagagcagccatagctgattcgatatgattcatgcctttttgacaagacggaagctgaaattagtttttgttcatgtgaaatcaataggatgacccacgacaacactggacccgtaatcagcaagtgagtcatacaagttggcagtgcttggatcaatattttgctgagacgttcttacgtccccatgcttcagatttaaatcccttcagatctctaatattcaccgaacatctcagcccgtcttcacacttgaccacgatgttcaaaacaagtctgagaagaatcttaccaagtatgccaacattgaaaggtttgctggagagaagggtatcgacttctatcctgctggaagaggaatcgggcatcaaatcatgattgaagagggatatgcttggccaggaaccatggttgtggctagcgatagtcattctaatatgttcgtcaagccttaatatatttttaaattcacacagtacattgtgccatcgaaaaggtgaatgaacaatctagctaattctcacgaatgaattcaaaggtatggaggggtaggttgcttgggaacgcctatcgtccgagtgagtcgtttttctattctgatattgactgccgttcatggtgtctaattgcaagaaagcccgcttttatagaccgatgctgctgctatctgggctaccggtcgaacttggtggcagattcctccgatcatcaaggtctcccttcttgggcggctcgctggaggagtgaccggaaaagacgtgatcgtcgctctttgtggaaacttcaatcgcgatgaagttctcaattcagtcatcgagttcaccggtgacggtgtgtctacgctttctgtggatgaacgactggccatctcgaacatgacaactgagtggggagcgctcgctggagtatttcctgtggactctgtattgaaggaatggtacgaggctcgattgccagactcttcatcgctttctggagcccatgctcgagtgaacgcatcgcgactttcagaattgtttgagagtccagtgactgctgatcctggagcgacgtacgccaagcatcttacactcgatctgtctactctagttcctcatatctcgggcccaaactcggtcaagatttctaaccctcttccaaagcttttgtcccctccgatcgcgatcaataaggcataccttgtgtcttgtaccaactctcgagcatccgatatcgctgccgccgcggccgttgtccgaggcaagaaggttgcccaaggagtcgaattctacatcgccgctgcgtcctctcttgttcaggccgaatgcgaggccaacggagattggcaaacgttggtagattccggagcgaaggtgctgcctgctggttgtgggccgtgtatcggtctaggcacaggccttttggagaagggcgaggttggaatctcggccactaatcgaaactacaaaggaagaatgggtcatccggaagcgctagcatacttggcctcgcccgctgttgttgctgcctcggctgttgctggtagaatatgtgggccggatgaactagacctaagcgcgttgcctcaagtggacaaaccaacaacatccctagaggtattgggagaaaaggtgtcagtggaggcttcgaaggattcggcgggagaagcaaagagtagggaagaaacactggagggcttcccggaggtcttccggggcccattgctgttcgctcctcaagacaacttgaatacagatggaatttatccaggaaagtatacctatcaagacgacatcacaccggaaaggcaggccgaagtagtgatggagaattatgatgtatcgttctcttcacttgttcgatcgctcgtgccttcgatcccggcgtcaactgagaagctccgaacaggctcgatcctggtgtctggttacaactttggaaccggctcatctcgtgagcaggcagcgacagctttattgaacgcaggaatcccgcttgtagtgtgcggatcgttcggagatatcttcaagcgaaattcgatcaataacgggttaatctgtgtagagtgcccggccttggtgactgaccttaccaacgagtttgccaaagacgccgagcggggtaaaggaggtaaggatggagagggtactgtgaggcccgggtgggagattgagatggacatgacgagggctgaattgaaggtgactaaagccaagggcgaggaggtcatctacaaagtcggcgccgtcgggcagagtgtacaagagatcgtatgttccttcttttctttgtttctcccttgtatcggcctatttaatctaggaatactgtgagctgagtagtgttttcgacgtgtttatcttttttgccaatcagtgggttgctggaggattagagggatgggtcaaggcccgaatataaatagtccagtctgatggatcgatgtcgagaagtgggactttcttgatcactttagacagaatctgttgatctttgttgtacagtttctgtgggatatcatatttcttggaatttatcaatacgcttatgatttatcttctcaatatacacttgcctcgtttcaaatgtatttttggatgacaagacttgatgtccaaagtgcaagaaggatatatactagcgtataatttgaaagagaagaagataagagggcagactagcatagatttgatggttagtggatggccggtagacaagaatgagatgtggctgaaatgctgtcccaaatgatagattgattgatagcaggcaaaacgaagaagctatagattcagagtatagataactatgcgcctccgctgttgagattggttttaggaaggcaaaaggtgagcgttcagaagaaaactgcaggagcgagaaggataggaatgcacgaacacaagaatgttgttactgaagtaaccgagcgaattaattaacaatgaagacaaaggcaaatgatgagctcggaagcgtcgagtcaggataacgaccaacaaagtaaacgaaaaagacaagaatccatgcttacatgggaatgtgtattaatttgacaaaatacccgatgaagcccatgatgaagaatcccatagcaacggcccggcagatctgagaatactctgtgagtgagcggatgagccaaagggaaagacaaaatggagtggtgagcaaccgggagacttcttcatccgcaaagaaagaggtagagtgaatagatggagatgtacccttctcggtaggcttgacacatcggttgaggaactggaataggcgaccgaacaaaacaagtatgagcataatgttccccatccctctgctttcctcttttctcctgtctgaatctcttcaaactatcgcgtgagaagcctcggaaaaaggtccaggagagaacagggctagattgatagcctcacctgagagccctccttgatgaagttttgaggaagctcaacaatctccttgattttctcggttgcttcggccatggtaagaagtggaatcagagaagaacggaaatagataaaggatggcaaagagtcagccttttagatggaatagggtgggttgtgcagatggaacgaggtaaaagcgaacttggtcggccgccagcgaagtacatgaggtgtaaccagagtttgttatttccttataggtggttacgcttgcccttacagcaatggctcaggcttccttcagtcaaagaacgtcgggttggttttcatacaagacctgtgtgtggtcaagtgctactttgtgtcgatacaccagaatcacaaagaactatgcatggcgtagagatggacgtggcgatgaaggactattgtttataagaaatggatacgatagaatgatttaagaactcaataaaaagctaggcttgttctgtgatacttcgactacgaaactctccaatcatatattacagactttatctccggattgacactccgagtttcataccccgacgacgacttctaccccctccactttgccctcggctctttctgctaggtctgctttctcctcctgatgagcccgttggcatcttcacctacagccgacgacgacgaccgcgaccaccaccatcgacttcatcatgatcatcaccatcatcattctctagatcattctctagatcatcttgatcatgatcaagtgcttgaaccaatcgaccaagacctcaactctgttctttctgaagcggcacaggtagaagcagctctactcctccatcatcatcgattcgcaactttgggatcgatatctcatgatcagcatgatcattcccacgaacatcagtacacaattgaccacactggtatcgtcgaaaattatccatccgctagtggtgttgacggcgtaggcgttagcgatcccacctttcgcgatctagatcatgaacatcatcatgatcataccgataaccatcacaatcatcattcccaccaccaccatgatcatttggactcttacgcgtccgcagaaggcgaccagatagatcagatggaccttcccagagaaatatccacgaatgagattgacaaacaagaactcggagcttatcctagccacgaaatagacaatcaggctacagacctgaatgaggatgttctcaactcaaatcaggccgttcactcgcagaggttagaaccatccataggaagctcgtccgaggactttccgccaaagaaaaaggctcgaaggctgggcccgaaggcgtcttcattacctacgtccgccgatttgctcgctgccgaagccgacgggcaggctgtagccgaaccgtcatcttctgccaacgacggacttgatagcctagacaacgggctctctcgaatcggagctgacaagccagtcagaaagaagggtagggtacaagtcagcgtaagtaggactggatttttgactccgtccaatcttcctcttcgatttttttcttcattcttctaacgcgctcccttttccacattacgtcttgaaagaacgcgtgcacgaattgtcaaaaggtcagtgatggcttcattcaagatatgtttgtcttcgttacgcttgtttcttgtcattcttaccttgtcctcctgtttcttatctgcagtctcgaaaaaagtgctccggagatcgtccctgcaccaactgtatcggtcatcctgagagggtttgtgagaactcttcaagaacggccagagccaaaggtatcaagcgaggaccatacaaaaagaaaggtgtgtgtctgttgtatcaagggtcttcaaccatcgctccctgttgcagtatctcacaacaaccatcatgcatgcgacgcgtccaactagaccgcagcgatccaaggcatctacagaactttcctcacatccagtcagcctatgacctctacaactccaatcctgattcggccacatccgactctcatccatctggttcaaattccctctctggttcgccggtcaccgaccccatccttaatccgattcaccatacttcaaacccaggctctcttccaaataatctctctggtacaagtgcaggccagacgcaccacactccaccgacatatgaaggctacgatgtttccgatggctctagagatgcctacgctcaaatcgatgtcaatggtggacaaggagggtttactttggttgattctgaagacctcaactgtatgtcgtttgtagtgttttcggttttgtaaaagaactgcttctggtcatcgactaaagcactgttttcttttgtgctaaacaatctccctatctattgaccatagcacaattacttccactctcgctaccttcagatcatttgtctctcaacgaagactctccaatgggtcaacctccgccgcctccgccaccgaacaaccgttcgttcctcgaaagactgaaagaagatgttttcggcagaaaagcattgatggccgctacagcagtagcagctctcacaggctctggcgcgggaggggcgttgttggaccgtaagtgcttcttgccggtttccctctcttctcggtctctactcgttcatcatctcgcttgtccaagtatgtttgctgacacagacaaacactgttcgttctgtagcccggctgacgtcgtctgcgacacatctagatcacgacctcttagtgtctcttgctaatctacctcaagaaacgggtgcgtcgctctttcactccattctttttcttgtatgcttctcgcattggaatctaaccgaatattaactccctcactcagaccctatgcataccgacctatcccattcgcatctggatccacaccaatcagatcaatcagtttctcaggacgagcaccatcatcaccattctggcctcagtctcgacagcctgcaggaagtccaagcactaagcgcgacagtagacgaatcgagacaagcggcagaggccgaggctgttgttgcgcttagtagacggcttgaactggatttagcccaagaccaagatcaggaccaagcgctggatctagagagacaagaccaagaagtgcaagaagtcacggaatgagtgtatcatcaaaacctgtctttccgttttagtctcgtactctaaagattcaattcattttcgaaacgctcaagctcccttgtcatctcatattccaggcccgtctcttgagccattgtatctgtaaaaccatataattttatccatccagatttatttattttttccctcaagttggttcgagacaggtgctacatcaagtataaaatacctgaggcaacaacacttttttccaatcaaaattggtgattgtgtaggcacatcaaatcatcagagaaagagttcaacgtcctgccatcctagcttccgccgctctggccctacgttccctctcaatcctcattctgacttccggggtaagccctgccaatgagttaccgccagccgatccatctccggctcccccgcctagcctttgcggccccttcttggctatcgaatcctccttcttgacagctgcttgctgaacgggcggtacaacctcgtctacaactactgcgctctctccgcctttctcttttcgagccttcatcttgtctttcagtccctttcttcgttcacccttctttcggtcttgctcctcctccatttctgcgctcaatccagagggaactcttgctccgcctggctgagtagacgtccagtcccaaagagaaggttttgtataagccactcgacggaacaccgatcgaattgccttgtttggtgatagatcgtatgccgtccggaaggttgtaggtattgtggtagactccttctctgcatcgcacccaaccgattcgccggttggctcgggggatggaggacgggaagcagaaccgaaagaagcaattggcacaggaaccgttggatcttggtttttttcttctaataggtacttcactacgtcctcctgaccagccacgacggcaaccatcaaaagggttgcctccttggtcttaccttcttcctcccgtagccagtccgggagttcgcccctgaagtcttggtcgccctctttcaagcccatctcggtcgcccatttgtcccagaatgcactaagcgtctctactttgcctttacgaatcatctcaagcaaccgtctccatctttctcttgaccgctcctcttgttctgacaattttggcttaatgggcttgacagccgcaggtggagcctgctgagatgcggcagaaggaagtgctttgggtttgagagaggcaatatagctcgcctcgagctcagccaagacgtcatccgaaaggaaagaaagcttgaccctagtcagctcgtggtagcaacggagaagctcggtcaaggtaggccggcgcgtagggaaggggaacgtcctgatgcgttcgtcgtctatagatatacataaggcgtttatatgaatcctctgatcgtatacgaggtcagtgctgatagttatttctggggaagtacatactcttatcaataaccgcgccttcgtaaccccagaaactcttcttaccgctgacactcgctcggatgaacactcgctcggcatacttgaaatcttctgcccagttttctaacgttgatcggatgtcctgctcagatggatgactaaagatcagtgcgtgataaacatcaagacgatagatctttgcctcttacctcgtttagttggacctctccagctcttctgagttgagctccgattgaatttgctgcaccatttgcattatcattcttagattgagatcctccctgtttcttacgagctataattcgcaattcttatcaggttctgaggatccggattagaataacaggaatacaccgactgactagtgtatctatgaaacgttttatgtttcaataccttcacctctgccatctgtcctttgatgactctttttcctaccctcttcccgccgagcgagataaccatacctgcgaagtgaccccctgcgaccatgagcatgatccatcttctttctttctcctctccaccttcgagatcctcttgggtcaattgcagatctttcagccgaggaatgaatgcactaggtgaagtaagttcagacgggaagagtgcacggtagactccgagctgagtagaggggaagaccgaagggctaggagtcaaccagatgacagctgagcgaagagcgaatctgtttgaaaggaattgagccgagctgaggtcatcctcttcttctgctgcagttggccgggccgctaatgaagattcttccaagatgtcctccataggtctcgaagaacctgaggaggaggaggaggaggaagaggatgatatactcgaaccatcttcagaagcatgatcgtctgctaaagatgcatcatcctttgtcctcaaagatctaacagagaggtcctccaaaatttcagatggcaaggtgtatacatgtagtggtttagtcagcagtggatgacgggcgtccaagggtgttcttgagagcgaattcgacactttggacgaaggtaacggaacttgagccatctgtatgtgtgtttatgtatgtatgtgtatgtgaggaaattctgacagagggagtttggttctattgttggtgagcagtatgttggtacacaaaagaaagagaaaaaaggatgacgagaaaaaagattagagacaatgacgtggacggttcggttagggttatgatgggtgaatcactggattcgaattccctccaatgtcattttgggagcttccttcaactggaacaccataagactgcgcctcgaaaatgctaaatagtacaaactgatcctcatgaagtgtgcctatgagagtagatctgtttgtatgactagtcaaaccgagcacgccgaacgggactgatcaaaaagggaacatttagactacggcagaaagccagaaacagaagagcgatggagagtgtataagcctgcaagtgtaaacataagtaagtagaggatatgtgtatggtattagggactaaaggttggtctcagggtagttatacatgaaagaagtagaagcggaaggaacagaaaagaagaacaagtcgtataacacaagaaaatgccctgttgggagatcatccagtcgtcttggcgacatctaatgtacatgacgtttcgcaagtccaagtaacaatcatgtatagatttgagtcgtgaagaagtcacaaggacaaaattacgaactgatagaaatatccgtgtatgagaagttgatgccatttcctattaaaacgtacagattatgagattgtcatgtgcacatgaagcgatcaccgtatatagtcaaacgtgtttcagagggtttattgtataagatggacagtcaagaagagggaattagctgatcaggcacttgagaaaagtaactattgtgcgcactcgattgtccagccgtctcattcctaagagctacagggaacagcatccggtctctcctgctctttcgagattcgacggtatcgttcccgttcacagcaggtggtgttaaatccttgtatcctgcgtatgcatctagatgagtatctgtttcctcgccatcatgagctcggagtttctttctgaactgtgccgtcgggttgatatcttgccgagaagactgaaaatttgtttttagcaaaggcggagaggactcggaagtcactgcagtggaagattcgctcgcgctgaagctcggaaatctaggcgtagaaggtatggctggatgactgacgaatgaagcacgtcccgatcggctatttcgaggtctaggctgataattccgttgaggcggacaatctgtcaaaatacgaactcggttgaaagttgggatcaagtgagggttcgtgactacgagctattcgtgaatatgaaagatcatatttgtatttcagaagtctaattagataactcgcctgttcaacaataaagagacacgaaccgattcttctaattcactcaagaaccatccaacctttcctctctcttcatcaccccaccccttcatcctaggatctgccatggcccgaccgcgttccgcatcaatatagttcctgagagtgtgcatagattagaaaacataatcagcgccaatgtcacgatgcaacatcaagaagaaatccgggaaaattgctaagatatatgagccattaacaatcaactcacatcagaatttctagaacaaatcctgatgagtgtacgacaccagaaggaagactatcgaaaacccccctcaaggtaagcgccgaggacgagaaatcatgagttgtgtgattcgttgaaggcagagggccagaccgatccggaacgacttgctctgcgaacatagccttattgaccatagatagggctctcacaggcggtgaaaccataggagggttaagaatcgaagtaataattggttcagcctcccgcggccggaacatttctctatatccattgctcgactctctggggctgatagaaaagatagacaacgatggaaagtcttcttccctagaaagtatgcttggataagcgtccgaacttctaatttccaccactgggcttcccacccgtgcaattgcgtccaagtccttctcctcctcctcttcatcctcgggtccagaaatctccttgtctatatcgttattctgtactggatccactttcgctgaatcctcatcaagaatatcagccggcgcgatcgaaagcgagcttcgatttgagtccgatgccacatccggattgatcaccgtgagccgccggtgcccagtgtgtgaccatacccgagtcaacagactctcgtcagacggagaactcggtgaatctggtctaggtatctcccctgtttcctcaagaactgagtaagtcaaacccgaaacagtgttcagaccctcacccatgtgagaattagaattatagaaacttccggatctcaaacatgacattgggtcagtcaccgattgagaagaatgcgccacggacgaaacatcttcgcccggtttgctatttgtattgtgctgagagacctgtatggggatcgatttcgattctggttcaacaactgctacaggaggattgatagcaggacgtcgcctttgaaagaaggagaatcttttcttttgagggggtggagctggttgatctggtactgacatagtcttatcagaaggaagtgaagaaggagttagagaaactcccttggaaggactattgtctgaggtctcttcttccaacttcggcggttttgaaagttgagtaagcgactgcaatttgggatgcttcaaattctgcaacgatccttcttctttcacaggcttgtctcccaaaaaattatgacccgccaggtctgtgtcaaacctggagaggtgcaagctgtctccggaggctgtcgctctaggtagtgttatatttagcctgagagcgtcccggttcaattctgattttttaggagaaaacgtatccgttccttcattgtcaagcatatctcgcacagctctgcctcctatcctgaaagaggaagaatgaccaagatgtccatctacggactgcgactgttgacagggcggagaaaatgttgaaactaagaactcttcgaggtcgatatgggtcgacatgtcttccgactgttcctccaagattggcaacgaaccctgcgacatacttacatcctccactgaccttccgaagctggatgatcgagtccgccaatgagccagcttaggagaaggaagatgtccgtcacttattgaggtatatctcatttcttgagcttgggattggatatagacaggcgaagaggctgatcgatggtgtctaggcatattctgggttgtaaccccagttaggaaggagtttgcaggagcaaatgaattgccatgtcgactctgattgattgcaagtttcggataaggcgaccgatccaagctagatatgctgtcagataaccccagagatggactatagagcgttttctgaagctcagagagagacacagaagtagcaggtggcaaagttgagaatatgttcttcttcgttaactgatcttgatcagattcatcatcagtcctaggcgctctcttgaaagaggatgccaggacataatgagatctgtttgggcgttgaagaggctttacagatgagagggaccgatccaaagaaagcagagagccaggtgcagtcgatattgaagaagaaggctcaaagagaaaagtcttggacatgacagaatgaaagatcggtgccaatatagcattgtccaactggtccatccaccagccacatgagagttatgttatataagtcagtcatttttttgcccctgactgcgagtagacttccttcgagatcgatcaaaaagttgcgcacctggctttccattttcatcaaccttgttctcaggctttccttctcctttggcccccatatctttctccaggctcttttttcttgccagatccactcgaataaaacttcttgggcgaattcaggatctgaagtgtctcccaagaacgactctatcaaaaagggttggcaagcaacaccctgagcatgaggatgtattgggcttggaggaaggccaagtgactcgagaagagatggaaaaaccggatgcagagcgtgtggaagctaagaaagattgaagatcagctgcaatcaggccgactcatactttcaaattgacgattctaaaccttaccatactctggatttcttccagttggctccccaaactgaatctggattctccagcttttaaccccgtctgggcccatgcccttaagactttctcactctctttgagagcatcggaagcgatagctagcgatctaagatggttaaggagttgagaaagagaaacatgtccagtttgaagctgtatttgttccacaagactcgagagtgacttgttgttctcgacctgaagagatacaacgaatcgaaaaaggccagtatattagtcatgtgaggtatgagcaataagagaaacaagcaagaaacttaccgactctttgatggatcttagtcctccttgaaccagttctgtttgagacttgattccccccgcgccaacaccgatccatcttccagtcaccctctccatcgtattgacgtactcgagaagaacttcttttcctttgtgtggcgatctctcatgcgatttgagggaagtcacgacctttgctctagattgagccgtcacaaaggcttccttcctatttgattccaagaaataatcagaacggaaactctacaacgctgatgcaaagagataatcgaagaatgttttgtactaacgaaagagtggcgagatggaagaaggtggcctgtcttactgcggatagagagatggtccgtctaactgggatctgataaacccttggagtaggggggtggtcagatcgaacgtcaacttagggaccaacgaaagggatgatttcctaccgagcgagcaatctcttctagctctttcccaacagaccacctatcttttccctccattaatcgaccatgaatgatattgagaaagatgtcctcagcctcctcgattgtcagatctggatggttgagttcagcgataagagcagcggttgagtatgtttcctgttggctccacgtcagctgagacggatgcatgtcgcgccgggtccaattctggacaggatagattagagttgtaggttgaaagaggaataagaagataaaagcaacgtacgaaggacaaatatacgagaaggtagcgagagatgaatctgcttgcatgaaacatccctcatacaatgaggctgtttacaggccggacagcatggcgttttctctatacattcttcaagacattacatcattcatatacatggacgttagcaggtcccgcggctgttgcgatcagtggaaaagaaggaagccaaaggaatgagaatgaacatgaattaatctggttgtcagtaatctccaatcggttcaacaattctttgctatttgccatcgagaaggaatctaagaagtctttcttctgaaaattatggtccgctcggttagataaagcattgactatatgttcggtcggatcagccggagtcagcgtagtgtcttcagtagttgttcggcggttacgtggcttgtacagctcgatgtcacgtggcaattgatcacagctcgaacgacgttatatttctgtccattcaaatagacaattaggaacaggaatattgtcgtggcatatatatgttagatatctaaagcttttgagtcacggcgctggccgacaaagtaacctgttaagttcgtcatggttttatcagtcgctggacgaccttcctcaccatctcacttatcattttatcgaatcttccatctgtcgttcactctgattaggtccaaacgaaacgctaccagtccgactattcgatcgaactcatcacgatgtcctctatctctactcgccgtctcactaaagaattgaaagatcttaccaccaaaggtgcaccgccaggtgtgtgctctctccctttcctcgtcaacccacagtcttcggtctagtttggttggatagccgatgataccttcaatgattggtcaagtagataaaaattgactgttgtacttcgttactcagggatcaacctgctgaaagcagatgatttatcgagctggctactgacaatcgaagttccaggcgataatttatatcaggcaagttgtcctcgcccttggcgaacacaaggatgaaaggctccatctaacatctcaaatacctttaactctggctctcttgtaaacacatttcacacaagggggagacgttttgtctcaaattcacgttcgtatggatactcgccaacgccaaggtatcagaagtgaagatgtcctaactcgagttacgattgatttgtggcccaaagatttggacctcagtacccaatcgattctccaacagtaagcagttaatcaatcagaaaatacgccaagaacatacacttacctactccgcctctggatcaggtcgtttttgtagttaatggcgtattcaagtacaattttcctctagagttctttgagatgtgtttcgcacactaactatattttcttgacttcctggaagagctccgatacatccacacgtttattcgttagatctttctcacaagattgattgcgcgaaacatgaattccttctccttctaaaacctatatatccactgatttacgaactccttacacaggaacggacatatatgcgcatcaattttaggagacgagtggaaccgtatgttctgaccctgtgtcctgtttcatctttctcagagatttcaagaactgacgttttgtttgttgattattccgtttttttttggatgagcttagcgttactgagcgcacaaacagtgtgtctgacgatccaaagcatgctggcttcgtgcacggtaagtttcttcccaagttttaactatgcacaggattaagaagtcttcatgaaatcctttcaatcattcaactgaggtatatattctatcggtttgataactaatctaggataaatctgcgtatgtaacctgtctcgtcatcctcattcatgtattgcgctgtcctgacgagagaggttgaaatctggttcactggatggatgtagaccgaaagataacgatcgatatattcgacgagctacaaagtgggtacatattgctacaatgcgcattttagacctgcttaccgagctgtgtctcggcctttcttcaacgatagctcgccaaaagatgctacgtttgtatatcacgtatgtacctgctctttctctagctggcatcttatgaccctcaatcaaagggactgattgactttcaactctggggcaaatttgtaggatgatacggtttaataacattccccatgcgcaaggtatttgtgactcacatcgtatacgtatttccgactggaaaccaaagtatccgttgtgtatacacttgatatatctgattgcatcacgatgcatatgcccagtagatcttgtataagatagcataaaagatataaggaagataagcgattaaaagttacaccgcgacgcgtgataagcaaaactatagtaatcttctacgagtctcaagtgatcaactggagaacggtcgatcaacaatccaaagaacaacatctcacacatgtcaaaaaagactttcacaccttccactttgaacatgtgggaaagcgtgttcgatcgaggaactctcttccttaaacaaaattctcttagtcaggctctggaatcgttcactaaggtataccctcctgataaaacaaagtgttatattcaagtctctcaaagctatatccgccttaaatacctttattgactatgttcgcatgcatctattttgatggttcaaggctatagagctggggtgcaaggaagcagtagtatttgacagtcgggccgtggtactagaaagaatggggcaatacaaggaagctcttgcggatgctcgtgtagtgattgagcttcttccggagtcacacaaggttcgtgatttcctttcacgctagacgactcgacaggcttcatattcatcttctttctatgaacagggatatactagatcgtctcgtcttttcgaacttcgatgccgctactctcaagcgtacaaaatgctttctattgcacttccactgtgtccaccatccctccgagaaacgcttgccgcaaaacttcccgacctagctatgaaacgagatgcccagcaaaaggctattgaaaaatccaaacgaagctacatcaaattattgccctacgagattctatcctccgtcgcacactacctaatgatcgacaaccctgactctgttcttcagcttgcttctgtctgccaggactggcgaaatttctgtttatataacagctcgctttggtcgagtttgcgggtaggaaggcgaagggcaatcaagaaggcgactgcattcttggaacgatccggaggaaggataaaggatatttggttcgaaaaggtcgatgatttgacctcaaaagatctatcgaaattgttaagcgggaatctccggggaatagtctcaatcagaattaacgaggggccaggcgtacggacagtctcccatatattaacgtgttggcagggtcaatttctaccgaatgttctcaagagtatcagattgagtgtgtcctcagaccacgccacctcatatctcgaggactttgaagatcacttttggcgattgtactgtccatgggagctcaaagacgaagactcttcactatcagcgaggaacgtaaggacacgtagcaacagtggtcgagtacagatctgtacattggaatctcttagactcgacaacgtcagaatgaagaaatttttgcaggttccctcctggctcggcccgcttcctttgctgaaatcacttcggctatctcacgtgagggtcatgtgttttgatcagcctgtggaccattcattccagaagttccttctttgtgcccctaatctcatttcccttatggtggaaaggaagtcagtattaggaagtcaaaccactgtcacctcttttccagctcagatcattcctcttcagaaattgcaggtgcttgcccttgactcttgtccatttcaatatggatctgatcttcgtcttgaccatcccgatctggaagccctccgtctttgttcttcaaactccataagtcctgccagacatgtctatcaatcatatctatttgaaaaggacgagctcccatcaacaaatatgactttcgtttcttctcatgggacgatggatcggatgatccgaccgaaagcgtgcgcagaaaggctgactcagttgatcctcagtcagacgagaatcgataatgaatctctcttcatcagacaccttcgatttttgcctgcgctgaaattgttgtacgtcgatggatgtaaccttaccaatcggacagtcgaggcattgattctagaatcagatggaaatcaaaactggacatgccctcggctgaagacgctcaacatgagctacacagaaggaatctctggaacgccgatttgcaaaatggttgcctccaggctcgttttgcctgattcatcgatgtcgttggcttcttcaaccatggttttgccttctacaagttcttcccgtccttctccactgtttgcttcatccagctccaagcgtgacatgaaaccaaaccttttccgcccctgtaccccttctttgccgctggaaacttcttcttctgtaccactgaaattttccaagccatcttcatattcagatttgcgttcaagcagcgagcagaaaacatctctcaatctcctcatcctggacgggtgcgtggacgttgaacttaaagcgatcgagtggctgcagtgcaaggtcgcaactgtcaagtcaagatacatggatccgaacaatccgcgcggggcttcaagatcattcactgaatccgtagctgctcgacagggaggttattaaatttatttctagtttaaaccagcttttatatatgtgttatctgtattcgtttctgtatctatttctgtggtgttgcaaaacgatggctgatcaggtaactgctgatatagaaggtgaacccacccgtctcgctcatgtgttctagctacgaagtgtctatctcagaactcactactgtcaatgtgagaaaacgaacctttgattattgatttgtcctatgtgtagtcgatcaaggtatgatctggtgttgggtatatgaaattaccatgctatgcgtgattgatgataccccgtaattcacttgaataaaatcgtcggcaacctgattacccggtgagttcacctcatctttcatcttacctataccacagcttggccaacacagactatctttgctttcttcattattcttaacctcttagtcgatggtctataaagctcggatccgcctgttgtctctgaagacatctctcgccaatcttccgctgtccatctactcgcctctcgttcaagcccagaaagtttgttgacatcgttattctcttcttactcaagtattcgagatcatcaatgcagatcataaattaattccatccaaacgacttttttcctctcttagcgtccacaatcgctggctcttcatgtaatctctcaatcgggcaaggaatcatatcttggttggtcagggctgagtagctcggcagctgctccgggagattggctagaggttgatcctggggtagcggcagggtttggttgggtgcaaggtcaagaggttggtttatttttcttaggcagtctcctcttgacccttttggtcgatttgagaatgcagaaaaagctaaatgtattcgaacatgttctatattctcgatcttgacaggtcgaaatttctattgtaaacggtctctcaaaagcaaagtcaatctcagtcgcacccttgacaccagaagattgggacatgattgtacgttctcaggacttgcccctttcttccattgccttttcctataagtagaatattaagttcttgtatcgggtgcaaacagagtctacatgcagattatttggagcaaaatttgctcttcaccgtccgtgtgggctccattcatgagatccttgagatttggatcaaaggaaaatatcgcgttcaaatgagagttggtcagtcatcatgtttcctagtaaccttactagacaggattgctcattctgtgtaattttcgaatttcatctacagagaaaatgaatccatcaaaacagaaggtgctgcttctgtctcaggatacagaggtcatcattgcgcctatgcttcgtccacctcagccgactcctgaagcaccttcatctgctcctcagatttcaaagaatcctggatcttcgtcagcagaatctcactctaagtcagctgcaaaaatgatacccaaattgaaatctcccaccacacagagtaccatatctacacatcttggggctgtcttacgctctttgcccagtcgaatctctccatcattctcgatagattctgggttcgaacctgagtgtggaccggtcatttatctcagtaaagatacattgaatctcattcccaataaaccttccaagacgggaatgtcggttcagctagaacctcttgatgttccctctgattctgaagcccttattcagagcgaggatggagtcgatgaggcgcaaggggggcatggattgattaaattgacggtacaatgtatagctgaccagagaataccgtacaggcatttcatgttaccagggggaggagaaaatgagaatgagggatttgccttatggaaagcttcctgggccgattcaacctccacctccacctccaccccaggaccgagatcggcatcacctgaactagatctagaacaaacagatagagcggcttcaaaaaccaaatccgggagcagccactgcaagagagttttgccaggaatacaaagtactatcgatgaggcactcgttgtgatggtgaatctgttgatcttacaatcagggatgttctttgctggtccaggaaatggaaatgaaatctcatcgggtatgctgtaattcaaagcttgttcatgttccctttgacttcgtaacctcacactcaaatgttgcatcatatttcgactgtcttgtcattcgaattttgatatttatttcattgcggcttagtttccagaactcttcttttgacaggaaatcctcgatcggggaagacgacaatcgctcgagagcttactgagagattggaagaggatgcacgaactttgtgtcgtaggtctttgtgttgttctagctatctagctctcaaatcggatctgaccagttgcgttcctctcgattattgataaatctcagatcctatctatatggacttaacaaagcttgcggaggagagaataccagccatcaaagaagaatttataaaactggtccggaaagccaactggttgagacctagttgtctagttctagatgggttagacgcgctgtgtggcgtagaactagaggttagtcttcttctgctcacggcagtgtctcccatcaacactgaagttttctggctgacagaacataccggacggtgatgacagcatatggatacaacccgccctcgacagatcgcagagttcatggtttctatactagaaccctcctcggcgagttcagaaggaggcagactgaaagacggtgtagtagtaatagcaacagctaattcagctctcgatgtccacccactgttgagtgcaaaacacgttttctctgggagggttggaatccattctttgacaaaagatgagagaaaagaggttagttcgacctgttaatctatttcagggtgtagagtaaacaggttgacttacgactgatcgtaaaaatcgagtctaggtccttgatcatcttctcgcaactaaaatagcgcaatccactttgagagttgaccctacccgcccaccaaacatcatttctcttgcaactgagttggaaggataccttgtttccgacctcaaagatctagttgatcgtgctgtacaagagtctgccattcggaatattttttctcgaaaagatgttggtttgaactttcatcactaaatcatttatctatcttgagacgaccataagggactgaagactctatgctaaattgtgtgcttgaattgatttcttacaggagttttttgtttctgcagaagattttgacaacgcacatagtggcttcgtgcctttctctcttcgagacgtcaaattgcacaagtcggaggtgaagtgggatgatataggaggtaggtcatgctcgaaagctctctactgattgtagcacgcgcttgagagactattatcattgattgtcttctttttttgctcaacaggattgatcgatgttcgaagaacgttaagggagacattggaatggccaacgaagtacgcggcaatcttcactcaatctccacttcggcttagatctgggtacgtaagattattttattcttttcatctcacaatctcattgatgaaacccagtatttgcaacggctataattatcttcgacagattactactatacggttatcctggttgtgggaagactctgctcgcctcggctgttgccaaggaatgtggactcaatttcatcagtgtcaaggggcctgagattctcagcaaatatattggaagcagtgaaaaaagtgtaggtgttttcacatcacaccttgcacaaccgatattggataataatcgatttttgtttcatctactaggttcgggatttattcgaaagagcaacagcagcaaagccttgcgtattattctttgacgagtttgatagcattgctcctaaaaggttcatccttacactcgaattactgcgatatcgatatgtgcaattcaagtggatgagcttgactgatagatttcttcttctctgacgtgactatctaaagaggacatgattcgaccggagtgacagatcgagtagtcaatcaaatgctcactcaaatggatggagcggaaggtttagaaggagtttatgtccttgcagctaccaggtcagtaccactcgaagctcttttgaatatgtcccattgtactgagtttctcgactgtggattgcgatatcagccggccagatctgatcgatcctgcgctacttagacctggtcgactcgacaaaagtttactctgccccatgccctctgagagtgatcgtctagatgttagtggatcttttagttctttctaaaggcatatattcacccattatcttcttcgtccgacagattcttcgatccctgacacgcaatcttaagcttgatccggcaatctctctacctaaccttgctcgtcagaccgaaaatttttcgggagcagatctcggtggactcatcgggagtgcccatctgcatagtgttcactccacactagatgatgacaatcttgacacatcgcccaatcgatcagtaagaaatggcgaagagatcaaaggagaagtactcgtgcttagtggcggaaacaaggggaagaaacttatcgcccgaagccgagcagaggaaggagcgttgaagaaaagggttgctgtgatgctgaatgccggagaggaagatccagcagagttggttggtaaaatcgccaccaagagggaccgacctgtgagttatatacctcttgatactatttgatccttccttcaacgaactgacctgccaacttgatatccaaacattaatatagataatgagaattgagcagaaccatatggatagagccttgaccagtgttcgaccctccgtacctgaagcagaacgacgtcgactcgcccgtatatacagcgagttcgtcagcgaacgatcagcggatggattagagggcgctgaaggtggaggagacaaagtcggcagtcgtgtgagcttgggttgaatcgcctgaggtcggagcactcatgaagataaaaatggcttttccataaatgagacacgaatcaagctgtgaatggttgcagtctatctatgatgaatactaaggttgtaatcggaagcattaagcgtcttcgttgcaagtgatgtattcacagtaaatccgattggtctatcgtgtttagcttagacgcgtttcgatcaccatcactatcaccatctatcagccgtccttcgggtcaaattaacagaaggtatgctccagagggacctgattcatgccttggtttcctcatcaaagtcttccgccatcatgtgaagtcccatcgcatccggatgataaggactatacatttgatgagtgtgtcagccatgtgtctgacgagagcagctacagatgtgctgcagataggttcgcctttcccaatttttaacatcgtcgaggagagtcaaattattgatcttccaaccttgattctgttcttcagtggagccgcacaacataacttgattcttcttcagtctttaaaacagagtatgtctctcagatgactgcatgatggcttcgtacgatacttcagatcctgaatttacgcaccccctcaggtcgatacttctattctacgcgtttgctaccaactttcagatccccggtcaaccctcctaatcccatcccagcaccacatactcttcaagatttaggaacagtatctatgctcattggaccctgtcaatttaatcaatgcacgctgtatcaagttcaatatctttccggtcatctcgagggcaacctagatcgtacatcagctcagggagatgtacaaaacacctatccagaaacagacgctttagaagatttatcgtttgacaagcttgggtggctcgaccttgagcaagtcggacatctaaacgaggtgcatgcagttggtttgaacattgaagggttgacaaacatatctacagtccagagtgagaagttgataggcgaggccggagagaaagagagcctgaagtcaggtggaacaatggatattgtaagacccaggagaggcggtgccaatgaagaggtactacactctcccgattcaaaactggcctctgatatgtacaatcttcactggctaattgtctgatagtctgataagccttcatactatctacagaatcagcgctgcgcgccccatatcaattcctccaaacttgaagcttctgtttggtcgtcagacgctcgccgtctcagaaagcagaaatctcaaaacgctaagcccacattcgtgtgttcatgattctgtctactgtaacaacactgtatgcctcacaactaattcgactatattttgtgcagaccccggagttgaaaaaggccatccagttgacagcaacacttgagattcgtctggcggaactcttgtacaaaacctatctagaacgagctcaagagtctgaactcatggagctcaatggaatcatgaaggctatcgaaagtgatgttgattctggaaggtttgactgggaattgatgttagcgaaggcgaaaaatgcgcagagggtgcaaaggatgaacaaggaacaaaagagggaggaacctgagaagagacgggacagatccgcttctcacctcgcatcttcccatcgatactcaaatctttctccttcatcatccgcaaatgcccagtctgcgaactccgatgacctggtccagtcaaacaggcctatagaagcgacttcaatgaagcttagctctgcaccaatgctttggtctcgatcgtcacctaaatgcttggcaactttagagaccggtcattatccaaaccgccaaccatacagactcagtcctactcccacacttccgaactccgatccgtcacctctcggaagattgagatccgctgatctagtttctcgaatccatattgactcgttgaacagctttgatcatttcgcgtttgccaatccgaatttgtctgtcccaacgggcgccggttcgtctttgcacaacacacgattctcatccccgtctgttgcgttagatcattccattgcccattccgttaatggaactgagcaaatggtcaaaaacgggaagagacttaatgcctccgatcatcctcacgaacaaggactttcgatgcaaaaccgcaaagctccgattcaacatcatatgcctgttgaagaccatgcctcaatatcctctgagcgtcctcttcatactctactaccggtgaacgatgtagttgtctcgtttcctggagatactgaggagttgtttctcattcctctttcccgctcaattatctcgagagatcttgccgaagaaggagggtctatacgcatctctttcttcacccctacaccgccaaccatactcccaccgccgcctgttcattaccgtctcaattctttgaacttgacaccacagcatcgaggttcggacaacccaaatcttgtccgtaagaacagtggggtcgacaatgatgagagaacagagttaatgactattgtgatagagaactactctgaagagacttggaaggcgttggaaagtagttacttaggacatctgaaggtcatttttgaagggatgaatgggagggaagaaagaatttctgagtttcagtcaatggtctgtcgtcttcggaatagtcaatgaaccgtgcacgactaagctgaaccgttcattcgtttcctcgatctcctctatcacatcagcttcgccttggactcccatcttcccctgccactggtttaccaaccataccgatgagtgaggagtctgtctctgctcaaatagatgaagaacaacgaagggccgcgctagaacgaagagatcaagagacaaagtttttccgtgatgaggcggctcgggtttactttgagacgaatggacaatggcctgaagattacgagccacctttcacttttgaggaattcgagaatcttcaagaaaatattcacaatctggaggacctagaaattccagtcaacgatgagaacgtagggagagctgttacgccgtctcccacgccagcagcagtagtagtaggagaaagaagaaagagtgacgtgaagggggtcactggtagaaagagaaagcagaaagggcaaaaggcagcagtagcttctgacgaagaagacattcttccagataacctatcagaaactattgcggaatacatcctgtccatcccaaaccgctctcaaccaaatcgaaagatgaagacaccagactacaccatcgaatcggacagagaatcaacacctcttacaccaatcgcctcctccgattctgacgaagatagctcggaaacggtggttgtcgaacgtgattcttctcagtacaatttttccgaggaacaacctcccaaagcatccacatatgagcggcgcaaacctcagacttcaattcgggttcttccaaagcctaagaaagttgccagatactccagacgaacaaccgaaaaacttgagcgtcgtcagcatgatcaacgtagcttcctcgctcactctaccccagcttattcgaaggtctcgcccatatcgcgggtacctaacagaacaggggatagttctggacgcgatataccttcaactcgagaaagtgaaagtaaaaatcaggaaggcgacaggtcggattcggatgattcagacttgttgataatgtagctcacctgctatgaatagagaagacttttcatatgcattggtcagaatagagatggcacgagagtatgtgtggcaacagcaaatgtgttcagtacatgagaagaagaggccaactagaaagatagtgaaactggtacaaatcaatgagcagaagcgaagcaaatgggtaaaagaagatggcgagaatgtaggtatcgagataatttaagaagtgcagggtatcatattcgagagatattcgagaaatagagagaaaacaaaaggcaacgataccattgtcctgacgaaaatcaatgtgagaagaaaaactgggagaaaacagatgcagatgcgacaaatgagaattgaaaacagacgtataagggaaagtgaaccgggaaatgggaacaaggaacacatcaaaagggaaatctagcagtcaaaaacctctccaagcgcctcggcctctgctcttaactgttccttctctttcttaagagcctcttttttgatcctgagagcctctagttttgccgcaagttcgttgccagcggattcatttaccgagaacctggtagattgtaatgtggtagaagtagcaagagaagaaacggtagacttagcccgagagggcaaaggagacacactccgttgatggatgtttgggccgttggaagggtcaattgcaggatcagatggaagccaggtttgagctcgaatcggcgctttgagatcatatgccggatattgagagtcagatgaagaacgatacggagttggaccaagcataggtagagggttctgcgattgggggtgagttggatagtaagcgtatgcagaaagtggttgatgagtgagcaagctaccttcaaggtcttgagtaggcccactcgataagtttatcagctgatgatacttattgacagggtctataggagcggcgagatgtggaccgcagtcggagaacaatcgtttggaacttttgggggtaggacagtttgcaagggggatagaagacgggtagccgattagtccggaggcagcagtaggatatgaagtaagccaaggttgggcgtccttcgcagtgaaggctagttcggaaaagacaattgcgcacacaagcttcagcacatattctagacctcgattgtcggctgagcgaggaaagctaacgacagcgtattcaccttgtttgtacaagatgctagaagaaccggatttcgcggtgtctttattcacctcgttttttttctctggagatcgaccaattccttcagcaggaacaccgaacccgtctttgtagtctagagcccctgtcatccaatctcgaactctatcatgacccttctcatcaacatgatctcgaattcggtctagttgctgacgaagctcgaatggaagatctggatgagatcgttcaacagccggaagagaccgatgtagaaggacgagttctttcatccgagtttgattgttgagggcatgagttcgcacgaaatccatccatccctgttagaagggacgaacaacacgtcagaacgatcaatcaaaatcgtgttagctgagcaataaggataggaatgaaacctactgaacgacggcgcatgttgttgaacctgttttagaaaacctgatcaactgacgaaagatgaattgctgaacggaacagaagcagaataaaatctcaccacaggttgatactatttttggtaagatttcttgctagcgctaattcttccttctcctgcgctgaaggataaggatggtctagatgaacgatgaaccagtctcgcagatgacgaaagctagatgggtgctccgtacgaggtctcatcgagcgaccagagtcggccttggaagctaaaattttgggcggtgataccagattacgggaaggacagagttcagctatcgtggtaacgatgaagtttcaaatgaatcaatatatgctaatagatcagatatatatttgaaaacagttgtatgtattccactcacgggtattgttggcattgttcagaattccaatgactgtagtttgaaagtctttatttccttctgggatgttcatcatacatgaagccaaggtagatagaaacccaacactcgcagaaatctcttcttgaaacgcgaacgtcaagagaccctgactcctagctttgcaacgctcttccgcgaaagcgtcgtatatctgactgagttcaatgggaacaccagcacggatcgagatcaaaaacgtttcaaccaaagagtctaagcgggcagagagatctgacgctggagatggttccattttctatctggtgcacaacttcagtctgagtcagtacaataagagagtcaagagggctgaatcaaagcacgaacgaggtaacactatgaaagctgaggaagaaggtcagtgtctaaagtaagtactttgtgggaagaagggttcccttcaaggaagagaaccacatgcaagtttaaataagacaaaggatgtgaatcttgccatgaaagaggaaatgaatacccaatatttctttgatcaataggtcggaagggatttcaaggaccggtctttcaggggaactcgtgcttgagcccgatgaaaggggattttgctttatggatgagaaagctgtgctcccccgcgtaaatggtcacgcaaaattgtgattacgctcaggggctatattgtttcaggctgtcgtcgattcattattcattctctatcgtgtttcatccttcggaaatgtgagaggacaaaagaaccttttccctttgatctttaacatcttggtatcgcttacctgccctaaccctttccttttgattctaagcttcgtactaataatcttataagagagggtgcatcagctgcctcgtgttcttcctgtaattcatcatcactcacctcctctcctgatatccaagcctctcctgccaccgtgaacccacctcacaatacttcaaccttatcaagccctcacaacatctaagacaggtttagattgttcattagatattcacctgatatgttctggtgaaactacagcttacgatgagaatcatatggatttgtaggatgtacagtttcacgaagctaccacagaaatataccggactgggtgatgtctttgactctaatatagactctttgtcttctaaagagtttgccttagaagatctgtatcttccaattccaacgtccatctgcgagactcttgaggagctcggcactcctcataccttggctcgaaacctcggcgcactatatctttctagagctatggcgctcagagagttgagtctctcacagttcgacaccgctttccctgccgagcgcactttccttttggaagcaaactcactcaagctcaaggtctttaaaggacttctgaaagccactctcgaaaatcggtattccatggagcttttccaccatcatgaaacgattattcagttggctggtgtttggacgtctgatgatgaacaagctcctgtttcggtccgccgctcatcgtttactaaggttcgtgtgctccaacattcctatcttcgaatattcatatatgttctttcatttgttctatatcgtcctttcgatacaatcattcattgcttatatttttatatttgaggcacaatagaacaccattgatactctccaagctctttacgacctgaatcagtatcccaatccaattgagctcaagactatcgcggtgaaagttggtttgcagcccaagcagatcagagcgtgggtgagtgcacaggatggcatatgtactcgacttgtcaatgttgactaagttctttattttcgcttcgtcttacgactcagtttcagaaccgtcgaaatcgacgatcatctcccgctagatctcacaagaaacctttaaaaatctcaacaagagcaaccgttgcctctgatctaaaatttaactctgttcggaaaagatgttctagaagaactacatctatcgagaaagaacggaagaccgagggcgtgcccagccagcttggatctccgatctttcttcaaaccaacaagacaccttacgttccgcaatctgaagggaggtcgagagttggtaattctttagttgctggcctcttcgatacctctccgaacgagcaggatgcatatgctctttggtcggcagtcgtttcggatcgttcctctgcatacgctaattccaaacacgttcctcaaatcgaaccttcccttgctttcgccatccctgagccagccgattcgatgagtgctcaacgctcggagaatcatttcaatagttgcagcaagtcttcctcttctcatcctgcctttcctcccgtattcggttcaagcgaaaccatggaggtggatccagtggattggacgatggtcttcgctgcatcagattcgagaaatattgcgcctaggtctgagaagccgagcgcgcgatgggaaacgaaaacggggcttgaagttgaggacgcgatgctcgacgtcaatttaaacatgacgaccgggaaataaacctcttgtgagaaagagggatgtttccatcgagagacatccgactatatcatggtacgtctttattttcacatctcgttctgaaatatcggagttttcttttgatgcatttttgaggttgggtttgctggtttttctcgctccagccttaatgaaatgttattcttgtcataagttcctagcgggtctgtctcagcaggcaagtataccgacttgatcatcatgtgtgctttcttcaatccatcttgcaggtcatgtcacttttcactcagtcgccatccagccattcttgcgccttcccctcacttctagatatgttgcattcataatttctcacggtacatcgcatatatacccacgcattttctcgattgatcaacacactgcactctctttcacttcttagtgtttgtttcttcaacaatgttatcgggtagagtaattcaattaccccttcgtatgaccctcattttcttatttgaccgtttgccgtcttcagccgatgtctgtttacctctttgaacggctctttaatgcatcttcttaaaaaggtttgtttattcaatgtcaatgctcgttgctcattactctcaaccatagagaaagcttggagtctttcatcttcgtatccatattcagatgttccagccatcaaccggcagttgaccgagataatttattctcccaatttaagaggtttacgaaagattcaaccgagacaaaacgggtcgagttagtaacgattcgaactttccctgtccaactatttcatgtgtgtgtgcgtccaggtgcaaagaattaatctcttcatgaaactcggctgtccttttgcggttaaaaatcatcatcaccatggttaaacaataacgtattgaaagtaaaggaacggaaggatgaaaacgtgcaaggatatcgatcacttgtaacagacgagaaaaggcggtccatatattgtgcggctaatgccagaaagtatcaaatatttgattacgaataaagattcaacacctcggggtcatctatacactcggcacgtttggaggtcataaaacacataaggaaatacagagaaacaacgtgaatctaaaatagatcgtagaagatacgattggctattgggcggagtagaaggtgggccggaacgaacgaatgtccgttgaacccggccgggttagtaggaatttttctaagcccaccacacaagattgatttctgtcacggtctctatcatagggtgcgaaaagtgagatgagcggttttttttatatctcggttccatcaatacacatgtggattcgctgactgacgaagcagagatggtcacggtcatgaggcgctactgccttcgccgagcataagaaggaaggtctgtcttggtcaaaggggtatcttgttgtggagccaaggcatatctgacggccaggaagcaggaatatatatccatgaattggatttgatcttccaaagaccaaaatcaatccgcataggttgggtatgagttaatcaactgtgaggcgtaggcctgccgggcaacctgccgggcaacctgccggacttcgatcgaacaaaaggttctagattgacgatgcatatatccgttaaactaaaattttctttcactttatcaacccctttttcttcgttcctgccctgtcgtgccccaccccgtaccggtcatcgccctggcatcacccggggctcatgcgaagctccagtgccaaacatcatatactccgaatccagaactcggtctgtatggccgagatgggtgtagggaccaatgattccagctaatctttgtccttcttctagttcccgtcattgtcttcgttcttctcatcaactacctttcttcttttgtgtggccagcgctcttcgactatctcatctaatttcaaacacctcttcaataaagcccgaacgtgcaagaagtagtacatgttttttttccttggatattctctaacccgtagctagaacaaaagtttagtatatataccctctctttcaaacatccattccggtacatcggtctttcctactttctcttcgtccttgaattttctcattccttgctcctatcttctcgtcctcgttcaaaattcttcatttactattcttgttccctcctgtagcatcttctccatctttcgccctgtctcctcaattcgcagtattgttcatcttggccttcgccggagacctcctgtcagcatcagccgttccgtagaaactttcatcgcccgtttgcacgtgccggtctcttcattctatcaattccaacatacactccaatcgcatacccctccatatcttgtcgcacatccttctcaacagtcaactctttcatgtttcctcaaactgaggccgataagcattacgcgattgtccaggcggagctgatgcaactcataccactcggtgcatccgcaccgtctgccgaccatcagagcggctccaacggcaagcctggttctagtctttcaagcatcagagtacgcatcaccctttttgttttgattctttctatattttgtcatgtcttcatagtattcatcaacggcgtcgttccttgctgtctatttctttcaccttctctttcattttgatggtgtggcatcatcagccttcctatgccgaaggttagttcacaatgttagaaactgtgcgctccatcggttttatcaataatcagttctcacttttttttacttccctgtacagttgaatcaacatcgcccttcaccccggctttgacgttctctaagaagcttgaacagggtgatgctttcaatgaggaagattttgatgagagcgactatagtgacgacggcggtaagtccgaatgtgtgggtttccacttgtagtcatttaacaaaaatagatactgaaagcaccgcaactttatcaattttttagaggatatgcctcagaccccttgggtgccccaggctcctttacattccgaccgagatttctttctatcctttcagcctctggcgcctttatctatccctcggccggtctcatgggcctcagattttccgtcgttgaacaatcagacgttcgagaacaacttcctcggtcttcggctcgaccttccgcattcgataactgctgaagctcaatccagtacccagacccggttgtccaatcgcccacgtgtgtccacagttccggtcgaatccaatgccattcccgaacgcgcgccttcccatgtctacagatcgtggtctgacctggagaccacaagtcagccagacttgaagaataatgattctcataagatggacaaacatgtccgaccgagttgacacaagctgatggaccaggtggacagcttgtcattagatgaatcttcgagtcatctcgaacattcttgttggcccggattgatctcttgacatttcttttgcctcagaccagatacagtcaaacgatcatactttcttccattcgaagcatcggcctaatcaagcatcctcttctgcttgctcgttgtatattttgtgattatccactattcctcatccctgtttcaatttggtactctgtagcgtcctttcagtcgtgtagtcatccttttttctttttctttttgtgatattctcgtacttgtctctcgtttcacgctatgatgggtctctgttcttctccttgagtttccataattcacgatccggtcctagaagtttgggctttcttgattacagtccgcaaccatctcactcgtttttctcattgtatatctccgtctccttctgtctatctctccttctgcctttctccttggtcttatatgtgttttcttcttctcctttctctcctcgtcatcatcctgtatcagtgttagaggttaggtcctgataattcatatgtatactcgcgcataaagtcaaactcaaggttcaatctgggttgcattacttcctgttccctctgccttgcttgccttattatcataggctggcgtctgatatctttgatagcaaatcgcatgactagacttgatgatatactgaaacggacgaacgcgatattgaaacacacaaatagcctattaccccctcggcccaaatatatata

SEQ ID NO: 610 - DNA, 49999 bp, Xanthophyllomyces dendrorhous
  misc_feature (46935)..(46944): n is a, c, g, or t
atatatatatatgctattaaaaaaaggcctcgaatgtagtccagaaatggatagaagactgaaacaattattatcagaagaaaggtaaaaaaaattagataaatcgcacagatagataccgaccgaaaaaaggaaacgccggcttggcgatactcgatcttggtagaagcgagagttcgatcgaatacggccttcggcctttgacagtcgaaccaggcccatgagtggtgtaataattgtaactccgtatgacgcggacagtgagcatctgacatcaacgatcatctaattgtttgcctccttggttctgctctgtgcagccagaagaaacgttctttgggagatggccaccggtcaggtgtctgattgtgtcgcgtctgtaggccaccttctgggcttaccgcgtccccgccttcttccaacctagggttcccagttgacaaccgctggaatgcgtagtctctgtagccaccgccgcgtcttgttctgctgagaagtgacgcttctcgtttcattgggcaagccttcatctacttagtgttctcagtgactgtgctcgtatttgtgcttgtgcctatgcttgtggttctgtgcgcgctgtcttaagatctgatgcctcaagtctgggcattgtagtgctgggtagtatgtagtacaatagcatcttggcttccgcagaagacatggtctggccgcagacggtgagatatctggcaaggaggatagcagacgaaacaccaggctcagcttgcataacactcaactgagtcgattcatcgctgatacaaagtccggcttaaagccaggtatataagcctcgcagttgacacgagggcatgtatatcgttcccgtggcgtagtcacctgagataagacaagtctactcattgggaattagagagctgaaacaaagaatgatacttgtgaggtgcaaaaagcactgtgtggcatgaaagagatgatcccgtagagtacacaggacatggagaagagagcttgatatatggtcaacgtcagtagatcgctccaggatttgaaagacaaagtataaatatacctcaccaggaaattcatctatttgaagatttgtcaatgtgaaacccctgataaaggttcgagcaatgaatgacgaatacgataaaaccagaagtcattgaattagcctacagcaacaaaggcattcagtgcggcgaactgggcgttgagtggaaagaaagactggacggccgctgaattgctcacttcgaacatcacttagtctgtatatttgttcctctgtttctctctaaccgttttgtcttcttttttctttcctgacttcaccttcgccttctcatcccaccagccagcctcatccgttctgggcttgacaaccggtcaactcacggtatcagtgaacgacgatatttatctacccatgcgtcgactcgcacaaaatataactcacggcgtctgcttcacttacctgcacgtatctaccctacacgtacgcgtctatctgatcttacttcatctgcatgcctgtatctttcgcactgcatcaattctagcctccgacgccaccaaagtggtgtacagaccagctgtgtgtaagcagacaggtgcaggagaacgctccatgggctggcttgatgacaccgttaagtgcgtctcgtgcgtctggaccgttctggatcgagttcggattgcagatgaacgatcgccggctgtttccgcttctctcctcttgccttgcgccttccgcttttcgcttgcattcattcatccgaatcatgcaccttgctgaagactggattaaattgaatgtattgctgcgtcagcgtacgaagtgtattcatctcttaattaacagcccaactgaccgactaaccaagcgcttcgttaacagacctgtcacggctggttcatcgagcactaccagccgatatcactgctcctccgatcctctcctccctgtcttatcttgttcctcgtcttgtttacatctttgatctgagttcttttcgctatgattttcgctgagagctggttgcttaccgtgatcgccatggcccatagcttaccatcttggatctggaaacatctggtcggacatcatcagccaacacaccttgggagacgaaggcagctcgatggactgaatttgatagattgatgatattatagattgtccatctgaatcgaatgggtggtagtgtacttgtatcttcatttttcgagggctttgttcgatcggtgttgttttgtcagagcaactcacttctcaggttctttgtccttgcccgtgttgttccttgccccatgattacctgccctatacttacatgccttgcgatcgttctgcgctgacttgcactttgcgtcactatccagatcatgtccatctagacgtgcttgtcaggcagctttcgaactaacttggccagaacgcccagactcatagaaacatatgtgtccgaaattctgaatggcccagctattgtcacaatagctgtgactgctgcgaatcaagggactgatcctaacgaaacgcccctctacattggtcgattggaaaataaaaaataaaaaatcatgggtaactttctcctcacagtattagttcgtccccgcagcatcgctttcagcgcgacagccaggcacactgtttctagactgaagcaagaaggaagagtaagaccaaaagtaaagacgggaaagcagaatatggagaacggtacagaataaaactaaacggaatgttgactgataatctggctctgatggaaggtaatcgcgtccaagtgttcatccctctttctcattttccctctttcccttccttcgtttactgaataccctcccgtacaaaatgtcgtcgaactagcttgaaattagctcaagaatcaaagagaactgccagccttggctagacataagtataacaacgaccgggaaagctcttctttttctcctcgtagtttgtcttgttctttcctactctcctactttcacacagttctaccgacttgcaccgacttctgcctcaaataccttcttcttaaacgcgaccttctctcacactactcatcctgttcccagcacttccttatcacccattttgcatactatgagctacaattttacatcctctcctctttgcactccgtctctctctctcatctcgaccgcatcatgtgcctcgtcggacgcacctttctcacctccaggaatttgtggcatgcctccatcgcctagccctgccaaccgaaccgctcctcttactcgatcgcttcggatggaaaagggtcaccctctccaagagctattcatggttcgtctgtccttccgactggcttctcctctctcggcagctggctctgttacccataattcctcttagactcgtccgccgactaataacttgtttctgaaacaatcccagattatgtaccttggcaaagcgcgctccgagagcattcaacagcatgaagtagttttgggtcaatgcgctcgggaggatagacggactgatgaggctaaacgagctgagcacgttggccgaacgaagcttgcggggcgggttggacggacgaaacttgctgagcgaatggaatcatcccggcctaacagaaaactgaggaagactgcgaggatgaagattgataggtcagtcaaaccttccgctcgtcgaacaacaggccccgggctgatgtgctatttgtgctctacgttctcttcgccctggcagctcgacgtggaagccgcctcgagagaatgtttccttcaatgatctttcctctaagtccctggctgtctcaactgctacttgtacatattttttcttcggctgccccttcacgtatctttctctctagtgaccaacctcatcatgctgaccttcttcttttcgtttgccgtaatagcgagccggacgaggacggtcagccgagagcaacttgcaacttgtcgagctccgtccaggtctcacaggaacccaagagtggaaggaaggctcattctcggagagctggagtggccgcaaaggcggctttcctgcgtgtctcctactgtgcctcttctttcttcaccctcctctaagtttcttgaatcctcgccgacgacatcacccttgctgggcaaacgtgctcggcagccgaccgagtctgatctctacatcgactctgttgatatgttcctcttggccactaaatcggtcacttcgcagatggaggacgtttccgagtacagtgggttcaaagattcatcgttagacaagccttctggagagtcgtctcgattggctaagagggcgaagtattcgctatgtgtctcgcccaagataacctctcaaccttctccttctattcaatgggcctcggcaaagtctgggtcaagttgtatggagctttacaagtcggaacatcgacgaccgacggctctctctcagcagcgggcgagaccggtagctgacaaagaatacatcgggtctgttgaagcttgggtcaaacacgttgagtcagccagactctattgtgatcgtcataagcgggcatcgtctcgccggtcattgaagaacactctcgaggctggctcgtcttcccggccggtgcacaagccagatcagatcctcccgccgatcactcattcggttacctatatggaagtcgagtctgatctatctgtgctcgggatgaacagaaaggacgaagacgtgtttagtgtcggttttcttgcttttgttcttctcttcatgcttatttaccactgtctgtatctgttgtagagtgcttctctgtctttctctttatttggggttattttcttgaggtctcttcactcttctcctttttttgattttacgtgttgtcttgatagtctgcctctgttactttgtaaaattcattacaatgatcgatgtccttgcctttccatgttcgttcttacatcacacgatgcaatgctctggtccaaaacttgtgttcgacacgtacgcgcatccgcacgaaattatacacaacgccgagtatccatgtgagtatcaccttgacggatcctaagcttggtaacatcttttcctcttccatctctctgatgctaacggacatatgaaaaagggaaagaggacaaatccaaagggacggactatggcctgatatctactctgttcctctcaaccagatcttggttcatatatcctgactggaatgacggagaaagaaaagaaaagaaaccccagattcacggtgtatctttccgtctccttccccccgcgattgatcgcaaagcgcgcgcgggaacttgtttggaaaacatcaaatcagtcgtttgcgactgacgtaatgcccgacttcggctgtctccctaagtatgcatattctttcgtatatatatatatatgtgtgtgtgtgtgtgttgtgcggtactcgtatcacctgttttcgtgaccccagacgacccgagaaaggtgcttgaccaagtagaaaagatagaaagtgttcaagccaatgtagaaagttctttgtcttctcctttctttttcctgtcttgtcttttcttcttctttgttcttgttgacaatctggacccgtgtagcaaaacactctggtcctgagcaaagacgatgcttgatggaagaaagaagaagaagaaatcgaggaaagcgcaagaacaggtggatcccgcagacctcaggcttcggccaagcgcccactgacgatgaatattgattgcaaggtatagagcagaaaagacgaagacgaggggatcgaatgaacaatgccatgagaacaggacagagcgaatgaagcatgtcttgattttatatataagcatgacaaggggatggaagggattatcgagtgattgtgagtaacttcgggggacgcgaaagggatgtgatggtcgagatgaaaggaaagaagaaagaaaggagataatggtttgaaaggaataaggaaagaaaaagtccattgcttaatatacgacaaaagaggaagacaaaagaaaaaagagggagaggaagaacggaaggaaagaaatggtaacccttctgaaggggggtatcatgcagacgaaaacagatgaagaagagaggttgaaaacgaccaaggctcatagcctagtggcgaccatgctcacaccgacgagagccacaagagctttccagccgaatgttgaaccaactgttcgatcacctgcagacgcctttgtcgttgcagaagcagcggcggccgagctgctagccttggcggtagcggaaccggtggaggtggcagaagaaccagaagcggcggcggcgggcgaagtcgaagtcgaagtcgaggtgacagagacggaagtaccttcagcatcaacatattgcgcaaagggctagtagcaatggagagaagggaaaagaggggtgagtaacaatgaagaagagagaaaagggggaaagtaaaagaaaggagagaagcatacaacggcatcggtagcgttggactccgtgtagatctgggtcttgttgtacgccgtccaaacaggagtgatgtactgttggaataggtggttcgggattttgcatagcatgacattgaacaaataagctatgatcgaggcttcacatttatcaagaaactcaccttgaatgcggccttgagtttgtcatagttctccatgaaaatctctgtagatgtgcatttgaaaaggtatgatcgtcagccttgccttgccggagactgaagacggaaggaaacgagagaagggagaaagaagaacataaagccgagggacacacgcatggtggtgttgttgatctcgtgagtgagaacaatgacacctttagtgtcgtacgttccgtttccggccttatccatgacatcctgatagttctgttggacgtccgctagggtgatgttgctagaggggccaaatcccagaggagagagaacaaaggagagatgaaaggaaagttgatgagaatatggacaggccaggagagagtagtcagtcttaattacaaagggccgggtgtatactagttccgagcccgccttggaaacgaaagagagagagaaaagaacctacttgattccaaccttccagtcgtcagtatcctcctcccacataatgctgtagcaagaggacagtgtaaaacgcgatgagcaagagatcaatagataacatgaggataaggaaagactaaagagaaggaatgacccacttttgaagacccaatccgtaggcgatagttctgattcgatcatcgacatctccgaatggagctctccagcaagctacccgagaagacacagtttgagttgagaaagttgaccagaaatttacaggggaaacaagagaaatagggagaaaaaagaaggactcactcggggtcacaccgataacgagcttgatggccttgagagtgtagtaaagctcggcaaaggcctgctcgttcgtcatggcggtgaggtactggtgggaccaggtgtgtacgcagatctcgtggccatcgtggtaacctcgctgggcctgcaacggccagtccaacacgtttgatccgatgtagaacatggtggcagtttcgttcttgtcctgtaaaaagttgtaaaactcgttgtgggtacagtttggtccatcatcgaaaccgagaccgaaggtgtttggttcgggtacggtgatatagtctgtgacgtttcggtcaaccaggtactgatatttaggagtagtgcatccgttgaacgtccaccaacaggccgggtcgccagtaccgacgtaagatggagtgaaggacgaaaagtctccgttgagggtaccatgtggggagattgttgttgggagggtggcgttgatctgattgaacaaggtgagtgcatcggtatctgtcgagacgatcgatgcggtgtcccagatagttgggaagtcagaaatggctgaggtgacaggagcgtaagagtacgcggtacattcctcagcaggatctgtgaaagtgggataaggtgcagtcaggacgaggacaggaataacaacaatcgcaaaagaaggtcaacacgcaaagaaaagaaaaggcaagaccaagttcaaagagagaaagaacgcggaacgaaccaagcaactttgcccagtcctcccaactgtcagccgtggccctcttaacgagagagcctgtctgttcggctgccctctgggcattccttctggcgagtgcttgacctctaacctcgttcgagcaagcgctcactacggtggctggtagtagcgccagcgaggcgagaagaagggtggtcggagcgacagcagctgtgtacatcatggaaagtagcggtggatgataacaggaagaagaaggggatgaagagggggaaacaagaaagaaacaagaaaagagcgttgtcttctcgagttttcacaatagggtgtgtgaagaagttagagaagaagaggagagaggggggagaggaaaaaaaaaagacacgagccggccgagagaaatcatacggcaagatagatcaaccaggtcagccctagatgcactgaagaacaaacacacataaatgacattgaagcaagtacgccacacaaaccgaatgaaaagagtgaaggcctgcttgtcgatgctgtcgttgtcgatggtataccgaaacgaacgacgatggaagaaagcaaacgagaaggataacgagaaaaacaatgaaggaagcttattaggacaggagggccgggatgaatagagatagactgtatctaaaaatagacttcatcagagccgagccgcagtctatttttggccgcctgcaaacgcttcgcactccggtctgtcactgtcgttcggttcgcttggaatcgtcgtcttcaggggtttgcttacacacacacacacacacgcacaagcacatgcacataaaagtgtccgttgatagtagatatggaaaatggtagcagggaaagagaggtaaagaccagaaagaaaaatactcgtaaaagttcaaggaggacctggagatgaagacgggtaaaagagcgtgataggccaagaggccggtttcccaccaagaccaatgtaacagaggggggaaagatgtaggaaggcagcaaagaaagaaggggagaaaaagaaaaacaagaaaaggggaagaagacactgaggcagcgccactagttgtgagaagtcgtcgaccagttctccagcgtcacattcgacggcgtcacaaagtcactcgcgctagagccatcccactggggattaaacagcacctggagcgagtactcaccgccgggcagactcactgccagcaccgtcacgcccgtgttcggttgatccccttcctccaacacgccatcgaatgtcagctgggccggcaacggcgggtcggacgagaacctcgtagggtccatgggcgagaacgtcgctccggtagaagggctcacgatctttacttcgcaagtcttcccctgaagcgtcaacgtcgccgtcaacccatcggagcttatacttacggtagcgttggtgtgcatccgccactgaatgttggtcgctcctggcgcattgatttcatcttgaatcaacatttgctttcggtcgttcaacaacctgactcctcgttcaatcgacgtcccgttgtaggccgtagtaagatccatcgtgaagtatgcagcagaatttgagtcaagagtggcaaccgtcgaagaaccctgagtgtcgttcgtagttccgaaagttgtagtaggcaaagtggcgacgttttggttcagatagtccaatacaatagtgttctgtccctctgttcgctttcggtagtaaagccaccgttgagagtcttcggcctagttttccaacagaaagtcggagcgcgagtcagcgctcttttctcttaagtgtgatagtcatataagcttcctcaggcagaagtgagaagaaagccttgagactcacctcagaagaaaagtagccggtggagagatagtttccagaaccgagatctccagcccatcggacgcccattgcgtcaaatacgaagtctccggcgtcctacaagagacaaggagaagaaacagcatgcccacaagttagtctcttcataccttgacccagatactttcgtcccgcccagagatagtaaacaaagcaagctcacaatatccccatgagtctgatgaccggtcatgtttccggccttcattccaacgtaaatcccgttgttatccgtccacgagttcctcatcgatgcccaatcatcaactccgttggtgaaatgtcggtcgtaaggaagcccatcccaccaggcacccgtggcggtaggatcatagtagaacacaccgaatggctcggatgcatcgtattgctctcgctggtagagcgtcaatcggggaagtttgtacgcgcttcccatgaacagcagagagttggcgttggcagagtacctatcggattaatgattttcgattagcgtctagcaagggcgagcctggacttcatagaatctggaaatcgacttacttgttcggtccgtgatcgttgtagttaaacaatgaggtcattccttgaacgtacatgtggtacgttccagtgaggtagaagttttcgttcgcgctcaacaagccctggtcgcttccatacgcggtggtcaaggcagaagccatctcagcaaatccggttgttccaaagtacctacatagagaatatccaggtcagcatctccgggaaagctacatctctgttttcttgattgaaaacctaccaatagttcgggccctcggtccaggttccatcagggtagactgcattcgcgcagttcgactgtgcgttcgtgatcgtcttgtccaagactgcctgtgcctgtccggttgtatcatccccaaggatggcaagggcacccatcgtgcaaccggcgttacacacacagttccagtttccgttcacagacgtccaccagctgtaactctcactgccgaacgcattcacacagtagtccaacccattctccacgatcgccgttcgaattgttgttttttggtcatccgtccagccgtcgtacatccaatcgtaagcgactgcaaatgcggacgtaaactcggcgagatcaaggaaatgagcagcattccatctggctgtaccgtttccaaatggaatatccgcattgttccccatcgcaacgttcaactcggtccacgttcggtcgagccactttgtgtcgttcgtcatcctgtaggcgtaggcccagttcttcactcggaccttcaactctcgagcaacatcaagtacacccgaaccagtcaatccaccgtcctcctggtaggtgatcgaggcactttcgtagttagccgttgcgttaccaaagattgtttcgttccaaccggcaagatactcgtcgttcgcaatcagagtggccagcccgtcccacttgtattgtggcgcaatcaatcgagggtgcgatcgaggactcgacgtcgagacagacgccgtgtccgaaggccatgttcggctcgcgaccgcagatgttgtaggggacacataaagtgcagtgttggtctgatattcaaggagagcaacccgagcatgcacaataaattagctggcttgtcacgagtatacgcctagaaacgaactactcaccgtagaagggtagacgggcagatagaacgaatcggtggcggtggcgatcctggccaagccttggacggtagctgtaccagatttagtggccgttgattttccagtagtagtctttgaagcagttccagaagccgaggagcctgaagaaccagacgacgtatcgttcgccgtactagccttcttattattctttgagacgaccaccccggcaacgattgcaccgacgatgatggcgacaatcaagatcggtgtaaacaccgtgagccatttggatcgtttcttcttggcaggagcggcgtatccactggatgcaccaggttgggtgtaaccataatctccttttttttccgcggcgtggccagaggggaagaatgcaggggcgaaaaacagtaagcaaaatgcagagtcagcaactatacgtgcggtgttaaatacagcatcacggaggtttctagacgttgacttggcgactcagagcagataagagtgataagaaagaagaagagaaaagagaaagatagaaagagtagacgagtgtaaacgaagatcgagactggagaggtgtacaaatctcgttttctgagtgacattgagggaggaaagagaaaacgagcgagcaagcaagcaagaaagaggtacgagaagtaaaagatagaggtcgccaagcgagccacacgtcgtcctttctatttagtacaaaaactcaccggttccacctcgaattcgaagtggctcttgataaaactcacccgaatgataacctccagaggaggaattgtatggtccggcaagattctgtacggactcgtcgaactggggttgggctcggtaagccatcgtgtaagaggagaggcttcaaacgagaagggtgacgagagaagagagagggaggaaggcgaagggaggaagaggccgcctgctttctcttttgagaagaaggagagaaggaaagggaaagagaaaaggagaaagggagagagtgtgtgtgtggagatggatgttatggatgaacaggggaagagtaaaaaagaaagaagacgaaggaaaacgaaaataaagaggcgagaaaaaaaaggcttgttctttttctatttgtttttcatattcttattttatgcctccaagaacgcgtcggcgcgtacgcagtcaagggatcttcggcctagctcaacaggtcacacagttcatgagataatcagaaacttgggccgaatgctattaaaataatacacgaagaaaatagatgagaagagactcgtatatgatacagtggagtttcttgaattgtatttatattctgttttcgcttttgatacaaagtctttttttccctttccttcttgctggccccggaccaaacagtgcagaaacgccctattctaagcttcggaagccgaactttcatcaagagtcgactcggatcgtcgccctttctgctgctgcttcttctccgtctggttcttatttttcttatccatggtggatgcgaacttggatttctcgcggatcgttggtccgtactctgtcagacacaaaagagaacggcaaccctcagatcagctaaggtcaacaaggatgtacgactgcaagccaacaaacaaggacatactgtaaaggaggaactgtcgcagaaagagagaggtgccggaaaacgacgaaaaatctcaaaaagtcagaccgagcaagagaagaaactgattggcagctttggaaggagaagttggacaaagtaaacctaagaacatacagggaaaggagcagccaacgtggccaaaccggctaggaatgaaccggcaccttggtaggtcattcctttaaacatgtagcctccaaacagaggtaatgaagcagccatcaagtttcgaatgaatccctgaccagccacagctaattttttacgatacagggcgcaacgagatgtcagtggatggaagtgggaattattttgagagcaacaaaaagagcagatgggcaaacgggcgaaggttgaaaaaacgaaccagacgagccgttctctccgtaggcatctgtcaagtatgaataggtggcgacaaagatatgatagattccaaaaaccattggcacaagcgcgatgataggagcaatccaatgcacatatccaaattgagtccacgaaaagatccacattccaatcggaaagatcaccgcgcctgccatcataccgtacaatcgagcttccggtcgggccacaccgccgttcgcagcagttgccttatcgtacaggtgatcctgccagaagttggtagcatacccgagacaagtcccgacgaccaaaccaaggtaggccaatccggaatttccggttttccaaccgtgatttccctcaaacgtcaatgggatgacggtgaagaacaagctgagtggggggaaagtagagaatattaatgggtgagcttcacagattatcaacattcttgttgagaatgagcttttgaaaagacagaaaacacttacaagatcatggaccagctgaaagcaaggtaaaatgagaaaaaaattacagtcggctcgtgaacgagcagctcttttaaattttaaaggtttttgtgaatagccaacgacgtgatcagcagacagatacgataaggacgagcatgtttcttggatatagtcgtatggacgaggtactcactgacagcctttgtgcaagaatccttgaggacgtccttgtaggaatcacgctcgagctcgacaggtgacctgtatcgctcatcgcccgtgtcctttctgagtttctttgctcgcttggtcagaataacggctcctcgggtctctctacagaaggcaaactcgatcaagcagacaacaccgttgacgatgagctgcacccactggatccacctccaacctttgtagagcaagatgtagccacttgaaatagcaaggaaagcaacaagagattcagccggatgaacgagatcaaaagggacaacaatgatgacgatggtcaagacgaatagtataccatagcgtcagatggacacttacctgtagagaggagccaagatcgttcccagcacggctgcaaaactgaacaaggccatgggcgcacttcgctcgctcgtcacccagatatcactcagtccgccaccgatcagtgtcgtacctgcagctccaaagattccagaaaagaatcgggcaataatgattgtccaaatgttcttgcctagagccagcggaatctttttgttgttgcagttccagcaatgagatagatcaacaatggtttctgaatgaaacaagagcaagtgaaggatacgaggacgaacgaagaagacggtgaacaaggcatagttgaccagatagactgggtttcgaccgatcgtttcgctcaacggggcaaagaacaaaggaacgacactgaacgcagcgttgaagacgactgtatagttgtgcaagacgttcggatcatgaatcacaagctccaacacatcagcttacgagcgtgaacagaatgaaaacccctgactaccaatgactgcttagtcactgagtatagaacaaaaagtttgacgcacacattccgacctgtccgacttcagagtcaaccccaaactcttcacacattgaggatatacccacagagtatgcagacgtcgctaaaccctaaaaatacgatgtaatgcattgtcgacaggatcagaaactgccgtccgtacggaatcatgaagataatatgttccgagggcatggataagaagcgtgatgcttacaatgaaaagcgtcattgcacacaagaggatcgtctagcgggaacgggaaataataaaggaagtaaattcatcagcacggaaagtgagctaaagtcacttgcacgtcatgcagaactcactgtgatccacttcttgctcttcggccactgtaatgattaggtagaaagagatagaatatacatgatgtcgtgtaagtgctcaaaatcgacacaaatatgcaaagagcaaagagacacagaaaggatagaacaaaaaaactaggcgaactgacgttcattggattctcctcgtctccatcttcaaagtgaacgacgatgatctttccctcccgttcgagctcttcaacttgctcgtcgttcaagcctcctcttttgacatcgtctgaaggcttcttctcgttggccatatttattgtctataaatctgtgtgatactctagaggatagcagtgctggttatgatgcctatagtaaaaaggagtgatacagatggattataaagggtggatgaagaaaactttcggtcttcggtcagctggttgtttagaacaagctaaggacggaaagggaaaaaatccttcaagaaaagatttactctgcccggatgaaaacaagggtcgtcaagggattgcggtcaaaagatgtttagtaacacccggcatgtcctcgaacttttttctttccctctttctctatataatgctgttgcgctctccttctgtgttattctcccgtttctcttccttcttctctctccgttggaggtagatctctttgcatattcccacaatgaggggtaagacatcggccgcaagacgctctctcagcgggcatatcgcaatccccgcgcgcacaccaacgtcatcgagcgggagagtgtgtgtggggctaaaacctggagaatgatactcaaaagctgtgttacgcgtggctgatcgcaattacgtaatgtagaacaaccctaacatcatcttaacctccgtcccatctcttttgtagttcaaccgatgagaaagcaaagtaacatctaagaacatcaacaacgatcaacaactatcaagacccatcaagacctatcgttgaataatcttcctgttagatcattctcttttctctcctggctctcatcacatctcatccggccaaaaggaaagcatggccggaatttttccttaggacatgccgaccagtcccctccctgctttccgttcaactctgccttcgctttccgccccttcactctcttcctcctcctcgccatctagctctgttcatccactcgttcgaaaacttctgtttcctcagctagatccggcatcgcctatccctcctatattctccgatgctcatctaaaggaacttaataatgagttagtttccgttccgtgtcgttggctgtggtctgcccctgacagctttcgcctacactcttcttctaccgaaccatcctaggctgtaccttttcatagcattagccctcagaggatatatcgtaaggatctttccgtgttccactcgctttaaaacaaacgtctttctcatctctcatctatctcgcgctatatgtgtcattccatacagaacccatggtacgctaagatcactccacgtgatcgggactttctccctcgagtcacccaggttcttgtccatgtactctgcattcttccctccaggctgtccacccgtgacacgatcgtgcctttcctgctcatccatcttcccacagttcttaccgaacactggcgaacgacgcgcgtgtccctgtctcttgcccagctacacccgcctttatctgtcgaggtattctatcatcggatccatccacatgttggcatatccatcggccattcagccgacaaggatggagacgatctgatcaatccggtgtattggacctgcctagcagagggtatccttaagatattgctacccgctggagactctggcagcgagcttgaaactgtcatcctcagagaagtcttaggtagggtcgtcttgggcgctgtcggacgaaagtttgtccagagtagtttttggtggagcatcggacttgggctccttggcacaaataaccgtccgagcggatcagaggagaatgagtccagtcagcactttgaccagtcactcgacgcctcttctcactctcgaccttccctctggcaagctcttctaaacggacttctcctcgtcctgggaattgttcaatctatctttgtctttggacgaaatactttccaggcactcaaaaccctcagaaatcttatgtcgacatgtcctcccggaagaaacagagatctgatggtcgaccacggctgggtgctcggaccttgggtcgagtgtgtagggctgttgctaggactaaatgatacgttggtcggaagagtgctatggatttggattgaaggactggccagattggtttgcgtgctagggggcgatcggtgtgtttactgttttcttaccgtcaactatctttgcggcacaaaaaagactcgagaaacgaaatcaaatcaactaacttctcttcttatctaattccagattgattccccaccttctttcgatccagctaagctctccagaacttccaacaatgttggtcatcaagcttcggtcaatcctgttctctaatcaggggtacccagggcctccagtgcctgatctctcggcagaagaacaaacagctttacaggttctgctagaacgcgttctcgaggagaaaacgcctagtaagtctcttatctgtttctcgccacgaacctgtgactcatcttcaaaaccgattctttttcttcccctcatttttcacaatcatatctaccaggtcttcttcgtcctgttttaggctcgtccagtgaatgttcaccgatccatgaactactcgtaccgctcgagaacgacagactgaatgctcacctgttgctgagcattatcgactgtttcgttctcggcgtgttcccggagttgggtgtaggtgcaaatgagaaatagaacattttcgctttccttccttttctccttctttccttttgggtttactctatgtctacatgtttgtggggtctgtcgttctctatttgctctttgatttctcttctctctccatctgcccttaacatgttttatctctattccactcttcccggttttttgcgttgtatgatgtccctcgtcagttgttatctttggtgtcctcatcttcatattagaaaagagaggatgatcgtaatcttcttacagcttgaaacgaaccagaataaagagggaaagtcatattgtaaaacaaaagggatgactatactgtacgccttttccatgtctgcagcaccaatccaacaaccgccaggacgatccctagcttccaccctttcctctggatccaccaagtccagaccgtcttcctgttccaaccaggcttcgagaaaggcaagctgagaggtaagagggctaaacggagaagctttcgtttagcaggggtatgtggtgggtatcgggcgttcaagaggatctctgcagacgcaggcacacggacgattggtcggggttgagtgaataagtcaaatccccatctttggatgttgatacgattgatcgcagaggttcacttccggttagagaatccggaaacagcaaagcagaggcagagacaaagacgaaatacaagaaggagcaaaaggaaacgtactttccgtgatatgctccatctgttggatttgtatgcatctcaaaatcaaggtcaacccaaccaactgctacaagtaaacgtgtcgcaaataagtaactcacgcccagattcaccgactcctccgaagggaatatgatccacttttttttagcacgaaagaaaaggacgctaatcaataaagctcgatttctttcctgatatgcgcaaggaatttggaagagaagaaggtaaagaagatgaacgtactaatggcgtgctggacgcaatcccctatgaggatcgttccactctgagtttgttcgatgactgttctccccatcggcaatcacatgcaaacatagcagatgaaaatgaattatgaactaattttttgtgaggcgatgacgttgcgaatatcacaacacaaagaaaaagaacggactacgttgaattgtctttttgctgtgagaaaagattgaaattccgagagaagacccttggttattgacgattcggatagcgtattctatactctgatgtccagtattgaggaagaagggagttagtgaagacacggagagtaaagaggtcacgagtatcaaagaaaaaagggaacatacatctacaggaacgaccaccaaaattggaccaaagatttcttccttcatcaacgcatccgtctcctttacattctttacgatcgagattcccatccgctttctctcccggttgaccagacctctcttgatgattgttccctccgtctggtcgagcagacgttcaagtctgtcgatcgttccctcggtgggaaacttaccgtaagtgtcagaatccaattcgccagcaggaaaccagctagcgagcaacttctcacaagcagccacataggcatcttggagcgcggttgggacgaggatgtagtctggggtcgtgcatgtttgactttgatttttgtttgatgaagattcagataattcaattgagataaggaaaaagactgtttgataaaaccatctagagaatcagatttttaggaaaaagacaggaaaggaagactgacctgcaattcatagttttataaacaaatgttcgtttggccaccagttcaatgtcgaacgtctcatcgataatcactggtgatttcccgcccaactgagagaatcaggagacgaactgcaatcagatcgtgcccgcctagttaaaactcggagaagagactgagcctcacctcgagcgcacacggagtcaaggttttggcgcatgcaacaccaacaagtcttcccactctggtagaccccgtgaatatgactggatgacaaaaccgggttgaagtcaaggtttttctaagaaagcgagaaaacaacaacgagcaaggaagataagatgtacaaacctcttccccaaggtttctccagcagctgttccgatacttctttctctcccaaaataactctgtaacacctctggtccagagtttcttcgatcatgtttttgagcagctttccggtgtgaggactcaattcgctgggcttgataacgaacgggcagcctgcagccatagcagcgatcataggctccagagcctaggtccggatattattcaccaaagagaacgaagtgaattcttctcctcaatattcaagatgctacgaaaaagaaagtggacgaacgagcttgaacggataattgaatggcccgatgcagagcgctggaccgagcggcgtaggtagaattgatgagtcatacaacatgaacccgacctgtctaactgtcggtttgatgggctttgccaattttttcagcgtttctaacacgatgagatgatggtaatgtcatttgattagagtgaacaatcatgtatgagagatggtaatggatcagcagacagccgttaacaatgatccgagatgcaggaataaaccaaggatcatgagcaagtaagaactgatttgaaccataacaacaggtgaacgaaccgacgtattcctcgcaagcccagatgagcgagtttatcgtcgacgtatcaacctctccaggatgctggttcatatcggcaaacagcgcatcatagatgagttggcgactctctgtttctctccggatacagtaaggaacaggacagcacagatgacggagaacagtggtcagtatggaacccaaataagtatgcatctcgttggattctggtcagtcaaaagggggagatgagaccttgtatagcataggcaagccttttgatctgattgatcctgaactcgaccggcaaacagattcgctctttgtacgccgtttggacaatttggtaagcctatacgaggagaacaatgtaaagggtcagatgcgaacgatacaagtgtgcgatgagatagcgtatcagtaatcctttacctcgcccgcttcttgcgtcttttctgaagaattagacatatgcgcgatgattgttggaagtgagtatgtgattgcaagtgcaaggaaggtgagaggccaaatatgagatcgaacgaattaccggtgcggtgtcccgtagacacgtgtggatccatctgcatagctttatagttatctacaagatatcacttcaaccgcataccgatacacttcaacgacatgtggcttggattagcgctgtgagaaactacgttatttgcttagcaagagaacggtcttacatatgatggcaacgtacatcgacgcagtgtcgttagcaaggacatggaacaaggtcgttgacggtacaacatcaacgagacgagtcacgtgatccctctcatcgtcgtgttcatcatttccgctctacttcttacctcttggatcaatcatgtccttgactaggtgtacagcatgaccgcacgacaatactcggcaactttctcgccgaataaccaagacctagctctagattctccggccgcagaactattgcttcctgttcacactcataattcttatagaccccacaatcggcccctctcgatcacccttttgaagagtgttgtgctgcggcgagttcggaatcaccaaaagactatcctggctttttttatcctggccgtattaggctttgtctttcacgtacgcctcggtactttccggcgcgatctcatctatttattgcgaccactctgggagtatggtgaaccatcttgggagatcattacccactatccggcccctttgtcatctatatcaggagatctggatattgattcgtggtgtcggctacatgactggtccacaagagatcacagaccagagatcgtggacgcagtcttattctcttcggagctagatatgctagagataaggatgagagaatatctaccatatgtgacaacgtttgtcgtggtcgaggcggaccgaacgttctctggggatctcaagccgactgtgttttcagacaacagagaccgattcgatagtctactggatggctcgggtgcaaagattatctatcacaaggtgacagggctctcaaaaaacctcgaaaagggatcttttgataacgaacgccttatgcgaaataccgtcggtgagatccttaccgccctagatattcctatcggctcactcatcattcagagtgacgtagatgagatcatctctggaccaacattggatctgttaagctcgtgctatggctacgaatccacccttcatctcaatgttgacaactaccgatacggcttcaattttcctgttcccgacggtggctactggcgaccacatatcctgacgacggataacactacggttggctatcatcatggtcgaggaagtaacacgttgctaccaggaagcggatggcactgctcgttttgtttccccactctcgaggagatgcgtagaaagatgctgggctattcacacaacgaccgtgtaagagatccctcaatcttggaggaggtgagtctgagagaaagagtctgcaagggtgaggatccgttccagatgtggccagtgagtgaattatcttcgtttatcgcctcagtctagcgatactaggaggccggtgctgatatatcctgtagaaagcgcatacgttcaaggatcttattactcagtctgggtcaatcaagccatcccactcatttactaatgtgcctgtcgcattacaacaggagcccactaggtttggatatctgctcaacgacggatgtgaccgaccagacaagtagtacgagcatgtatatataaacatgagtatataaatgaattatagaatgctacaaaacagaaatagttgagcgaggcgaagacatataccgggtaagttgaagagtgggaatagatccgcttgtggccgagtgtgggattggaaatggctagttcaagagaagatcaatgtggatgaatatatactttgagaattcaaacataacacacctttgctagattcacgcacatcatgacaaaccctttaacatcaacggataatgtctcttattggtttagttcggcgcgtgttgtctacaacgattcgagtttccgcatagccaaatgtttctggggtttggctggctggctggctggctccgaccgccaagtttcccggtccgacctgacgtcatctttaccgggtagtgtgatgattgttcctcgactgaacgcctttttcttgctaaaccccaagagaaagaatcccacgagatctccatccgtagaagaaccaggtgacctcgttcaagagacaaagatggaagtttgatagaagatgagctcttgacgacatcatcatcaacggaaaagcagaaatcaccgtcatcgagcgatacatcactttcttatttctttctgtatataaagaaaccactagcgttcaatttcttcgatcttgacctcgttctcgttctcgttctcgttctcgttctagctcttcccatccattcatttctcctggtttgtatctcttggagcgtctgtaacgtcataagatatgttgaacactcaaccttctcttctctggaagagtaccttgataggtctcaccctttggaccgccgctccttccgttcaggcccagtcggcctctgcttctaactctggtgcagctgcttcagcgacaacgtcctcggtggctcccgcagagccttcgacgactctggcaccaacagctttgttagaaccatatcctgctttggaagctcaaagctggtgcaccagccccatcttttgtgcaggcgaggtcagctgaattttcctgcctgtttcgtcacaatctatgttccgtcatgtctatcaggtactatgagcaaggacgcaaccctctgaaacacattatttctgcacatcgcctctgcgcatcgtgatgactagatcctcacaaccgtagaacttgcgcagctgtatccggattcaaaaaccttcccggataagcccactcggtacaatgtcagcaccaccgtgcaagctttccaggcgctcaagtctgccaatgggtccatcgcagttggagatctcgaaaactggctcgatcagtactttgtaaggataccgactgttatactctctttgtagattttagatgacaagcggactcaagatctgtctttcaaaaacctagacaccagaaggggaggagcttgttgcagcgacaattgatgcttctttcaacgcatctgctactcctttcttacaaaatgtcactgacccagttcttaaaggttggattgccgaagtgatcagctattggtccggccttatacggtttgttacatccacagatcctctgtttagtgttgtcgaaatgcgttcgtactgacaatctctgacggcctcttgtcttctggtagagaaaccaactcaagcgcactttgtggggtcgcaacggattgtgcatccactttgattcctcttaaccacacggtcgtcgttccaggaggacgttaccgagaaggtaagcttctttctcaaatcgtatactcgtttcgacacgacactgacctagtctactgctagtttactattgggattcttactggtaagagacatcggagtaacatagaatgtcttacagcaaattatctgacggtcttggttcttgctgaccctgtcacaatcctaggattatcgaaggtcttctcaattctggattggcttcatacgccaagaacatcctgctcaacttcatggatgaattgagcttgtatggattcatccccaacggaggaagaacatactagtatgttcaacgcattcgcatatagggtatgggccgtccactaatgcatgtatgcctttcctcacagcttgaatcggtctcagccacctctcttcatccaggtacgtatacatatctatttgtgttcgtgaatatgtaccagatatatcttcttgtttaacagcgtcttgtttccctcttcagatgctgtccctttacgtcgactttaccaatgacacctccattttggcccaggctcttcctctagctgatgtcagtaccctttctttttaaatgtccattaagaagaaaatagggacttaacctgctcgtgagagaggaaaaacctgccaggctgagcttcaatggtggtacaagaaccgaactggatctgttacttcaccgttcacaaacacaacttacgaggtcgcccgatacgacgtcttcatcaatactgcccctagacccgaggttcgtgtctcacaactgatcagtctcatctatacacgccgggccctcacctaaattaagcttgctggtcttcggatcaataccaatatttctagggcttcgtcgaagattgggagacggtcaacctagccaatcctgctttcaatgcaagcgcagcgctcgaattatactcagaactagctagtggagccgagtctggatgggactagtatgtcttccttctcgattcgaccctctacttgtttcaccacctttaagttatctatttgggggtctaacgccgactgtttcgccggatgcacagcaccgttcgatttatgaaagatggattaaagaatatctctgatccattggagggccttcgatcgcttaagtacgtcattattctcccctgttctcgaggccgagaaagaatgcttgactgactgactggatgcccgtattctcatttgttttctagtatccgacagatcgtacctgtggagctcaacgctttgctcgctgcaaactattatctggcaagtaccctgcctcagctccaatcttgatgaaggagtatgaacggtttagttaatttagtataactttctcagctggccgacctaaacgaccagtacggcactttgaattcaaccgccgggaacgtatctgctcgggccgatctgtatagggaacaaggtgacaagttgaaggccgccgtgttggacctaaattgggatcctgaaaagttggcgttctacgattttgtcagtttctttttcttgttctgtttcaatttatcggcatgtcttgttctgaccgataaaggggtcaattctgaactcgtcgacagaacaccacctcgtctaaccggtccaccttcttctcggtcgctacgttctatccttattggctgaacatcatccctcccgagttggaggaggacgaaagcaagttgtttggggcgtttgctggtctgagctatatactccacaagtacaacggaagtgttcccgcctcgttggtgtatagtaccctgaattgggtacgggctcaaatacgttatctacagtgaggaataaagtaagatattgattggtttcccttctttctaaacgtacaggatttcccgaacgcgtggcctcctcaccaatatatcatcctcaaagcgcttaggaacctgccatcgaacgtgacgacaacttcatattcaacctttgcgcctgccaacgagaccgcatggtcaaccatcccctccggccagcttggtctcgaggaagccgatttgcctgctcaaggaggttatggtggaggaaacaggacagtctacaactcagacgtgatcacgaatggaggtaatatttcatccagcgagccgtggtctcaagtgttgctcaccgctgtggtccaaagatatatcgatgcggcattctgttcttggtaagtctaaggtcttctcgtccagccaagacttatgctcttgtcgacaactgacgattcatctgaggattgattcaggtactcgacgggtggatcacttccaggaattttgtctcagcttccagccgatcagcttaatgttacgaattcctctcctagtaatactggaaacatgtttgagaaggtttgttggcttaacctttttctcgctcatctgaagttctctcaagtgatcatgactgatccatatttccggtgtttccctttagttcaacgcgaccgatattgatgccggtaagtttctttttatcggtacaacctttttgggtgtgttgatgatactgacgtgtctatttgcttatttagccggaggaggaggagagtacacggtcgtcagtgagtggttgcatcgttagattgctagtctggactggccggcaggcacttgaccaatgaattaattcgcttcctgcttctttctcctccctcgcagctggcttcggatggacaaacggcgtggtcatctgggctggggcaaactacggctcaagtctagttagcccaacctgccctgcgatagcagtcagctcttcgaacgacactgttaatctgtttgccggtaaccgaattctctaaaacagatcgtcagagatgagcgagatgatgttgtaaataggttgtgtgatatagcaaaaaaaaaagaagaaaaaaaaacggttttgtgtctcgttagcgtattaacaaatacacgcctttgtctttttgtctcatttaatctcggtatatacatactgtcaacaaaacgttgtaaacaagtgtatcgaagactccttctgcagagtgtatatctagttgtctgctttctgtttacatgtttgactgaactcgcctggtctcacctcatctcagattcctggatgtaaaataagtacatctgttctgtgttcaaccgagaaagaaataagggaggcttaagaagtaaataacgctgatttccgcaatcgtttgtttacctcttgtctactgttcgagaatagacgtcagagatttgagaatagacactgatcggagccggattgagtgagaagaaaatgccgtgccgctgttgaaagcgcagcaggtttgtgtcggagagttttccaatctctgaagtttctccttgatcgtgtttcgcctcttagagtttcgactcggcagtggttttccgttggcagcgatgaccctcagcatgatatatacacgcctttggagcaggatggattgacttggagaagaacgcaagatgatcaagaaatagaaaatagaaaaccaacctatctgggaagtacagccggagagagtcaagaagacatctttatccttcaacatcaacacaaggaagaatctttgaacatgcactcttatcgcttctcgcccagcctctttttctgattgtacactgacctgctcgggagaaagagaaaccacaagagacaaggattagtccatcagataatgccactcctaaagatcacaatcgacagagatatacagacatacatcctacaaaagagataaagctgcggtaacatcaagttaccgtgtttcagaggtttttcttgagtcccccgccggagtttttagcataattctactggcagatcgtcatcataccctcggcacacgaccacttcaaataccgaagcacatcagacaagcccagcagacgaaaccttttttccattcaatttctcgcttccttctttctcatcattcatcccacttgactcttcttcctcattctatttttttctcgctgacaacgcacacaaagccgacttgcatttcatccttttcatgcaacgctcgatccgtctagcgtctgacgcgtcgtccgtctttggttcgctcagttcgaattcaaacgagcatggtcagaccaaatggtcgttcttagcttttcgttcaaagacaacaagactcgtcatcttggcctttgcgctctcctccaccgtcttgtttatcttgctctctctcaccgatgcattgtctgcattggacgtcatgagttctcccttcacttcactccggccttccggccagagcactatccccactttaccgggtgcacttcagaccgatgaggcggatgaagacggttcctacagcgaggatatcgaggaggaatctccggagaagagcgtttcagaaggatcggaagatacccactcgcagccttacattctaccagactttttcaccaagccgacgttagcggggatgtcctcgagaaatttgaaagagaactatcatatctttaagccaaataagccgtcaagacgagcaagggccaaagattggaagtccatcatcgaggtccctatcctcgatgatgactgtctagagagttgggtaggcaacggtcagatctgttcaaaggaagctatcgcggccgctcccgtcgagatagatgtacgtttccttgttcctcatgcaacctagcaataacttccaaatttattcattctcttcccgttcttcatttcctttttgcacatactctaggtcgtctggacatgggtgaacgggtcagatccttcctggttatcccaatacatccacttctcccaacccaacatcactaagcttcgctacgactctggcgcgcccccgacaaagcatttccggaataaagacgaactgaggcacagtctgcgcagcatagcagacaatatggctccagaaaataaagttagacgactccatctcgttcttggagactgggcgctcgataaagaggacggacaggagcttttgcaaaggttgggagagcagccagatcagacagtcggtccggtcagtccggatagagagtggaggatcggacaaatccctggctggctgaggacaagtctggtcggaatcgaggtaggttttcttgctctttgctcacccgatctctttgctccatggtgttgtgtatgttcttcacttaccaggtcgctctttaatcgtttcgataggaggacggaatctctgttcatattcaccatcacgccaacatatttgttgacagaacctcgacagggaccctggaggaagctcagctgtaccgaagtcgaacacttcccagttttaattcgtccgtcattcgtctatctttcaattctgctgcctataatgatcaaagttgctaacatttctttggattttccgcaaagtaggttttcaatcgaaggccaactactgaatattcctggcatagcgccgtactttatctacttcaacggtacgttctgatatgttatcttaccatcaaactcgccctttttagatatatgatgtctaacgtgtcctttttccttcgacatgttcgtccttctccagatgactgtgagttcttgagcttccgcaccgaatgaatgtgtaaagatgctcgtattcctgacagtaatactttgcgcctcacctcacgaacaataccaccagtcttcttgacccgaaacgtgagccttcatttcgtttatcgcaacttactatccatgttatatcaatcgcgaagatattagacatcagacttattgatctcttcataccatatgccccatttgcgtaacacagcatggtaggcaagactgggtgactccgattaccggtcccgtcctccgattagctgttccatcgtggatccaatccgcagagttcccaccaacggcgtgtccgcacgagtggtctgcgttactgagaagtaattggctactaagtgagtttccgttctatctcagaataccgcgaataaatgttctgaaatccttcttcattgccttctcagagaaacgattcggcgatcgaaagcgaccagggttggaacacatacccaagccaatatcagtgccgatgatggatgaggtcgctaacacttggccagaagatttcgcgttgtccagcaaacgaagattcagagaagtcgattctggtgcgtcatcattgtctgttgtgaaggatttattcttgcatacacaatcattttacttatcttgttggccttgtcgcggaacatataggggccacacccgaatcaagaatcggggatatccatgctatctatctgtcgacgttgttgcttgtcgagcgatctagagaaagcatgctctacacttgggctgtccttaaaatgtctgtctcgtcttttctcaatattgtgcttttctcgttttgactttccacccaagaaataatcactaaatgcggcggtctatctacaacgatcttgacccgatgtacataggggtggcgaggatggtatctggggtccaaccgcgcgaaacgagatcaagaggttattcgccctggctccaaattcgaagcagtctattatggtaccaggtgtgacaaaggcagttagaccttggtttggttggaacaaattaaaggaatccatccttggaatggattcggagttgcccatggcaacatctctccagtggtgtacgttcctcttattcttctctttctctcttcgtttccccccctcaaacgacatgagaagacggactcatgtttgatccatcatgttgaaccatcatcgattctcacagcgagcctagacggatcgttacccaaaggaaaacacagaggtagctcggcgaggtgcacggttgacctaggaaagtgctttggaccattttggacgatgaaaatgaacacgacagcggagaacgccttcaagagattgacattcctatatcctgaatgtggagaatgcagttcgttttccctttcaattattgtctccttataatgccaaaaaaagacgtcggactgaccatcttgttcaacatgtagttctctctgctcttgttcgtgattccgggccgaaaggaattgcatccatccttccagatcgaaacgcgacatttatccctactcaaattctcaaaaaggaaatacagcctcacatgccattaacgaaagaatggaggccaacagacttttcaagagaagctgtgattactggtacagttgaggatgagcccgtcaacttgagaaagtgggcgttacggttgatagcgaggtatcagtatagtaccggtaagcattcttcttccaaaggtcttgggtttcttagtattgaaaactcatcaagctctgctcaccccaatcgcccatctatggtcatctaatcttcaggcgagaatgaatttgaattctcaatgatccataaccctgatgacctgaaggcaacgaacgatcgattgacccacaacaagggcattagctcttttgtcctcaacgatgatcttggtaagtttgggtttcgactctaatttgtgcgctaccatataaactccttctgatctttatgcctggaatgaaaattctccaactacagagggcccgccggatgtgttagatgtttctatccgactgatccgatcgttcttggaaaacagatggcatttgaaagcatggtgggaacgatcaggctggacggatgaaagtggaggcagtcatcattcagtctctatcagatccccccatcagatctaacgaaacatacttctcccagttcaaaagacgcagagtaaggttttcgttacttatttatcaacagcatatcaaatcactagtcgcccttcattcatagactagtttgcatagactccaattccttcatttctctttttctctctcaatactactctttttgacatacagttcccatcccttccttgcatttgatgtacatcttgcccgttcttttgccttctgccttccgccctctgctcatttcataacactctttcgaatactttcaagttgtaactcactctggtttcgtttctatcaagggttgcgcaaacatctacagtgccttctcttttcgtttttgtctcgcctctatcaatatgtgttcatgtcatggtttatcgttatgaatcttcctttcacattccgccgatggaagttttcagctcgccttgggatgttgtgagaatatccatacataaattggtctccaccaaacgagacgttcagaaatccattgcatcggtagtcatccgctgtctcttgctacggctggatctacccaaccgaccttgaacgacccgagtttggtagctttcctcaagcgaatgacgatctttctcaaaccaagtatgtctgagcgcttgccggacggacatccgaatcgcaggttcccgacgtaataggccaaggatgagatcttgaactgatgcaattgaagaaaaaaatcccatccaggtccgagtcagacatagtgaaccagagaaaccagttatgttgagggcgagaaaccaaaggagacgcaatatgtatttatttacctgagggatggtatgatgaccaggtatctggactaaattgaacctggaggcaagcgatgaataattgggttgttgattctcggttgggttgatcaggccattttggggaaagaaaagaagagaaagaaaaaaagggagaactcacctcctgctcacaaactctcttcgaaaacaagttcatatgttgttctgccgttttttccccaacctccatcctggccgcaggtttccatttttctcccaaagagaacgaccgagcgccaggtcgaaccccggcgtgcgcgtccgagctcattcgacgagagtgacctcgatgctgatcgatgcttgacttaccgctttgcatctcacaatcggattcttcgtcttcttcatttccaaaaggatgataaccactgcaaatgattatcatcatcgttatcagaacaacatgaagtcaaccgtgcacgacggaacatgagcgtggataaaccaatcataaagacgaaggctagaaacgtacgtagcgatgatgaagagcacgacccctagggaccagcaatccaatctggaggcgtctaacaagacttcatttcgagctctaattgttttgtccttcttcaacgccctcagtcgactggtttctaaattcacccaagccgaggccttgatgtattcgggacttggtggaaggattttgcacaacagccagatcaacataaatattctcgagatgatcaaattcaacgacactcacgaaaagtaagcagccgttccaacgatacttggcgctcgaattgccaatgcgttgctttgtggagctcgctcatccggatgcatagtcgatagtccgaaatcgcagattaggatggtcggatagacttcaccctgttgtagtactgttgtgacattttatgacatgatcgcacagtcttcagatttcatgttgaatctcaacagaacgaaccataaaatgcttacatatgttttcaggcttatgaagtcgagtgtcagacatggaaccgcgcgattagtatgttattcgacgttgtcctgagaagagatatgttgcttcgtaccttcaaatcttggtgatggtggaatcgacgagtcaagacgatgggttcacattaaacgaactagtctggttgatataggcaatgttgtgcttcatgaccaatctcacttacctcgatgagcgcacccattctcatgaagatactgtgtttagaatacccgttgaagttgatttacatgcccatgacagacaacggcaggaacgggctcaatgtaagagagacaaacgctcacctggacaccatgaagaatttgatacatgatatactttgcttcagcttcttccagctgacggtgtttgatgatgtaagaaaacagatcccctcccgtcacacttttagacggagtcaagttagcgaagaacatttatcttgcctagaaatattttgagagatgtatgaagagcgcacagttgaaggaatatatggaaatgactctctgtctgatggtatttaaataccttgatgacgttgggatggtctaatttgagacctagttcaagttcattgtaaagccgttcgaaatcccggtctcctaagagctgggaacaaatatcgggatgaggcatggcatatttcgttagtgatcaaagctacgatctaagatcggtgcaaatggaacaacagaggaggaaggtatatgtactcgacttttgggcacagttttgcatgcctagaacgaatcgctcaccatgaatcacgaaaaagtgtaaatcactgatcttccacttcctccttaaatataacgaagacaggatcaagaaattgggatacttaccacttgggcttcagtcctgccatccactgctaatctgacttttccaaaactccctgaccccaaactttggtctaggaagacacggtaatgcccgatcttgagcgttgctggaactgaggctgtcttgcagttgggagggtgcaggccccgatcttctcgataagaaagtatcgatgcttcagatgagtcgagtaggcctagttgagtatgatcatcttcatccaaatgattgagcggaagatgaaaaacgaatcctgacagcagtgcattgagagtcatatgagacagagacaaagtctttacgattgaggatcgacaacacaaaagatagtgaatgcgcacttttcgtggtctgaggtatctcgatgatatctccttcggagagaaagattgcttggcttttaagtcgtttaccattcaccactataccgttcatggatagatcctggaacgacaagaggtaccaagaaaagagccgatgacgacacgagcacgggtgtatgcggattagatcgaatgggcaacaaaattgaggtctgagcagcacagttagcaactaacctcgacacacgaaaggggttgattcttatcattacggaccctagtgggtgcgagtcagcgaagaagatcaagagagaaaattgatgaggattcaaggtatcgttggctatgcttcagacacaaaaaaaggaaagggtttttggccgcacgtgtaaatgcgcatatgctttcccgacacgacaggggaagggacaacataatcactgcaggccgtgataacattcagtcgttagctatgcttttgaaacaaagacattagaagagaggatacgccaaccatgtgggatttcttccaatgaagaagggatttgttgatgtgagcagtagacctgtgattgatagtaaaagaacagacttgttgaggcgaagctttgtatagcattttcgactcatcaatagaacctacgttctttccccctaccgtctgtccttggtgtcatcaagaatccgcatcctctataacctgggtcttcttgaagtcttctctcgacttcgtccgttgatttcttgatcggcgaggtcaacggagttggcgaaggatgtatgataatcttgaactcgggtgatggggatctgaatgaggaaggaggtgacggagtgaggagaacccgttttctattgggaagagctatggaaggaaacattgaggaaaaggattgaagtacagagctcgagatgggaatccaattagatgatggacgttgaaagaaatgagtattgaaaggtgaacgaatataagtgggattcggatctgatgacaggtttatgagcaactaggacaattctgcttgatttcaatgcttccatcagcacgacagtattgtttctctctcatcgcatacacatgtcagtcacctctcgagaacatagattgtaaggttactttcacaggtgacgatcaaaagaaaagcatcatcgtacaattacaatccaataaggggaagaaaccagagctttgccccttgtctatcaggatttttttactccatgtcctcctcgtcctctccctcgacctcttctccgtcctctccctggatgttgaagaacctgagctggtaagagtccttgccggacgcaaccactcggacaaagtccctcaaagttgatttcttgaggtatcgcttggtcactacgggaacgaaagaagaggagactgttagtgcgccctcaagatactagcaacaaagactagcaacaaaggtaactttgagatgagggatacgaacaaaacttgaggtatcgcttagagagagcggtggtagaagtgatgacaatcttggtatcctctacagcggatgtagaggaaaagtcaaaatcaaagtcagtgtcacttctgtgtcagagaagatacgaagttcaaaagcacttaccaactcgctcgattccaacgaccgatccgagctgtccaggctttccatcgatcttgatgttgtcgtggaggtactgaacgagaatgccgtacgaaaccaggtgagcacaaactctacggtaaatgttgccctatattgtagaataatcctcaccttctcgaatccagcgacatcgaagatcctgtcctcagcgggcttggtgcagtcaatggtgaagctaggtagacacgacatgaccacagcacgttcagcaagagccttgatcaagcaacaaactgattcaagccggacagaactcacgactgagccttcttggaaggaccggtgggcttaacgactttgggctgtagtatttatcgaccagttattaacaattccttccaacctttctctccaccaataaacaaacagctgaaccaagcaaacgcataccattctgaatatctttttgttgcgaacagggacactactggcgtggatgatcagcaaacgtggtgctctggcgtacggatgggtgagtgtgagggatggcctaaggcgagcgggcggttgcgcttaggcctcgcggtgtataattttcaaactccggtgaattttttggaagtcgaggtccgtgcgtcaggtttacgcccaaccgtccttctctcccttcgttgaccgtcaagaacaccttcaagaccaaacgaacgactctttgttttcacagcaaaggacccggtctgattctttgggatacccaagtccatctgttcttcttctagcgcctttgttttagatcacccgacagaaaggaaaagaaaaagataagacttccatcatgactaccgtaggaaccatcaagtctatcgcccaggctcaggtcgatggagatttcgccatcaagcccgaagccgctcagcctgctcttggtgtgtagacccttttgtcaaagaaagaccctcccactcgcccaagataggtcaggcggctaagatgttctgtttccctacttgcttgctttggtttcttgttcttttcttctcttcttctttttttttttgctctctttttggaatgtaatcttttctagatacctcgaactggcctttgcttctcaagaactacgacaaggtaaatttcttgtcgtcaaatcttatctctttctatgttgagactgaccatagtgcttaatgcgacgtgtcggtccactacaaacaaaacagctccttgtccgatcgtctcacttcactcccatccctgttgtacgtgacagctcatcattttttttaaaaccttacctttccgagactctatttgactgatcatccactcttcacaacttcattactacagggatgctctcctttgaagcgagatcttgcttcctacatcaagtttgttaattcctcactcagccatctctaagatttcacaactgaccgctcgcttttttcttcttttgatcggctttctctaggtcgggagtgatcaaccttgacaagccctcaaacccttcgtcccacgaggtcgtcgcgtggcttcgacgaatccttcgagctgaaaagacgggtcattccggtacgctcgatcccaaggttactggttgcttgatcgtctgtatcgaccgagctacccgacttgtcaagtcccagcagtctgctggaaaggagtacgttgctgttctccgaattcacgctcctctcgaggatgagaagtcgcttccccgggccctcgagacccttaccggtgctctcttccagcgacctcctttgatttcggccgtcaagcgacagctccgaattcgaaccatctactcttccaccttgatcgagtttgacaacaaacgaggattggccgtgttccacgtgtcgtgtgaggccggaacgtacatccgaactttgtgcgttcacctcggtttgcttctaggagttggaggacacatgcaggagcttaggcgagtcaggtcgggagctatgggagagaacgacgacaccgtcaccatgcacgacgtgttggatgcccagtggttgtacgacaacaaccgagatggtgcgttttttttcactgcaagcaatgatgcacacacacatacactcgaacttattagtatatcgtgatgtggtctcggattcttttttctctcctctctagagtcttaccttcgacgagtcatccgacctcttgagtctctcttgaccggtcacaagcgacttgtggtcaaggattctgccgtcaacgccatctgctacggagccaagctcatgatccctggtctcctccgatacgaggccgacatcgaggtcaatgaggaggttgtctttatgaccaccaagggagaggccatcgctctcggtatcgctcttatgaccactgtcgacttgagcacgtgcgaccacggtgtcgtcgctaaggttaagcgatgcatcatggagagagacacttacccccgacgatggggtcttggacccaaggctcaggagaagaagaagatggtcaaggccggaacgctcgacaagcacggtcgaaagatcgccggtgtcactccccccatttgggacaagagctacgtcgactacagcgccgagggtgatgaggtccgaggagagctcatcaccacccagcctgacgctgccgctgccgttgagcccgttgccgtgccctctgcgtccgtgacagagctcgacatcgactctgccgccgctgccgctgccggaacgacggacgagaagaaggagaaaaagaggaagcgaaagagcgaggctgccgatggagccgaggccgtcgagggttcggccgaggacggcgagaagaagaagaagaagaaaaagtcaaaggatgccgaggatgttgatggcgagagcccggtgaagaaggagaagaaggacaagaagaagaaggaaaagtcttccgaggagtaaactcatcctctgtttctttctctttctctttctctaatatcttttattttcaaaaaaaagaaatcctcgatatttctcatcccacccgtttcttgtcttactttggctgttttcgactttccataacccatcacccccttgttttatgttctttccatcctcattcgttcacgattctctgtccatcggatctttgttctttccactcaagtcttcacagcaagacgctccatttcttttgctcttatcattcatgtaggattgaccacccgcccgcacatgcttgttgtgtcactgaaaaaaccaagcatcacacactcgatatacatatatgtcatccatcagatgattgacgcacaaccggaagagcgacgtcccaatcacccttgatcacacttcgtttccgccgatccacacattgagagagagagccaaaacggggaaccaaaaaaagaaagaaaataaccctagatcagacctcaacaaacaggaacttgaaaggacaaacaaaataataacggaaagatgaacctttttagtctccagctcctcctgatcccaaggggaccggccaaaatgataccggccgtcaggaacataaaggtagccgacgtggttggcatctctggaagtagcgactttatagttaatccgaacaatgctgttgctaaaggaggtgtgaacgtgggctttccaagttttgttgttgtgatcgattcccagacacaggtgggagacaaaaaatgcgtggtgagcgtaagaacgaaagaggtttatgcgtaaaaagaagagggacgatctcacagagatctgacggagaaggatcggtccgagcgcaaaagacagaatcgagtataagacgagagcaaacacatgggtatttgtcggtaacctagaagcaagaacgaccgaggctgacagggaggatgtcaacgccaaagaggaagacagtctaaagttgagagtagacagaagattgtaatcagtataccagaattctaaagataaagaaggaaattgaagagatacaaaagcaaggcagaacgaacctcttcggaccgccgacatcccttccatggtcgcccaagagtagacctaacacaaacaaaccaccagctagaggccagattgagtcactcgtggttgcttccgttagagttctcaatattggggcgagcgcatggaggaggagaaggcttataatggatggtcgtaggggaaatcggcctgtgtgttgcattttgtgaaccagttgatggttttcgacttcagttggcgacgaaacagaattgcccaggtgatgagaaacagaccaaccttgacaactgtttcttaaccaccaaatcaaccatccaccagatccagcaccgagacttcctaggataacataccccgggtcgatccgcccagtgagcaaaccgtgaaacacggcgatgaacaggaagtgtatcgacagtgggataaagattaccaagcttgacaggatgagtggaccaagcttgggtctcggaggcgaagaagctagatttcaatcaacacatatgtagacacagacatttcagttttagtcagataatctgaagacggaaaggaatgaaccaaggcttcttccaaaagagggacgaacaagcttctcggagaacgtcaagaaacgtttggtctatatgattatcaggaaacttctgacgtcggtacaactgtctttcccaaatttcatcaacctgttcagtctgatcaaggtcggagtcgaggtctccgttagtctttatccggttgagtttcacggctgatagatcgtgtgatccattggggatgaccaagagggtaggacaggccggtcgttcacgtccgttcaagagtaatgctgaggagagacacgaggtcgatgggggtggggaggagtagggaggaggagagaccatggagatgtatgtttccagaaaggagcatgatcctagactaggaagagcagatagaaagtctcgtcgacactcggacggtgtatgttgtcgaatgtcgaaagatgatggtagtgggatggactaagtggtttttttttggatctgatattttcttctgagtgtgttcatgacgcactcttgcgctcagcatccatctgtttcctcatcatgtgtacatactcagtcatcctctttgtacattaggcttgattgatatccatttaatattgtctctttctgtgatttcttctaactctcgatcccatccataccgcctccctcaacggccactttcttactctgtttagctaccggcttcttcatttgcacagagttttgagcgtgcagccggatggtctcccatggagaagctttgaaagccggatgagcttggatttgaggaagtctggctgcttcagtttgactgatgagagaatgtttcagagtgtatgtgtatcgagtcagctcaatatgaaaagcaaaggtaggaagagaggatggaatgatggaacggacagcgctttatttctttgctttgcactcaaccctttcccacttccctctccgatcttcccagccgatgttgctgacttcctgtccgcctgctgtcggttggccttgttttctgccttgttctcgacttcatcctcgtcctcctcggtgttatcgtcagcctggacagtattggtcaaggctagtgtaaggtcgtccattgttccaccggcgagtctttctttctgctttcgtttcatcctccgggcagctgaggctgatatcgggtaaggtgacgacggcgagggatccaggcctgacaagccaagggaacaagcgcgataaggttgagaacagaagggtgtgaacacaggcgtcaggtctacacatgagagcggatgaaggaacaagtgagtgatcgaaacattaggaccaacgtttcaaaagagcttgtcgcttggccgtctgtttctccttcttggtcaactggggtgcgggcgccgagagtgtgcccaacgactggatagcactgcttgcctgaagacagagttcgtccaaagtcattattaatcatgaggatcagcatagctatatatgtacgacataactaaaaggaactctacttactgactggcccatgagcgagttgaaatcgaatcctggagcggtgaccgagccggtgacgagtggtttgtcttgtccagtgagagtcgacgacttgagggtgctgctacccgagccagcctgcctggcctgtctttgttgacgggagaacggggtttgctttggctggtagccagacaagacacattacagacagttgtgaacatgggtacgtgtgagctaaccagagacatagactgaccatggtatgtactgtgggtgttggtatgagtgtcgagtgctgggacaatatgaggagttgatcagaaattgtggtcacgtgaccgagatacccatagtgtgcacacaccgtcaaccatgcgcgctttcctcctcgacgacggcggccaccacgatggtgatagcagccgggaaggatgagatgagcgagttcgattagaagtaggcgaggccgatagagtgaaactatggaagaccaagctatcgatacatcgtgtgcggttgactaccgaactgtgatctctctagagagccctcctaccaccgctcaatcctacttgcaagctgagctccagccgagacccacctacatagcgctctccaacaacactacaaactcacagccgaacagatctccgttcgccagtctttcttccagtctatctacgcatatcggacggctctgagcgtccgtggcgcacacagcgggaaacctattaaggactgttttctaattagacactacaaatattttctaatgcccgcccaaacaaacgcgcagtcagccgctcggctgttgcagtccatctcggtgattccttacatctcgcttgctcttgttctctcatcaccatccctctcttttgattctgtccagagtgtcggctgcaaatgaacgtcaatccgagggatagatcaaatgagtttcgccagtgtctggcctcgatcgctagtcgttcaggtcagacggctagctcaaaggggaagggaaaccaggcaaaacagccgagtagtcaggtagccagtcttgctgctggcatcgcccgggatattaacgcaaccactgggaaactacagaagcttgctcagcgtacgtctgactgggatctctttatcttgttgatgaggtcgttcgtcggtgtctttgtttggtctggtctgatcttgtctgtttcaccgttttcttgtatctctctcatatcagtcgccaagcgaaagacattgttcgacgataggcctgtagagatttcagttcgtctttcttgggtctcaaaccatcagctttcttctcctgcgatccatgttgcaaccacatgttgagcaacttcttgccttaaatacttctccttgacatctttccaccactaggaactgacgtacattatcaaacaagacatctcggacctcaacactcagatcgcctcccttcaacaactcacaaagtcagccaacgcggccaacgcgagctcgtccggcagctcgggcagtgggaagaaacaggtcgaagagcacaactcaaacgtcgtcatgttgcttcagagcaagctcgcagatatgggtatgggcttcaaggacgtactcgagatccgaacccaggtagaatggtttctctcgtgtcctcttttctgaagagaccagacaagcgaggctgatgctgttttgtttgtgccccgacggaaattcagaatatgaaagcatcgaaggatcgaacagaacagttcatgtactctgcttcctcctccaacagccttgctcctgctcgtaggtctatttatctgcgattctttctttctttctgtgcacagtgagctacaggatctcggaccacccaactgacgttcaaaaatcactttgttagaatccatcttgaacgctcctcccacgagaccgtcgtcaacttcaccctacgcaccttcgagtctccaaccgaacggccaatcatccaaagcatcatcttccctgcccggctcgaggtcgtccatcgatggagggtctggattcccaattgataagaaagggaaaggtaaaggagattatcttgcgttggacatggacagaccccaaggaggggatgggaaaccaggctctggacaggcttcagggggaatgcagcaaatgatgatgatggaagaacaggtctgtggctttcctttttttgtctttgatttctttggtgttctcatgatttgttgttttcccccttgtgcgtgtttccttgggctgacatacatatgtgtaacaacaggacgactacatcaaccaaaggtcaaccgcgatagagacgatcgaaagcacgatcgccgagctcggcacgatctttacccaactcgcaggaatggtggctgaacagagggagaccgtacagcggatcgatgccgatgtttccgacatctcaaagtacgtgcctttcgctcctgttttccctgcttgaaacgtcaagacggatccaaaagctgaatcaaacggggccatgaacagtaacgtttctggagcacagagagagctattgaaatactacgccagcgtcagcggcaacaggtggctcatgttgaagatctttggtgttctcatcatctttgtatgtgttgtttctgtttatagacattctacgctcgagttcgagtcggagaccagagtgattaacgaggtttcccacggtcgactctgggggggtccctttttgtttctctttttgttcttcatcttcggaccgcttctccagttcctgttgttcatcctcgtcacttgatctccccttgaggaatcttccggacacattcggcccaaccctctattttgaccagatccgtcttggctcgtaaagtcccggctcgcgcgagccgggacgttacctagacttttcttttatttgctttccttttcttccttcttacttttccttttatgtttccctgtttctctgtttttttcttgtttcctcatctggttcggttcggtcggttcggttccgttcgctctgtacctcacagagtcctggtcttttattttcttcattctccgtaatctaatcattgaatcagataaaagaaagaaagaaagaaaaggggagagaaagagaaagagaggattgcaagaacaaggcatgcagaaaacggaaaacggaaagactacgtagatataggagaaagcagaatggccgacgattgaaagaaaaaaaggaaacggtcaagaggaagaaagaaggaggggcaaaggaaaggaacaggcgaatagttacatatggaattggattgagaaaggaacacagaagcagagagagtagtagtggtagtagtagcagtagtagtagtggtggtggtggtggtggtggtggtagtggtgaaaaacaagagtgaaacgaaacgaaacgggtcgagttgaactggacttgtgatggcaagagcaaacgaagagagtgggaaggagggtataggacatacacaagagggagatagtatgaaagacagcgagaaagaacaagaattatctacggaaacgaagaaggtgagtgaaaatgacgaaaagaggtttcggacctttttaaaaagtggacaaagcgcattctttccttctttccttcatcacgaccaaatctggagagaagagaaaaagaagagaggaaaggaagaaggcacgatccatcagatccaagtccgcgagaaaacataaaaagcagggaaaaagacagaagagcaagacggagagactcactttgagaaggctatcccaagaacccgtgcagagcgccattccgtcctgactgactcccaaacacgacaccctgttctcatgcccgttcaagatccccactcgttctccctagaatgttttttttttgggggggggggnnnnnnnnnnttatgttccagattgaacacatgagaaagaagggaagagaaaacaaaagagaaacagcatggccggtcgggttgttcagaatcctcgagaattctacggacacacgaaggacaaggccgggaagaaaatgagacagaccttgagcgtgtcccacacgttacagttattgtcatcatacccggcaaacaagatccgaccggaagcggagaaggcgacggaggtgatgccgcataggatgttgtcgtgaacgaacgtgttgagctccttgtcggcccggaggtcaaacaacctgcaggacgcgtcgtcagagccagtcgcgaaggcttctccgttggggaagaatctgaaagaaacaagagtgggtcagaaggataggtcagagagatagaccgagggaagctcttgtcgacagaagaggatcacatactggaccgcgttgatatcactttcatgtccggtgaacgtctgaacggcctttcctgatcgaatgtcccatactttggccgtcgcgtcacaagcaccggacacaaagacgttggcgtttggtgagagcgagagtctccagatggtttgatagaacggttagacatagtcaagaagaaagagagagggagagagaacaaaaaaacgtcgatcaaagaaacatatacacacgacatgacatccccggtgtgatcactaaagtccatgatcttgactcctgcgtcaatgtcccaaagcatacaggtcatgtctcccgaggaggtgacgatctgcctgtcgttgatgaaccgacagcaactgaggtagcccgagtgagcactgagctctctgctagcttttgtcccgctcgccccgacggtaccggtcgagctgcccctgatgttgtagatcgagcacacgttatccaacccgccgcacgccacaaagtttcccgaaggcgagtacgcgcaggtcatgacccaggacgatcggagtgggatcgcgtggactttgttggtcgtgtaggcgtcccacacgatcagctttccgtcctgggaggcagagacgaggtgctgtcggtcggttgaccagtgcatggcgtagattttggccaggtggccttttagagtccgacgtggtttcatcaccactcggggcagcggttcgatgtctgctgcctgggctcggactactcggatccaacgtgttgacgaggatacatccaggtaaagcgagagaaagaaacaaagaaacaaagagagaaaggatgaatgaccgggtcggacgaacaaaagggagggaggtctgacaacagtgtcggtggacgtgtcaaaaggagggctcgatgatctcgacacaagacaaagattcattcgagggaaccagaccggagaggttcttctcggtcacgctgttctccaaggtcatcccacgatgagatgttgatccaccgacgtcgccctccatcaccacaacaggatggttgctcactgtcgtctttccttctttatatatatatatatattcaatcgaagcaaagacacggatacacgtacgggaagtatcagccacctcttcacgcttactcctgatcttttctttcagcccgtcggcttctctccgggcggcagagatcttttcttgaatatcgaccgaggacattgatgagtcggacaggttgggcgagagatgctgatgggtaaaaagatcgagtgggaacaaaagggatctgtttgattcgagggaaagaaagggagagggggaagcaaaagtcaacggataggcacaaagtgatggcacagcaagcacggtttattgactgactctagagctggtctatatatgattcagcctctggcgaagacggaccagctagtggagaaaggaaggatggagagagatgttgagcagagtcaagttgatggccaagacgcgatcggtcgattgattggatttgactggcgcacggaaactaggccaacaaaagaacagagtatacagataaacctggaagggcgaggatctggatgcgaactggcagcgctctatactcgtacggggtactgagaaggaggagctagagaacaggcaagagacagaggttgatggatgatgctgatgctgttgatgctgatgcccgccgatgatgatgtatgggatggaagttgagcggccgaatggaaattggaaaaaagcgcgggggggaaaggaaaaaaccgaaaagttagttatacaatgatccaaccgttttcaagagcagtccttttttgtttttctttcgttttactatcgagagctcaggtggcttgctttggtgaatgttctcgctttgactgacgacgacgacaacaacaacagaagagatccggggtgaaccggaatgtcgcgtcgggtcatcaacatggttgtcgacaagagaaacctccgaggagggcggtcagtcggatgtgcgtctcatatgaacacacagacataggaagagccggacgagaacgagcggatgaggaaacataagatacagagtgacgaggaaagaagtggatagttgctgttctctctcagataaatcaggcagtgatgaagatgatgaagagaacaaggcaagaaagatcctctttagagagcaggagaagctagatatcacggcaagattggaagggatggtaaagaaaacaaagaagactcctcctctcttttcctgtggccccccaaaaagaaacaaagaaggatctgtccggaaaagaaaagaaaactatctagtctcttccttggaagcggtggcagaaccggcttggtcgccttcgttgactgctccgttcgatgaagaactggcacccggtccagagcccataggggttgccggtccggctgaactcgatcctggcgttccagttccggtggccatccttgcgtccaatgctttgagagcgagggctcgtcgtctttcggcctctgctcgagcaccggctccacccgagggcccggggaggagagcgtactcggcggaggcaccgtagggctggacgagtcggagggcgacaaacaggttgaacacggtgtttgctaggaaggagattggtcggctttggaatgg

SEQ ID NO: 611 - DNA, 1646 bp, Xanthophyllomyces dendrorhous
tggggtgggtggataagaaaagggggttggctcaggaaaagacaacaagacacgatgggaatgtagacagaaatcaaacgcactggatgatcggagggaaccagttgacaaactggaacgtatcgctacggtctcctctgaactcgcccatggaaccttcttgatactttacgaatcgcagatagacccaagcggaaaagaaaccgaactgaatgatgatgtacggattttgagcgatgacaaaggtgaggacgttcgagatgaggaggtagattccagggatgttctgtcatgatgtgttggtcggtcgaggaggggccgaagaagacgaggaggacaaaaagggcaaagtggacaaagtggacaaggatgatgatgatgtcgtctgttgagcatcgtcctgattgagaccaacagatggacatggaagcgtgcgcttaccttgactcggattttgatgaggcctccaaagatttggacttgatgctcagggatcaactgagtgaacgcgacgaggaaaccgacctgtagagcagagagaccatggacggtcgatccgtagctgtgaaggatgataagattgggtgacgcccagacaagagtttattagcgaggtccatcttgaaggagaggatttttgggggggggggaaggaaagaagagaaagagaaagagaaagaaaaagaagaaaagaagcagatcaagacacgtacacgagaacctcggcacctagcacaaagtacaagatccaactgagaccgatagcgatcacgttggaggcgacgatgacgacaaaggtaaacttggcgagctcctttcctccccagatcctttccaggtatcggccacagagaggtaaggaaacgacggagatcaagaactggaaagaaaccagacgtgatggatggatgttagtgtttgggttgggagcgggtaggtgagagctttaggctgtgatcatcatcatcatcatcaccaccaccatcgtcatcaccatcatcgacaacatacctcgaccaagtttccctcagcaaagccggcgatgaggatggtccatggatagtagaacaccttgccgggtacgcaaaacagccagggatagtcttccctcggggcgggatggaagagtccgtagcgggtgatgtgggtgtctgctcctgtggggaacgacgaaggcgaggcccggagagaggacgacgtcgagtttatcctcagaaggaaagcaagggttgatgtggtgagaaggatgatgaggagcgaccgggtgactgtaggaaggacactgcacgcgacgaagcacgacgacgccgcacaacccaacccaacccaaaaccacaccacaccacaccacaccaaagaacgcaagggtgagcgagattctcactaaagaatcagaaagaaggaaagaaagaaagagaaagcgatccggggcgcagaacgcgatcagcacgtacttgagagcgggaagaaagttgactgccggcatggcggagggagtggatggaggcttttttggggggggggaatgaaccaaaagaacgaaactccaacaaagcactgaacgggatgatctgcgagctcttcacttggctgctggcttgatagaacgacctgggcggactgtagattgatcaagatccaagcga

SEQ ID NO: 612 - DNA, 531 bp, Xanthophyllomyces dendrorhous
atctctctctccccctcacacacacacacaccctcgttcacccccctatcacccgctcaagttcctccccaagaggaccgctaaagaaaaatgtcaaagcgagatgacgacgatcggccggtcaccagttcgtcgtccccttccgtttcctccttctccttctatccgtctcttctttgttttttttttcttgcccttcttcctctttctttccatgtttccatctctctttctctcctttcttcattcaagctcaacccgactgaactcgcctgcttctcacgcgttcgcaccacccccctgcagtacacgacaagtcgaccgtcatccaagaagccagagtgttcaacgagtcccccatctctccttccaaatgcagatcactcctcgcaaggatcgtctacctgctctactgtggggagacgttcaccacacaggaggccacccagctgttctttggtgtcaccaagctgttccagcacaaggatgtgagtagtcggatggcctgttctttcccccgtctttcccttg

SEQ ID NO: 613 - DNA, 3640 bp, Xanthophyllomyces dendrorhous
gtgcaacaataaaccaaccaaacatctggacaacgctttctttcattccaggcccaagccgttcagtccgtcgagaggttcttcaagtcggccatcgtcgaccgatcaaccccaatctcctccgccgcgctcatatcggcctaccacctgtacccgacctcgaaggaggtcatcaagcgatggtcaaacgaagcctccgaatcgctctcccccaaacccaccaccgcctcctcatcctcgtcttccttctccctcggcttcggtgccggctcgagcggaagctcaaacgcacccgccagccaccaggtgctctccaccagtggtatcacccagtaccacgccctcggtctcttgttcctgatcagacagggagacagaatggcggtcaccaagatggtccagcagctcgccggaggcaagggtggcagtgtggccagtctgttgcgaaaccccatggcggtttgcatgttgatcaggatggccgggaaggtgatggacgaagatcccaagtaagaacttgttttttttcttttcttttcttttctttctctctcttcctcaatttcctctgtcttttctaggtttcccctccgtgaaatcgtgcacacactaatctgttcaaactgctcaatccttcaccttcccaccctcaccatagcgttcacaagcagatgtttgatcttttggagaactggcttcgacacaagtccgagatggtcaacatcgaggccgccagagcgatctgcaacattcgaggtgttaccagttctcaactcttccgacctgttgccggtcagtcgaatcccgttctttccttctttccttctttctttctttcctttctctcccaggtacccaacagagtgatgctcaaacgtcaccaactctctcctctcctctccaaacgcctacagttctccagctgttcttgacttcgccaaaacccgccttgaagtttgccgctatcagaacactcaataaattggctcagactcatccggacgctgtcgccgctgccaacaacgagatcgaaaacatgatcaccgaccagaaccgaagtttggccacctttgctatcaccaccctgctcaaggtccgtccctctttgtttctctctgtcccgaccgaacgtccgactgaccaatctttttttttttcctttcctttcctttcctttccttccccgaacaaaacagactggaactgaactctctgtggaccggctgatgaagcaaatcacgtccttcatcaacgagctcaccgacgaattcaagatgatcgtcgtcgaggccatccgaaccctgtcgctcaagttccccaagaagcaggccgccatgctcagcttcctcagcggtatgctccgagacgaaggaggatacgagttcaagcgaaccatcgtcgaggctatctttgacatgatccgatacatcggcgagtgcaaggagaccggtaaggctggatcccccccttttttcctcttctctctctctctctcttcctcggacgcgtattgattgttctttgcttttcaatgttgaatcaacacacacacacacacacacacacacaaatagctctggcccacttgtgcgagttcatcgaagattgcgagttcaccaagatctctgtccgaatcttgcacttgctcggaatcgagggacccaaggcttctcagccgaccaagtacatccgatacatctacaaccgagtcgtccttgagaacgcggtcgtccgagcggctgccgtctcttccctcggcaagtttggtgtcgaggtcggagacaaggatggaggaagtgtcggaaggagcgtccgagtgttgctcaaaaggttcgtgtcgcgtttcttgggtcttctctctttccccctccggtcttcttgtcgttgatcacagcactgaacaaaactctctgaccaaccacgcgactcacaggtgtttggacgacgctgatgacgaagttcgagaccgagcggctctctacctcaaggtgctcgacgagcaggctctcgctgatatctacgttcgagagggtgagcctgatcgcttttttctgggatcttgacttgatcgtcacaccgtcaactaatatgctttccttcttcaactcgggtagaatcgaccttctccctggccgctctcgagtccaagttggtcgcgtacgtgaacgatcccgaggcttccacctctgctttcgacgcgtcctcgataccgaagatcagcagggagcaggcttcccaggaatctgctcgtccgtatcctcctcttttgctttaacctttttttttttttaattcaaatctttcgaaaccacgcctttactgagaaaaggcccgtttgaatctgacgactctatccagggccatcatctttggagactatgaacgctgccatcgccccgaaggcagcccaggaatccgctcctacgccttcggccgaagagagccaatctgcctacgcgtctcagctcgctgctgtccccgagtttgccgactatgggcccatctacaagagcagctcgcgaccggtcgagctgacggagagcgagatggagtacgtggttggtgcggtgaagcatgtgttcaaggatcacgtcgtgttccaggtaggtctctctttttctttttctttttctttttctttctcatctcacaactcaaactagagtagctgacagacaacacactccgtgtttgattaccgtcctcaaatagttcaacatctccaacactatcccagacaccgtgttggagcaggtctccgttctcatgcagccttccgaggattcaggcttgatcgaggactttatcatccctgtgccttcgatatctagccaaaactcgcccggagtggtgtacgtgtcgttcagccgggaagacccgacgtcgttcgcactcggctcgttcccgtgcaccctcaagtttatcagcaaagaggtcgacccggcttcgggagagcccgaggaggatggttacccggacgagtaccagatcgaggaactcgagttgggagcggccgactacatcgtcccgtcctacgtcacctttgccaccgagtgggaacgactcaagggcggtcagaactcgaccgagacgtttggtcttgcttcgtcccagagtttgaaaggtcagtttttttttagtttttttttttccttctttgtcttctgtttgtttcttttctttttccggtcgagtcgacgaacgatcaagtaaactcatactgtttcttccctcaccctctcttgtttgtcgatcgcgctgcaaaaccaaaaaaaaaaaagccgcttgcgattcgctcatcgaggtcctcggaatggaacccctcggcggtaccgaactacccacgtcgacctctgtgcacacattaaatctctccggtctcgtcgccggtggaggaggtaaggtcttggcgaggagtcggatgacattctcgaccggtgacggtgtcaccctcgagttggccgtcagggccgagaaggaaagcgcggttgggttggtcttgagtgccatctaaaacggggtcccccctacacccccctcgggccttgtcgttcccttcttccgtttgacttttttctttttctttttcgttcatctttctctttgttgcatctggttttttagtttctgtttcgtcctc

SEQ ID NO: 614 - DNA, 17465 bp, Xanthophyllomyces dendrorhous
gaggcgcatagaaggaaaagagacagacggaaagcacgcgcttggaacatgccgtctgatgaccatctctatcactccaggtctgatcgaatacaatgaaaataagagagagagagagaatttatgggaaagaacaaaacaggggaagaggaagaacatgctaatgaggtcaaggcccaaacgtgattcctaccctcgcattactactcgccacatcgatcgatccattcgatccttctccggacgtcggaccgacgtgtccccagatcctgccgtcggtctctctcttcaacttgtttgcccctccttcgccgaggtcgaggccggacaggaggaccccttgggacccgctggaccggacatcgagatggcctgtgtaaggcagttgataggccagctctataggtgcgttcgatgtcttgatcttgagcttaggttgttgctgctgctgctgctgccactgcttctcatcaggactcttgtctggacccgttggcgtttcaacaggtttaaaagtgatcgaaataggtttatttgacgactcgaccttgcattcgaccgaacccgtgggaacatcaatcgatggcaaccgcaccggcgcgttggacgtcacaaactccatcctctgcctcgtccgctctgccagaggcaacgatgtcgaaggacgggacgagacccgaccaaactcaatagacgcattggacgtgatgaccttgagtgcctcgcaacgcatgtcagaccctttgatcgacgcattggacgtgcggaccgtcacgtcgcctttgacgtccaccggcgagctgaacaagatggatccgttcgatgtctggatgttcaaacctgtaagtgggcaggcagaaggaagcgaaagatggtacgatgtgttggaggtgaacgtggtcatgacgtgggagggcgctgagttgtgcatagacgagccagcggggaggtgtatgacagtatggatatagagaggattcctagggacatgtatccgatgaggcgtctttcaaaattgaacccgatcaagatttgagcgagaacaggcaaggaaacctcgatgatcagtcagatacagaaacgaaaagatggttcccaagcaagaaaccccccacgccccaaaaagactcacatagacgcccacacctctgacatcatcacctttggctaacagacaaacattgagcgtgtctagtgcgccctcagccgcatagccgacatgaaccacgacctcggccttaccggtcgtgctctccacaaacctgacgtgaccagcggaagacgaccctctagcgaagaaaacccattctgtcgttccgttggatgagagttccaatgtagctgtcttccaggacggatattggtccggactgacatcagtggaagatgggcgaccagccggtgtgagagggggattcaagaggacggttccatctgaagatggaggcgacggaggacctgagctggagacgacgttgcccatgatggagtgttgatgtacaaagatgatggacaaggcgaaagatgagatgacgagaataaaataaatgtaaccctaacacaagaatttcttatctcaacttgtcagtgcgcaagagaacagataacaagtacatccttatatagaggatagatagaagctacgatggatacagagaaagcggttaggagggcagcatggaagcctatagtgtaaccaaagaaagtagagatctgtctattgcttatcccaaggggtcaacccatctggtccaagtttctctctgacaatctgatgggaaagattccataggttgtctccaatctctggatcagagcactgggcggtttcttttcccggagtggatgaccctgagaagtagtaaccattccatcctttttcgatgacttcaggattagtcagtgcccagattgcagagtaagagccctgctcttcgttcatgcctgcggcttctccgaggtattgaatagctccaccgacgatcgttccgtaggcgtctttccattgatcttggccaggagtgataacctgtgtgttatcagacatggtactttaagctcgtccaagcttgtcaagaaaaaaaaaagaaaaaaaaagggaaaaaaaagggaaaaaaaagggaaatgcagaccaccaaaataataataatcgaaaacgtacggttccggggtggacagccgagcaccaaatgttgtccccattcggcttgatgactttctctacaattccgtactttgctcccagaatcatcgccgctttggttcgtccatatagctgttgagacgaagaaaagattgttgaaacacagcaggaacaaaagtcgatagacaagacggataccacatgtacgtaacaagaaaacacacctgaaggggagtgatgctctcatcatttatctccttcatatctgcaaacttcatcgagcccggagcagccctgtgaagctcggaagactcaaacacaattctaggcggctgaacgttcggcagcttcgaagttcgacggataagagggtagatcgtgttgatggctaagaagtgaccgaaccagctggaaacaacagatcactcagaatagctcgcaaaaaaccacatagaatgagattgaacctacttgactcccatgtgtctttcaattccgtctgagtccagcccgtaggtgtttatgttgatacccgcatcgaggacgagctgttgggatcaaggtataaagagcaacaacttgagacctgttccgtttaccatcattccaaactgacaacccactgaccagatctaatctatcttcttttcgctccagatttccaaatacggacttgacctccttcatgtttcccagatcgcagtgaacccactcaactaccgcatctgggctttctttcttgatcttggcaatggccgagtcaccctgttcttccttccggttgatcatgatcgttcgagctcctgctttggctaaggccctggagatctcgtaaccaataccgagagctccgccagtgacgatcgcggttcgaccgacaagactgggcgggatttgaacggtagctagaaacgagtatgtcaacaggatcagtcgagaacatattccacggatgaatcaagaagaccgactcacgtccgatcaaaggggcgaggactgattgcatgatgtgttgattcagatgatgtggcgagtgggtgagataggaaaggagaaaagagagcgcatccttgttcttcctcccctctttaaaccattgagcgttcgtgttcgtccgcaaccgatcgaagatcgggagttgaagcgtcatcgacagacacgctgatatgattagataagaatgtaatttatcagcacacgcgtcttgtgaacgcgtcttgctcatcctcctcctgacgaccatccctttccgtttcaattcattccatccacgtcgaacgcactgtattccttctgatatgagtacggatccgatagaggatcaaactgatcagggtttcctcaaaacgttggcactctgtagagtgagttcagcatgtcgttcaaatcccgttgacgggccaaggtttcgtttgcctcgagtcaatctgaattcatgaaacctgactgactcgtatctgcctttcaattctgtctatccatcatcatccatccgacagaaagctcagatgatgaagaatagattacagaggataggttcaaagcttgctcctgtctatcgaaaccctgctgactcgcctccagccgcactcgcacacacacctgcgcctgaatcattgacagtcggtgcttatcatccggatctctctttcgcttacaaaccaaacgcgtccctcacactaccaaaatccttaacaaacgatcatgtcgggcgagtgctcggaaagcggaaagccgacgaacaaacttcaatggatgagaaagtgaatggccagaagtcgcggccaaacttgtatcatcacctactcactcatcgtccaaatcatatcactgatacttctaatgagtttcatgaggccggaaaaatatccgctcgccactcaacaagaacaaaccaagggatagaagcccgtccgttagggtccagaggatcgtttgggaggtcgacttctactatcattcgaccttctccaacatcaatatatatgaatgaactgcctgatgagcttgcgtcgaacgcttcatcttgttcttcgatagcagccgctgtcacgcctaaaactacaaactccatcgtctttcatccttcaataccacctgttgtcaagtcagacccaagcgctcggccacttgcgaaacacagcgttcctcctgatccagtcaagaccgacaaagcgtttgtgtcaaattcacctttacttgtccatccacacccgtcgccgatacatccttcaattcatcctctgaatctacctccctctccgtgttctccgaattcgatcctttctttcccatcttcgtttgcgtcaactaagccggccacctctccttctccaacgtcgatcacaaagcagacggcgacaaccatggatctgctccctgtcacacccacacccttgtcagcagattcatgcacgtctacgcgtcagataaagggtcctttgggtgttacttcaccctcgcccactcttgccccaagatttcaaccgcctacaggaccaacagatagttggccggactttggatatcttgggtcaagtatcaaatgaggggtcggataaaagaaaggcacgagcgactgcatgtccaagctgttcgatttgtgttataagaatatgtatccccagtttaaaaaaaacccttgcaacgatcggttgttcgacatgttaatgcccaagaccttgaaacacaaagaccttctacaggttacaaaagaatgtgatcaaaaaggaaagtataggacgtccagcccgcgttgactatgaagatactcgaaaagtccacaagtgaatttgaaagggatacgatgctacacgtgtgaacgaatgctacgataattgtcccaatgatgcaacgcacagatagtaggaagtagagctctggagataagagcacagcagtaagaaaagtaaaatcaaatagcccaagtataagagagatgtagaaaagataaagaaattaaaaaatagtaactcatgcaagatgtagttgttgaacgtatgaatgatgcttcacgtcggattcactccagacccgacgatcaccttagtcgcctcactagggacgccatttactaccaagtagatatagccgggcccaggaggatagatctgtccgtttggaggggcttgaacaaccaaagttgttccaacgatctgagtagtcaaatatactagcctcatattggccgagttcgaatgcgtcttgaaacccaggtccatcagcgcgacctcaacgtccgtcgtcccactaggaatcgagccagcagagacggtcaagttaaaggttgagttaaaggggatgttctttggtaggttggagtacaccggtcgattcgaggaaagagcaggagaagacagccattcaactcggaattccgtaggaagaatctcgttgcagacatccgggcatggtgagcttccagcgatctaccaagcgcaaaaatacgaaaagaagaaagtctaggttagctcttgtcgtgttgaattctatctctcatagatttagagaaacgaagaagatcttatggagtactgaccatgattcggccatcagcttcagaggataaaaactcgcgatgatgtcaatgaaacgcattttgataagtgttgatattgagctatatggggtctactcacgaacaagagttgcgacagagtgatagactcgggggatatttctaaaatgtttgtcggttgtacttagctagagagcgccctactgtgaaaaaaaaaggaaaagaaaagaaaacaatttcaagagacttacgacgctggaataccggtagtggagaatcgagttcccttgggcgctaaatattccattgttgttaacatgtgtctgacaggatagaacaaggagtagtaaaacaaaatgtgaagacttaccattaggatcgtaaagcactggctgtaagacagggttggcgcagtttgacagtccaacaaggtcttccacatttccatctagacgtgattgttcaagtcagccaactttgtcatgtctcaactcattatccaagtcaacaaaatctgatggaacatacatccagcataaccagactgacagccgttcgcaaatatgatcttcccgtcgggagtcaaaaccgaatcgggctgaccgaaggatcgtataatcaaagaaagtcgaaccagtttcgcagaattcagcctggtgtttgtcaactgacgacagataaaacgtaccatgagccatggatggggcaaagactccacagaccaaccagctgctataccagcttcagtcagaaccatccgagagcactgatcggaggcgggatccgatgttttgagcttttgataccgcaggtcgtagaggtaaggcataaagccgtcagctgaacattcagccagctaatgtttacaacgaaactcacaagcgttggtgacacagtatcactcgacgtcgatcctccacagatcatgatctatgattgaatgatagggatgtatgaagttgagttcatgtcagttcttgagaccatcaaaatcgaaatgatcagaagcgattacctccggttgccagttgttagcctctgataaagggagcaagatgccagttccagtcatcgggtacgtcacccgaactccattagggatctgaggcagagccgtctcgatattgttcttccagtcatagatgattgcatcctgattggcagccatgaaaagtttctatcaaagccccatcatcacaaatacgccccagcagccgtcagaattatagtaggcttcacaggataaacatcaaactatgagcttactccatcaggaagaagaaagctgatggcgaacaagttggcattcaatgtcgaagtcaagaaatctaaaataattcaaaggttagatccatctgcgtcttcaagtccatatgagaatgcaggctgaccagagttgaccggaccggaaccttttgatctgtagtagaatgcccaaagatgatcagcaatccgcctgagacgaggctttctacaagggtggcttacgggtaaaactcgtaggaaggtacgttccaggactgaacgcacgaacgatcataggagaaggcttattagctcagctgttccatgatatttagaggtaactaaggattatccaaactgacaggctgattgatgaatcctcccgagtttgaaccgccaataatgattgctgatccatcgtccagccgagttacggtagggtaccatcttggctcttcgattttgagtacgctggggttatcgtaccagacacagcctgcgctggtggtacagttttcaagcaggcgcaaaccttgaattccatcgacatactattcgcatcatgaaatatgtcagttcaagaaactttgtgtaagccttaaccaagagacataggaagaagtaaccgatatacctgaaagtcgaggggtcctgtttcagaagcgtccaccggatttccgccaacattgatcaactgcgacaaaatgaatctgcgaatgagtaattggagactcaaacaaaaattgagaggcgccagatatatgtatacacacagtaccatcgcccaaaaatgagccaccggcgcctatcaaaacatcgtgagtagagaactcagtgttgagcaaataatgggacagttaggccgacttacagaatgaattgctctgtagattgataggcgtaacttcattggtttgcactagttttacgagaaaaagaatatgtctgattagcttaaagttcaacttttgatcgttcagtttgtgggaggcttacagttatagagagcagaccaagcagggtgaccgtcgatagtgagagggttatgggcgaccttgtcgatcaacacagcatgagtctcgtcaattactaccaatctggaggcgatagatcaagggctaacagacatcagaatggattttccaaccagcggtatgaccacgataccagagaccgttcagcagaaagaaactgactgcatagcggatactccagtagttcctttttgaactaaagtccacttctcgttaactgcagcggtatttgtgaccgcatctagagaggcatccttgactttggcttcgacgagcgcgtcgtacccgaaatcaaagctctcggtaaaaggcgtgatgaccagagcatctatttcgacgtttgaagctgtactagacggattacgtttgtcgttgataaccatacgaagatcactggtgatagaaggcgaccgcatagaagaacgatgagagatgtattatggaaaagcaaatacacatgtcgaaattgtgggggagatgaactcttactgggttccatttccgaggctctctgatcggaagatagcttgttcagagtattcctgagcagaatacagatcgttctgcgatacaagcaccgagtcgatatagatatccctagagatcgacaagaataggccgagttgagttatcaccactcttaaagagatcgcaaattcaatggaggctcaactcacactataccactgcaagattcatccatcaattaggtcaggacaggtggccaggcgtgtgcttcagttcatcagcaatagaccttgaatatgtgcgcatataaccgacaagaactcaagggagagtactgacaaatctggcccaatagacccgaacacaacgatcgaatcacccttgaaggaatacgctactgaagctccctcctctgaactccagtgggacgttccgtttacatgaatatcttccgcaatagcggaatcccatgcaccagcaggactatagactagcgaagtggaattatcatcgatggctgaagagcctgtgggcacatagtaaggtgtaaaaggcgtgcccccttcagcaccaggaaggtactaagttcgagacgaatgagtgttgaggcgtgaacaactatcgtttactagaactgtatagatttgacagagtaaggaatagctcacataaccctgccaggtcaaagtcagattagactttcgtggctcaatttcaggtcgccgagcttgaaagggaaaggcttgagacgataatggtgtaagtagggtggatagtaagatgatagtcttcatcacaatgataatgacgataacgttgatgaagaagaatcagtagggttccgaggtgcaaggaatgggaagtttaaaggaagtgatcagagaatataaactcggggtatgataaagaagaaagacgcaagaggggatacaatatgtgtagtgaagggaggagaaagtcttttctatgaggttagttgtaagtctcgtcttaaatgtttcttcaagcgaagtatcggacgagcagtcaattggaaagtcagcctgtacaccgtgctcaaccattcgaacaagtgtgggagttagagccaagaaaagagaggcaaatgtacgagatgtgtgggcggtacgagatgtagccggtggatgagtatgaaagtgcaaacgaatgtacgacgctgcctatacattgacggcgtgacgcgtgcatgcacatattgaacatctcctcgacgacctctccgtgcgccgctcggcaatcattatacagagaagaaaggaacatagaactttgtcgaaactagctgcatagttcacccatggtagtgtgatgggcgccatcgtgcagtatcggtatcaacttcttccttcctattctattttctgatcttacaagctgatccgctgctcaacgtattttagttgatgattttgatttacatcttcatccttgaaaagaattattatccagtcttgaacatcattgtattcatatttagtatgacacaccgagttcaatcgatactagaaacaaatgccaaaatccacacatcatacaatggtcaatggacgacccagccggtaatagtacagaaggtgacaaacacagccattctttgtcgagttatcttcagtgtaccagataaagatagaaaaatgagcagatacattaggagtgtttttcggcttggcttgatcagacatgtccaggtgatgtactggccaaatctctcagcttccttcgaagaatttttccagacgcactagtttacccgattccccaaaaaaggagaagccaagcaagaaccataaagccaaggagatttaccaagccaaatcagaacatccccggacggagaaagcaacaatattatcgttagctgagattgtccggagttgcacatctatacagactggtgacagaggagacgtacgatcttggaatctgatcaatgagcacgatcccaccgcggagcagtttgtgtgaagcaacctgcatttcaagtccataccagagagggtagtattcaatatcgagcacaacgaaagctatactgatgggggcatcaagtagaaccggcggctgcggtgtagtaaggttacaaacctttgtcttcatccagtcctgaatctcaaggatcaacgtggtctcagcctcgtgcgttaacggatcgtctgtactactcggtgcaacaaaggctctgtttgtgattgatgcaagatgggtgggtggacacaacaatggattctgaagacttagaggcgggtattagttgagagggtgtatggaaaaggcggttctaacctgggtacctcagacttctcagactcgctccaaatacctactacaccgacatccgctactccaggatgggtcaagagtaaaatctccagttcggcaggcgcaacctgatgtctgtaaacccaggttcgataaactaccttcagcacagactcttgagccataaaatgagaatggagagataccaggaaaggacaaacccattatacttgatcagttctttcctccggtcaacaagccaaaaatatccatttgggtcgactcgagcgatatcaccggtcttcagccaaccatctgaatcgatagtatccctagtcgcctctggattacctaaatatcctctacgagtgcgatcacgtagctcagtacagtatcgattcaactgacgatgagacgaaaggaagagcacgtacttcatcacattcggacccttaatccacatttccccctcagctgatccttccttgtcaggaacgacatccttcccctcttgatcgaccaacctggcttcaacgttaggtataaggcgtcctatagaaccaggatgagcctgtgtgtcggatagttggaggatatgggttacaggagacgtctcggtgagtccgtatctgaatgatagatgaaagttattgtcattcaaatcaacaatcgagattgaagcatggtataaatgagagacgaacccctgaaggacaatcgtgtttgatgcagaaaaccgggcttccactttgtgaatcagatccttccctagcgaactatgatataaaccaagcgaacatgtttatgatcagagaaaaaaccatctttgcaagtcgaccatgtggtgagaaacttacgcagcgccagagagcaaccaatccaaactactcaaatcatacttgtccacgactttggacgatgccagatgtatctatcacagagggacaaattatgaaaatatctaagccctgaccaaacccagaggattccctccaatatatgatgctgctttcagagtcaagtctgagagagaacataccaagatgggtggaacgacgattgcgcaagtcactttgtaagtctggatagcatgacagatcgctctcaaatctattttctgagctcgagatgaagatgttgacacgaaagtaaggataggctcgatgggcgaagagagtttagctagaggtaaaagggtcttacggggactatgaccatgggaaacccatgctggagtggtaagagcattactatgttgacaagataaagatacgtcaggggtcgaaggacgcaatggatggtctgttttgaaatcgagaactctattttttctcacatttgaagagaccatagatatgagagaaaggctacgtgtttcaaaagtggtaagtttgaatgaatctaggcgcttagtctcgtaaaaagatcatgaacaaagtgacactcttaccaagaggcctagcatagagtctttggctggatctagcgtaggaaaaaccggaggtttcatcatcgtcatcaaagacgtcaaattatgatgtgtcgttctgatatgaatatttactcagagggataaataataggtcacgcgcagactgaaggacattagcaaagcatgagaaggagagatggtacaagactcactcgacacctttgctgagaccttcagtacctgagctgaagcagatgacgctggtgcgctgtgctatatcctctccctcccgttcaatctgtctatcctcgagttccacctgttcgagcgagatatcagctttgaggccgtccaatgtccggaatccttgggtgtctacgttcggagaggaatcaatcagaactgttttacgttgtatctccgaggacgaaggtggtgttaagaggagtgaatatgccgcttgaagcgtgggaaggagagtggtcgaggtgaaagtgacttctggtcgggagagctccaattggcgagagagatctgtagaggatctatcgtcagaagttataaacacatgtcaatttgcctcggctccgcgaatctgagaaaaccttcacagtacttgtcaagaaaggtcaaagaagagaaagcttacagagaggacgcgaacaaagcggtaggccaacctcctcgttgggcggccaggaaaatctctgcccaatcaagaccattggctagaaagattcctaccgtctcttttcttctgaccaaacctagctctgagttgagtcctttggcgatcttcccggcttcatgtcgaagatcatttcgggacagtgatttctccgttaacgcatcaataaacgcgggtgacgttttggagaacggtgaatcaagagggagaagatgagaatacaggtttcgaacggggagcgactcaatcggaatctcaggaaagggggatctgtagatgggtgagagaagtacatgagaatgagatgttgaccgagccagagacgctctactgagcaacttcgtacacactctcaacatcatatgaaggtgaatgtgcagacgagtggttggatatgttcattctgtggtctccaatgtagaaggaaacttgagaaaagggaccccagttactaccgcgagtaaccgatctcactcttcaactgccgtccccccgattgggcctctgccttttcaagaaaacactcccatccatcttaacctttagtttaggcgtatcagcccatcgaagcatctctttgagggataccatttacacacatgcgtcctacagacatattcctcaagcagcctggcttgtttgcgcgggcctttcaactgttcaatccgaaggtatgacacattccaaatcctctgcgattattcttgtcctttccaaaagtctgatctcttactcgatctgattctgatgatatgttcgaacttgggtgatgtgatatgttctcacagaacagatttctcgtaggatacgatctcgaaggtaaggctttcttttccctttttttctgttttgttgggatccaagataaacgaatacaagcttacgttccgctttgggctcatccgtccgttgctatgtgtgtatatgtgtatgtgtgtggcatacctaatttggcttgattggattgcctccaaacagggaatcgatttcttgaacgtccttccagcgaatccggtacgtcctttcatcctgactttgcttctggtgcctaattcaagactaacgatcgacggtcacccgcttgagaagataggtgctcgaacgaaacgaacggtggaatatgccggaaagctcgatcatataagtgatgcgatcgctcggaataggaatctatccggtgagctactcggtctgacgtgacttggctcaatttcttacattatcaatttctatcttccattggagcaaaggcttgaactgactggatgaaacttctcgtacgtgggcgtggatttagtccaatggaaagcttggttatcacatacacgagccgaagcgccaacggttcaagtacggttctatcctatatttcttcttcttgatgcctgggccatccagtttcaacttagacaacgcacttaccgtcgcaatgttcacttgaaactgttttttatactccttggggacacattcatcgcgcctataggaactagagaatgacctgaggcgccgccaggaattatatcatgctgtccagaacatccagatgagagaggaagaagatatcgcccggatggaggatgctcgccgatcgaccctttcttccctcccacctgctgcctcgttctctgcttctcattcagacccacgcactttaacccttccatcggcatctgttgagcctgatatcatggctagaagccaacagacaggtcccactcgatcgaccgctcagaaccctacctcgggagcgcctgattctaggggacctagtgaaagcccagtgcgattggatcccacaccggaaactgatcccctccgactggagtcccagcgagccctccaacaacaacaacaacaacagcgacaaggacaggaaaacagaagtgcctcagaaggagagaaaccagtgatcggaacacgaacagaaggagaatggaaacctgagggttggagcccaagtatctcccgaagaaggggatgagatcgtgacgaagggatgaaaaaattgtttacaacacagacttggaaaacagattgagtttttgataattcacgattgatagatggaggaaacgtgcagtctggatgagaagaccctcgactgaatacggcgaagccaacacacaagatatcagaagatagaggagcaaaagagattagagacaggagcaaagatccatttctatatatgttacaccactcgctcctgagtccggtttttttcctatgctctctggacattctaaattccatccggcttggcaacctgtttcccacgtgacgataatagaaagatgggtgagtgttggactaatacgggctatacacaagttttggaacagtcatagaggcaaatcattgatgtacctttcgtctctcacgtttcccagtagatgaacaagccatttctgtgaggatgccatggaacgaaggaatatagaatcagctaaaacatcgaaaccagaagaaattgaaagaaggaggagatataccttgccaagaaacaggtttgagaggtgcgcctgaggaaacgaatgcaaaagagtggatggaaagaggtcgaaagtaagcagacgcagcaaagtgaggacgcgctttgctggaaacgtacctccttctgacgtagcaaagatgactggaacaatagtaaattcacaaggatgatcacaggacagtgtccagatttaatttttttgttataaagaaagcaccgttagtcgactgactgtaagagagcggagagaacagagacaggtacatacctccaagatcatttctagcggtggaaagataatacgatctggcatcacccagtgagatctgagtcggaagaaaagggcctcaaagatttaacaaactgacttgaaacgaagagaaaccagggaacgagatactcacgacaagggctctaacgacgtccccaagtctaaaagactcaatgatcttgaccttgtctttttctgtcgatctgtatgggagtgttctttcaatgaaagttgactgcgggtgtgggcatatcaagcatgggagacgtaccgaacgtcttggactctgatgactccctggaattcttcaccggttgggtgaccgtctacggcggtgatggcgagcgttgcctgcaacggggtgagtctgttgatagttccgatgacctgtgtagtgttcgacgagagactgaatgaataccatatacttgattctgtatgcgcgatgaagcgggcagaaagcaaagagaaagagagcaagaggactaacgaccgaatttggttgagggattgatgatgtctggtggtgagattggatcgagactgactgtatgatggacaggagtgatatgaagttgtggatctgacgtttagtacagaaccaaagttgcacacatatacacacacaagcaaaacgagcgacctaccgagccttctttggtcatccgaccgaccagaccggatagaatgagaccacctctggagtacgtgcctgatctttagttgacatggataagggcatggccaggaacaagggcgaacgaaggtaagtacgagcacgacgaaggtccagaggaagggagagaaaaagacacggctgagacttacccaggcagaggaagaggtggctggagtggtaagggctgccctggaagatagatatctgatgttgaggccatgatgtgagtgacctgtagaaagagtgagaaaacgtgtgagtgagagtgtgtaagagagagggagagagtgtgtgtggatgcgtatgaagtaattaagcaagcaactaggtaacttccctcttgtaagaacttgatcggatggacacagaacggagtactgcatgtaaccaaggtaaccagaggcaaatagcctcgactcagctccgatgcttgttcaaccatgatcttgcaagtgccggtcttcgggggtgacgggatactttacctgagcgaacggctacgcagtctgaaggactaactgcggacacaaatcctgcaatgcaatctttctcggtcggcccgacccccgtggtaccacgcctgtgactctgtccttgatctacgaaagattctcaaaggggcgggtggacctgactgcgcgacgagacagagccaccccggtgcttacccccccgtcgttcagccccggggggaggagattgtgtgtatgctctattcgttctgtgctccttcttggtctcgtccgttctattcctgacctcgacgttcactcactcttgtgtcttgttcttgtcgtactcgcccatccgtactggcatacctacacatctacacacgctggcttcttccggtggctctctctttgttcaggttagactgctaacactgtatacagcatcaactgccgttcacatcgtttagtacgctcgacagtcagtcagtcagtcagtcagtcactctcactagcacgcctactcgcctgatcatacacttatcacttgtttgtcttggtcgttctgatttctccgttccttcctttcatcctctttagcaaacacactcactcactcattcactcacccatccgcttttcgtgcccatccttcgtgttcaccttcaacgttcatcctgcttacactatctccacagcatctatatcagacgcttattggcatccactcaactcttccacccgaatcacccacccacc

SEQ ID NO: 615 - DNA, 60767 bp, Xanthophyllomyces dendrorhous
  misc_feature (48815)..(48824): n is a, c, g, or t
ggctatcgtcactcccaaaagggacgccgtccaaagagcttgcgatagctgtcggcaacataagcagaaggtaagctttcaggtcgagtctcttcacgcacgcctctgccttgcctccctcctttaccggtttatcgaccgacacatccaccctctcactcacttcgttcttttatctctcctttctgctaacggtgttctaacatcctctcttacgcttccgcttgttccagtgcgacggatttaacccgtgttctcggtgctcacacaaaaaggtaccgtgcgagtacctgagccaaaacagaaagaactacactagggtcatccccgaaccaggggctaaacagaacaaacgaggacccggcccagtcgacggtggaagaagacccaacaataccagggctagaggtcgcagaaggagaggctccttcaagactgtccattcggatgacagtgaagaagaccgacacagtggagggagggacgaccgtgaggacgatgatgactccatctgggaccgacacaacgatactgacttgggtggcaatctcgacgacgaagacgaggatgacgatgacgacgaagtcgaagaaggagatgacaggtcaatcggtagagctcggtttcttaacaaaaagttcgtcctcttcgttctctttgtctcttggctcgggccaatacctctcttcttctccctgctgatgcctgtctttatttcagagcacgagtctctccttccctctccccgttctccacaccgacagacttgagtccgagagcagtcacaaaaccgttcgtctcggccggcctccgaccaactgctattgcaaccgtccctgcaccgtcctgtgctccctcctcccggtctccagccctattctcgcctccggttcagaagatatcttatccggttcacaacccatacctgtccccaaagtcaaattcgtacaacccggtcacgtccaacgctcggtcaactatccgatccttgccatccatttcaagatcgtccagctcgacctcactcgcagagattttattggacatatcgtctccagagtacggcaacgttgtacccctcccgttgtatcctccctcgttcacctttgagagaaaacacacagacagctccaccgatgttcctcatacccataggaaagaggctcgggaggaaagaacaggcggtggaagcatctgctgtctgctcagttcttcctctagtgactctattggcagtgtcgaacagcatcaagtttcagacagaatccatccgacggtcgttccagcaaaccgtctgtcttccccaccgaccatgatttcattctaccatcctcccccagactatcatcctatcggctcaatcacccaaccggtctctttcgttgtcgatagcgagcctgtcaagcctgttaggctcggaggcacggacagagatagagcgcatgacctctttagggatttcaggtatctccctccgatcgagacccggtttgatggcagaaagggtcagtctcgagtatagaataggggaaggatcagtcttcttctttgccgatgtctgtctctgtaggtcactccttctctctttctctatctacttgtgtttgtatttttcttctctagtacccggtcctgcttttcttcccaagtctgtctatctacgttcatggttttctcctttgttctttctagcacgcgttgtatacatctcaagtctcatgatctcttttcccctagctctccattcattcattcatgcaatcctcatggtctcctatttctctactccgtcctgttttattctatttaccaagcccttcttctatctgttctttttctatcattgtatgagatcttctctcatctattctcaacgcctttcattctacgtctcgttcacggctcgacaattttccttccaactttgacaatttcttttccttctgtttcgtatctcacactccattctactcgaatccaatccaacccagtccacctcattcgatcgtctctccttccgcctctcctcatttcactcgtattaatcttcgttgcttcttctttgttttcttttattttcgcttttctctcgtccttgtcttcttttcgtattcccatcgattcatgtgtcgcctgtatcggttggtaattcgtcttcttcctcctctcttttttattattaatgttattctattttatgaacccagtctttttataaactcggcccgagctcttttctttgattatatcatgaccataaccatgacgacagatcggtcgtccgtccgtctgtccttccttggtatgatatatagctaagagccgatgaaaaccgaggacggacgagaactaagaacgatcgagagcgaaacatgaaatatcaaacaaggtaagaccggactaggactaaattgaaagataatcatcaagacgacctaagaaggaagagacgacctgaaggacggaacgcgacaacgatgagtgggacgaaaaaaaaaagaagaaaaaagaaaagagtagcaatagagagcaagtggcaggggaaagaaagaaagaaaagaggagatgagtcgatgcaccgcgtcggctgatctccgttgatgactagaagagaacgaaagaagaggggagataaatcaagccaacaaaaataacagatgaaacaagggggaaagaaaagaggggaggagaggagagtgagaaaggcaggtgacgggttccctgaatttggagtgaaaacaggggagagaatgtcggaaattacaacaaaatttgatttcttggtttcttcgattaagaaagggggtctgagatatagtagcgatgaggcggacgacaacagagacaatgataaggaagaaactagaaaggagggaaaaacatataggagaacaggtagaaaataaaagaggaagcaagcaaagaatgggaggaaatcaagagagaggtatctcctttcaataagtaggctgtgttgggtgagtgggagcatgtccgccataagcttgaggttgagcaggatcataaccgtactcgtacggctgttgaccgtggttaccatatcctccgtttgcctggccgtgagcgtaatccgagcttcctccacttccctgtctttccagtccttggacctgtccttgatgttgtccttcgtaagcatacattcccattgctgcctgcgcgcctacgccggccgctccgacgcctgctccgccagcaccgaaccctgccatgttgggctgttgttgatgtccgctatgaggatcatattgataaccaccggcggcagcataagcgtcctgatagtaggggtctcccccgctaggatatccgccgtagccgtgtgggttcatatcgtaatcgtgcacaggggcaccgtgggccataggaggataatcaggttgaggagactgagtcccggtccattcgtccacactatttccgctgtgcctcttctctccgccgaaagcgccctctgtcgccttatactcgtgctcggctggggtatccatattgtcaaagtccaaaggttggagtcttcgatcaaacctctttgactttgcgagcataaccttccggatgatgaagaagattccaatcccaccgacgaggaccgccgcaatggcgatcacaattgtcgccgttttggacaagccaccactcttggcagccgaaacggcggtagcagaggcagaagcagacgagctcgaagaactactcttcttggtcaccaatccgggctccgtcacggtcgacgtgaccgcagcggcagacgtagtagtagaagaagaagaggaagaggaagtgacgatcggggatgacgtagaggccgcaaccaaggtagacgatgtggtcgatgtagtagtcggggttgtggacgttgaggtagccgtagtgacaacgaccacaggctgggacgacgaggacgcgacagcggaggacgatacgacagaggaggaagaggaagataagatagaagcactggacgccgaggtagcggtattgctcgattgaacagcaactgaagatacgggcgaagtgagcgcatcggcaacggaggatgtcacggcggtcgaggccgcggtggatgtggccttgatacagatgaattaaatgggtcagtcaaagccacgcttattgaggatgtcaaccctggtttagacaacaccagtcgacaaaacatgaggaaaaaagataaaacaactaacaggagtctgagtgtcaacagtagaggctgtcgcggatgacgatacagaagtcgtgagcgaggtagtctgaggtgttgtcagggcagcggtggaggatactgcaacagcagtatcagtcaggacggcctgtcgagccttgagaaggtgatcagagccggttttgactcggatcattcggtgtttgtcaaaaaagtgggcgggtccatgagcggacgcgacagccccggaaaggagaagggctgaaagaataagggtattcttggagtgcatggtatgggtgtatatgtgttgagatacggaaagtaagaaggaaagtggcttgggaaggaatgtatgtgggtggctgggtgagagggaaggaacgaaggaagatctaatgggcgcctggcctagaagaaggttttgatcgggagaaggaggaagattggaagaaagaaagaaggctggcagaaaagagagatatcggtctgtgctgctacactcgtgatgtatggaccgttcctcttctctttctcaatttttttctttctgtgaacctctcgagatcgactgtgatagagaacgatagcgtttgtggacgaaaggaaaggagaaaagaggaaagaaggaggaaaggtgatggtggtcgtggggaaaacgttaaacacgcccgaacttgctttgttttctttttctcccttgggtctgctgcgtgaaggaaaggccgagactctttaatggattctttatccatcagaccatcgcatacatccgtttttgattaagtaggcagtcaatacagatggtagagatgtcattcctcaacccaaatatcttgtatcgatctgatgggtagcatagaaggggcattcaggcgatggatcctcaaccgtcttgtagcgtagagggagtgaaggcagaggtagagtgtaaacaaaagccggtgactaagttgtgatcacgtgtgacagcggtgtaaccacttgttgattgatcgttcttcatgcccacaaggacagactcaccatcagacaatcatacatcatcatacgacatggtgagctcgactggttgatggctggagagagggattgactgactagttgacgagttcaatcgtaggtcatcagatttgactgaccttgactaccactcttcagcctgatttaagttcgctcggtgcaggctttcccggacggcttcaaagatctgggttcgcttgttttcgtctatcatcatccagctacgtctacaatgcgctgactgtccgtgtctggtctgtccgtcttttgtttctttctcttactgctggtatcatcatagccagccccgagtcccttctgctcctctgtacaccctgttctctccatctcagatgtgtgtctgtttttcatgttttctgtcaacaaactcgcgctgaccacatcaccatacatcgacttgttctaacttactctcagaaagcagttccaagaagctttcaacctgatagattctgatcgagacggccttatctcgccctcagatctcacacaaacgctctcgaaccttggacaatcgacggacagggaatccatccggtcattcgcttctgacactgacggctcgaccggcattaactttacaaagttcctcaccatgatgggagatcatctgttgagactcgacaaggatgacatcttggaggaggccttcgggtgctttgatgagaaggatgaaggggtcgtcgcactcgatgagttgagagacgttttggcgaatacgggtgacaagatgtcgccagaagaggttggtgtgctactttctgtttgaaaatgcgcaagaccaacaggctgatgcttcattttatattcagatcgacactctgttctcgaccaggtttactgatagccggagaaatgcattcaactaccgagactttgtcaatgttcgtatagtcgagcttgcttatcttgatgaaactttttcgtagctgaccatctgtgtgatctcgaaacagtctctcaaagtgaacgatccagaaaccgaaaccagatagatgatccggttacagctcatagtacaccctggattctcctaaacttttcttttatctttcttgatacccctcctgcgtttcgcatttgtatatttagtccagcacatttgatgactgttgattgctcttcaagacgatcatcgtcctatgtgaagtaacattgattatagctcacgtatctgcttcgagctgtcgtcgatacttagaccgagcgcctcgttcaatcaagtttctgaagaatgccctgccgaaaggcatccagtatctatcgccccaaagtcaatttgcgctcagtctactcaattctatctcaaacacatttacgcgaacaaatacaacagacaaagaagcgaagaaagatgacactcacaaccattgggcatacttatatggcttctccggaatccataaaatttcaccagtcagtcgttctttcttatcaccttctctcatccctctcaatctatcaacctctgccgtcaacttgagagctacttctctaggcccgatcacccacttgacttcttcatcttctttaggattgttccctataggagacacatccaacgctcgtttcctcagatcagtcctcacgctcccagctacaactgataagaactgaacgcccagtccttgaagttcactttcgaccgcaagagtctggaagagcgcctgagcggccgatttactggatgcatagatcgatcgggtaggtgccggtaggagagcagcaaccgaggatagaagagcgattgttggtgaggttgaggtttccgataacaatggaacgaacgtggcataagatactaatgggcccatgaagttcgtttccatcgattgtctaattccaatgaaaggtcggtttagaagtggagaatatggcacgtcaagtctattgagataaccaagaccgacctagcaacatcgaccactctctcaattccttccttctctgtcatccggcggctaccagccttgttctgttcctgctctataagaagtccttggcctggtgtttgagaagcagaccgaccaagaccagcaagggagaagaaaggtcgggtcgtcaagacgcctgctacgatatgaacggtatctattcctccaaattctattgcaaagatttacaataacacgagccatgtaagataaaaccagttggtcggatgtcgattaacgtgacgaaaaacggaaagaggagcacaaacggacgtgttcgaagtgtttctctcactctcaacatcccttccacatcgctcacgtcctctgccaggcaaatcactttctcatttgatccggaaggatcgtttgattgaagaacagcctcgcattcggcgctaacaagagcgatgttcgagagtgatctcgacacgaggcagctgtccgttaggtttccaatttgaagaattttcatgagtgatcgctcgcaatattcatcaagccgattaggaaagacttacatagaagctcctcgagaagcatactgtagcgcgatttctttcccaattccacctagaaacagagcaccgcaggatttctcaaaccatcaaattccgtgaccagttgaatatagacaaacgtagaaacggaacactgactgctcgctcccaggacgagaactctctctttccgaagactgagcggtgatggtttacgtctacgtaaagaaccaaggacctggccaaaaagccccagctgtgagaacgatgttccatcacatgcagcacgtcagtcgaaaatcaatgtcaatgattgtttcaataatgacggtgtgaacgtttcagcggaactataggctaagtagacgttgaaattctgttattgagagagagactgaccgaaatcaccaagatcgctccaataggaacccagtcccttcctttcatcaacacgtttcaactttttcaacacgaccgtttcaaactctctcgtcaaagcatttcttactgactaagaatgaggaactcaccggaaggtttctcaaataatatcatctttgggatttccgacgatcgctgggtgagggtaacttggtatattgctactcatcttgtgaataaatcgacgacacgcgtcaactgcatttcttttcgtccaacctgaaatgaaggtctctgcttgccgatcagacctgtcgcaatttctttttgaagaaaatgaatcctctaacctgagttgaagaagattatctactctgtatgttgtctatccttgaacctgatgttacgtgcgctccttaactacaagagtgcataccgttgagagactgaaaagcataaaatttaatctaatccaggaaaccccgtttactcgtcatccatctccatatcccctccatcctgagcactctccgaagacacaccagccaacttttgaacgaaagcgatagccctcgtcttaaccatctcagttccactctcgtcacctggtacggccagtcgtcgttcgatctccatccactttttgaacaccgacttggccttcttctgagtaagtttccgcgcgagcagtcggtcaaacaaagatctgagaacgacgacaataatttcaaagcagaagtaagcattcaagatgggttgaacagattaccgcagagaagggagaagaatgaaatgggacataccgaacgctatgaatgtcaccggccttagcctcgagatcaatgtaaacattccagagatctaaacgcttgggataactatcaatcaccccctcgaagatcgtctttccacgctcggcatctcctacccggtattctaactgagcaaacttggtgatgatgcccacgtctagaaccaaatacaaaagttagcaattgactatctgttctcgcgtcaaggacaagccatttgactcacgatcaagttttggtaaactcttcatcgctcggggaagaagctcccgagcagcctcagcgtcgcctcggttcatgtagtactctgcgaaagctgtccagataggagggctttgggagaacttctttatcgcacgcttgaagatttcttcggctttctgatagaatccaagataaccaagcaagcgatagtcagttcggtattctcgtggatgaagtacagggagaacttatagtcacggacctcaaacttttcactctgctcaaagattccggccattcgtagatgaacagtttcaggctcgttgaactggatagccttcttgaagcaagcctcgacttcctcctcggtaccgtaagagttctccaagttgagcaacgcgatccacacattgagcttctcctcctcctctctgaaaccgatcgccttgagtgcacgctgagcgatctccctggctttctgaacttcagacatagaaagctggaaagacatgtactgaatccataagaacgacgagtttggtgctccaatcaataatcgttcaaagtcggccgttgactctggggtcttggtatgaagatctcccgtcagatcctcctggataaccttcttcttcttgggagcaacgatctgagaggtcgacgcgacaggagcgacgtcctcatcatcagagtctgagtctgatccgccttcgttgtcagaatcatcagcgttccagttgaatccaccagaaaggttgagtgcgccagatgaaggagccgacttgacagccttcttggtcgtcttcttgacatcctcatccacagggaaagtcacaacctgatgattcaagcgaagggagcaataatcgattcaacacattgatacttaactatattctgtatttatagaggaacattactgacctcgtcgtcagactcgtattcctcatcaagctcatcggcctcctcctcatccttatcttcagcctgagcgtcttcttgctctccgtcctcctcatcatcatcttcctcctcttcatcatcgtcatcctcctcatcgtcatcctcaccgttagccatctcaagatcaccggagaaatgagatgccttgagagagaaggcaatcttcttggccttgatgtcaacggaaagaacaagagccttgactttgtcaccctctcggaaggctttggatacagtttcatacttagccgaaggatcgtcggagatctgtcaggcagacagccaatatgaccgcaagcaacatcaggaacagtaataaaacaatatggcttgatggatataacaactgatgaaaccaaactcacctcagacttgtggcaaagtccggacacactgctgtcctcgatcctcaagaagataccgtagttttcaaccttctttacaatggcctcaacctcatcaccctccttgaaagatcccagggtgatcttcttcggcttcaactttctctccgccttagctctcgccttctcgtccttctcggcctgagacagaccgtgagcgacaaagacaagccccttggcttcgtccttggagataacgatcaaaccatcaaagttatctccgaccttgatagtcttcttaagctcctccacagtgatcttcatgtttcgagcggcgtttgcttgtgaaagcagagcttgagccttagaaggctcaagagtaagaagcaggtgctgagaatggattgcgatgagcgttccttcgactttggtgtccttctcgaatgaggcgactgagacgatctccttggggactcgttcctttttaggcgcggcatcagcagatgaagtgttctcgtcagtacctacgacagcctttttaatggaagccgtgatcttgaggttctctcggtcaacccaggtaagtttaactttgacgggcttgccaacaaagaaggactcgtccaaccgagtaacgaaagactcgctatttgattcgcgtcgtacaaacaagacaaaacatcgtgaggactaagataactaatgggtgttgagaaacatcatggaatgaacgaacctagcctcagcgacgggcacgtaagctcggatggttccgtagagatcgaccaagagacccttctcgaggatcttggtgacggttccgtcagtaatcatatggggtcgggcgtcatcgaaagaggtaacgatggggagttcggactcaagcaacgccttcttcatggtcaagaccactcggttcttttcaacttcagtgttcagaacctaaacgcggattgatacggcccgatagaatcagcatatgtgacatctcaaacgaatcatggcccagtcggagactacaacgcgttgatgatattgcatggaagagactaaccctgcacttgacgcttgatccgaccttgaatcttctttccgggttcttgagcctgatgtctgcgtactgcgtcggccaaaccacaccatcgacgtttcccccgacgtccaagaagagacctttctccgtcaatcgtttgacagtacccttcatgaactgtccgattgtaacatcctcaactcggaggaagttctggttgaggacagaggacttgagggaaagttgaagaaggttatccagagaagagtgaccaatcactcgggcgcggtgtgtagtaccaagtgcgaagggaccagcggtggaagaaagatgaggaatatgttcatcggacacttgagcgatctgataagcgcgttgaaaatgatgcaaagaaaaggatgttagctctaaaagcatagtcacttggtcacaaaacacgaaagacttacgtgagcaaaccctcgtcgaccttcctggttctcaacgaccaacccccattcaccctcaacccttttgacctcaacctcctccaagatttcaccaaccacgcaatccttgccctcctgctcattaaactccaaaatatgctccttcaaactgcatccaaatcgcttctcgctctctccatctccaacattcatactctcgtagagcactcgaaccttgatcttcttaccaactttgagcgcaccctcagcctctttagcaaggtctatgttagcaggtaggtggtaggtatcaacagatccggagaagaaaccaagcaacttgaggttgagacctgaatcaggaatgacagcagtgatgatggctgagcagagagctccaggaaggagtgaagtgatgctagtcaagttagtcaaggtcgattgagattgcttgatgggggaaagggtgaaggtgcatgttcgcttgttctcagcaacagaggtgacagtgcagttgatcaagtggccaacttcgaggtgttgtcctggtaatattagagagaactgaatgagcgcagctgatcgacagacagtgttatccagaaatacgtaccgtctttgctaaccgagttaggggtaaattctttggcgtccttgaaaggaaggaaaccttcgatggtaagaccaagatccaagaggtacccatggtcttcaacacttttaacggcagcagtgaggcactacaagagatgcacgaagaagagaacattcaacactcttttttcatatgtacacagtggagccattcagtaatagcaacgagtcaacttacgaatccaggctccagatctccaatggccactccattgttgaccacctccggaacaagactgacctcaactctcctgcaatctctctcgatctgatccttaggtttccagccctccaatccttccggactactcgttcccattccatacaccatgctaactcgacctctaacgtactgaccgaccttgaagagctcatctaagctgggcacatcgtcgttgtcttcatcatcctcttcatcagaatcagatgccgaatcagcagaagcttgaaggcgctcggtaagttgtcgagaaatgtgggtgatcggtacatgggcgaagatctggttaggaagagatagtacgagatggagagggtggatagaatgaactcggccaagaagaggagttccgacggaaagtttctgcagtggtaaagtcaggtgaagatgaacaataagactaatgttcttcgatttggataagactggtttgaacatggacatactttgtagttcaagtgctcgacaccttgcaaaaattgtgaagattcgttcaattgatggtcaagaatgattagtttccggcgcttacgccttgagcatcgaaccaattgacatagatcactcacggaaaaagtcgccatcctgcttaggagcggcagctttagctgctttggctgccttaatttcccgatccttacgcttcttgggatccctgatcttcttggacgagctagcagcctacaaaatatatcatgatgcgagctcaaacgaatcagatgcatgctaaacttgatatagaaatatgtaaagcatacctcggtggcagcgtctgcatcagcctgcttcctagcctcgccggtaatctccttgtattcgagcggggtcaagctggatcctccacctcgggggaatgaaacttcttccgaaactagagaagatttgaacgcagcagtggctccaccttcagtctgcttgggcttctcccatggcttggtctcggtggaagacgttttggactttttgtaatgaggcacgtccgtgtccggagcggcacgcttcctgtttgaagtttggggtttcggtcctgccatgattgagggaaacttttatacgtgttttttttggagataataaatcgctatctgtgtttgagaacttccccaggatctccttatacagacaaacaagaagaagagagagaaagtggaaaggggatagagtcaaagctgtaaacgagtatgaacagatttctcaaaaaaatctattgattcggtgactaaccgtatatgtaaccaggatgtgactgggtcgctcatgtaaccttggaattttggatcatcctcttcattttatcttttttgctaactagacctctgtttccgttaacaatcaagcacggaatactcaatatggtgggtcaatcttgatagaaagaatagtcttgttgactatgagtactggctgacgatacgttcttttggtcgactcttagcctcctagatcaaagaaagacgggaacggtctcggacgagctatcatcaagaacaagatcaaggttgctagtacagcgcctgatgagctactcgtgagtatttctacaggtgtcttaagtagctctccctgtggctcaacgttatattttcctctttgaacaacagcatttcaaagaagcggacgaccgactgcgatccgtcactcaggagggagacttggatgaatttctgaacactgctcagcttgccgctaccgacttcactgctggttcgtcttatattttctctctatgtttcagtgcctcttcatagctaattatctcgatcttgtacccgttgtggacaccgatttctactgtatacagagagacagaacgtcaagatcatcactgctccaacgtcatcaacaaacttgaacgcggtggaggagaatccgcatttactttccgtcaacgaagaggctcaagttcgagaggttcatggacagatgaagaaccgactacgggttcctcgacgacccatgtggaacaaggatatgaccgctcgacaactcgaacgaagcgagcgagatagtttcctagagtggcgaagaggtttggccgagctttcagatctgcactctcttctgcttacaccgttcgagagaaatttggaagtgtggcgtcagctatggagagtgttggagaggtcacatttgattgtccagatcgtggacgctagaaacccggatagcttcagatgtggcgatttggaggagtacgtcgcttcactcgatgtggaaggacgaccggttggtgcggactcggcagagggaagcaagcgaaagagtttactcttgatcaacaagagtgatctgttgacgttgaatcagaggttagttttctcttttcgtcggctctcacagttcttgactcgaagctggtactgaccgaatcaatactttcgactttctctccttcagacgtcaatgggctgatcacttcgagtctctcggaatccgatacgctttcttctctgctctcaacgctaccgctctccaagaagccgccgcgctagccgctcaggcggctgctttagctgaggaggaagcttcttctgatgaggatgactcggagagagacgagagctcggatgaggacgaagccgagttggccgataaagtttctcggcctgttggctttacaggaccagcttatgatggagaagaggagaagaaggcaggaattgatttggagcatgatgagcagcgattggaagagggctatgaagagaggcttcgagtgttgtctgttttggaactcgaagagttgtttgagagcgaggctccttctttgaatggttcgtttctctgtcttttgggttcgattcatgtaagaaacctgatctgacatgatctacttttttacgatagactttgtcacggctgaccaccccaagccaccgtcaaaactcgtcgtcggacttgttggataccccaacgtcggaaaatcttccaccatcaacgctcttctcggttccaagcgagtgtctgtatctgcgactccaggaaagaccaagcatttccagacacttccttttacccctgagatcacgctctgtgattgcccaggtctagtgttccctcagtttgctactaccaaggctgaattggtgtgtgacggagtattgcccatcgatcagatgagggagtattccggtccgattgaattggtagccaggcgagttcctagggaagttttggagatgacgtatgcgatccggatcgaggtgacccctatcgaagacggtggaaccgggaaggtcaaagcggaggatttcttgtccagttatgctattgccagaggatataccagggcctcattcggtctacctgatacctcacgagccgctcgatatgttctcaaggattatgttaacgcaaagttactctactgtcatccccctccgaacacaactgccgacgagttcaacgaagagtccagggctaaacagatggaggcgatggcattgctgaacaagaagaaggcgccggtcaccagagtcggcaagggagccgacacgttcgtccgggagactgatgggcccaacgctggatctcttcccgacccggcttacgatgatcaaggaaacccaatcgatgtcgcacccgatcagaccaaggcgacacccaaggtgttctcctcgatctccagtcgagctgataacagaccttctcttccgatgtctcagatttctcgaggtatcgatagaggtttcttcaaggaggacaacgtgtcgctcgaggctagaccccgaacgaaaggaacgtcgtctaggatcgaaggtgccgagggtttcagtcgacctagaatgtatggcgtccagaactcggtcggcaatgacggttcggagattgataagagtacattgcagactagatttgcagagttgggaacgagcgaacggagggaaaacgggaaggcttccaagaggcacttcaaagaaaagaagggaaagaagcgaagtggtgctgggtatgattgagtgtaggatgtttatgtctgaaagaaaaaaaaggacctgtatctcttgtctttctcctaccattttagatatcgttgttacaattaaatgcttatcatctgtccgaatagaaacaaaataatgcaactgaacatattttattgtttgtaaggaaatatattgctaagagtacaacaaggaaaacagaacagatcatgggatagctctagatctaaggtccaacgctgctcttccgaccgacaggccacccacatccacacctacttcaacatccaccggatcgaaagattcccaaaatatctttttgtctcctagcaagctacctacccgatctaaactactcctcatcctcgttctctctaccggactaagttcccttccagagccagtgcctgaggtagaactgcgcgcagcccaaggattttcgttcggaaggctgttcaacaaattgtcgatttgatctctatatctaggtagatcgagagagtagagatgaatggcagagaggattatgaatgggtcagtcgggtggtgatgaagtggaaggtgaatgtagtgcgcaagaaggttggatgtcaacggcagattggctcgttgggtgtgtgcctcgaggtaacttttaccgtatgataatgccagagaagaatgaaaagagtgagaggacaatgctatcggagggtcggacagagaggaagaggaggaggaggcagaagaggaggagggatgatgtataggcagatgatcgtatctagagagaagactgtgtatcctcgatcggtgaaacctgacccctggatctggcatttctaagcgtccccaagactccaacagggcgtccgcaacaaacggtctgaggttgtcgagcgtgttgatcatccaagcgctctcttctgcgttcagcgtcagcttgatgtcccctccgtctgctttcgggatccatcggttcctgtagtgtctgatctcttgttcgatccagactctacgaccgatgccttcctcccagagtgagatataaccctcgagagcaagaagaaggatcaatgggtcgcctggagcgtgtcggttggcaaggtccataaacgcattcaggtgaactctcgatggacgacttgtatggaattggtcatgatcgctggtggttgaggttgaggcgacaggaggatgcaaaaggttgtaaaggagttttcggaagatagacggaggtgtttgactgggcaaattgaggccatatgtgatcggatcggatagaacgtcaagcgaaaatgggacgtcgttaagatctcgggctcgatctgagagggccgcacggaacagcacagcagtcaagatcgacggtccgagcgcaatcgggccaaagaagcggatgggtttggaatagttatcaatacgtcagcctgagacacctagattgaagaacaggagacagagagaagaacataggggcgtagataagaaaaagaccgacccaataacgaattgagccaggctaaggtgacttcagtgggtggtagagagacctgggtccattcctgaacgattcgcacggctttgttaagttcggtagaggaaccggcagatcggattagtttgtcgagtagcttgtgtttcggctgagagaacttggaaggcgaggaagaagacgacggcctgcaggctactttatcgcgaacatcgaggtggagaagggaagtaagagtagggaacaggagaaaatggtgaggcaaacgaactctacaattcgaatgaaatagagtgagagggaaccatagagaactgaccaccgttggtcgtcaagaaagccgaggcagcaagggtgctgagacttcttctcgatcggacgaccgatttggaaagcatgacgatcggacgattagtggggtgtatagaattgaactgaatggtttcggagtggtgttatcggtaggaacagcggcgagaacgacggtaacagcgagttcgatcgaaaaagagaagacagaagaagagtcaacagggaggacaggatgaaaagaagagaagggccgacgaaagaagaacgaactgaccaacgggaatgatgatagcacacagaccaacaaaatcaacaagaccaacgagaccaacactcgtctgttgaagtgaaacgaaacgagccaacagggaaagcagtgaaaaaagtaaagtaaaaaacttgtgttgtcgtaatcaaagaggaatctattggtaggattaaggcctagagcaatgagtgactaggaggtcacgtggtctctgcctgggtcaaacacgtgatgcttacggctatgtattcacatatagattcaaattactattcaaaaaaggcaagagtactctgataaataaataaaaacacaaggaaaaattccagcagcgaaaaagttgggcagtcaaaaaggcaagttatccttctttttcctcttgttctttttcttcttctccttcatcatccatcatctttctctcttcttgacttgcttctgttctctctcacatatactgatcatttaacttgttatctttgaaaccgtgaccttttcaacttggttttttctttctcttctttatctcttctgcacaggcctaaagctcatctcacaatctcgagacaatgccctctctaaccgctcttttgctctcgttctcaacgctgtccgctcttgtcctcggtctcacccggtctgtagagtcatctacgctcactattcatcatcggctactttctccttctgctcctgctccatttgtgcccagactagaggttcaactcaaagatctcacattggttcagtccgttcaagatctctcttccggtcatcccttgggcccagtcgaccttggccgagatatatactaccaggttgccatccaacgagcaggtcagcccgaaactgattggagcataacctccgtcaaagctgttcgttctcttcttcagtcttgtggctttatccaatcttaagctgactttcttaccttcttccatctacagtgccatttgcttccttcgaccggtcgaaaggaaacgttcgaactctccgtccctttttctggtggagacgaaacatccattcaactctcttactcactctcgggcatctctcgcgatggatcgtgtccacctgtcacccctgggtcggtggtctcttcgaccagtccgaccgacggctttgaaaccaatgttcaggttgtcaaagctggatcgcctacgccgtatgttgtctttaaggtgtggtttctttcctctttccacggtcaaatcctaacagaaattgggtttttttgtcgtctattttcatatacaaaagactcatcttggcttctccagtcaagttggatgccgcgacaggacaggcagaggtacctcctgtggaaaaaaccctgattcgtacgtattgttatttcttacagctccttcccggctcgtgctcatctgtttctttgacccttgccttccatagagaagtactggatatatgcggttattcctttggccgtacttcttcgttcgttcctgtcgattttcttgtatcttgtgttgataacctgatctgactctaatacttttcactttgaaatcgcagtcatgcccgaaacagaagctgaaagggcggcggcagccaagaaatagacgtctttcttttagatatcacgttctttatttcctcctatcctatcttttctttctttcttttcttcaatctcccgtcatatttgcagtgcccgttgatctcgccccggacttgaaacatcccctccggagtgagattgacagccagccctttcgggggatggactagtcggtgtcatgctagaacgatactcgcattggaaatccgtttgagggagtggtccttattcttcacgaatcacttccataaagagttttccacatttctctttctttcactttcgttttccctggtttttctttttgtatatttggacaagtcgtctttcggttttatttgtatagaatgaattttgtcatatcaaaagaaggaaattactgttggcgtggggacaattgcattgagcgggatatttgacgattaaactgaacggggtaagacgcaagaagaaaggataactccctgtaatcctctccgaccgactgtgttgtgtataaatgtgtgttgggaaaaagagttgcatctttataccatttccctcttgactttcttcatttcctcacttcttaatcctttttcgcttccccctctgtggcagagccggcgggagcagactgatcggaagctttgcgacttcccctcagcctagctccttccagtaacctctgcctctttccatccgtccattcgttccaagaggaccagccctggatgtaatccgctccaccagagaatttaccttcgagagcatgataacttggttgagcatctgcttgccaaatcttcgaaccagaagatgacttgagtgatcgaggtggtcgccagcttcgaagagcgttttccatctttttgtttgttcgagcctgttcatgagagaaaccaaaaaatgaaagcaaggagaggagagaagaaacagaaatttagttaggtagatgataaaaaggaacaaaatagtgaataaatgaggttggctatggacaaggtgtgttccatatgcccaaggggaatgcattcaaagaagaggtagtgcaaagacgaaaggagaagaatgagaataggacgcaccacttcaccccgatcaacttttggatcggaatgcgcgccgaaagatctggcctccttgtacgccgatcggatggctacctcttggaccgctcgaaggtcggcgaactgagcggtggcgatggcgtatgctttagctagtgagagtttgtgatatttctggagattcaatgtgaacgcgatgcagctttggttttttgaacgaaagaaatatcaaagttaacctttggctcatcctttccttttgattccaactttttccctctcatgggtagagatacgtattcatgatgaaacaagcttcaacggtactcgaaggaacgcatctcgaatgaagaaaaatcggaatagaagaaacaagagcggtcgaggactcactcttcagccgatgggttggacgtcctctgatgcaagctataccattcctttccctgtagacgatcttcatccttgacaacctgtctctcggccagcgactttgctcgcattgcttcaaacggaaaatcttcaaagaactgggttcggattctgtcttccggaaacacgagttctttgacggacgacttgaagacaggtctgatcggagcaggtgggtgggagagtaatgcggcgtgccagactggagtcgttcctactccggcttggacgagacgctgagacgtctggaggacggtatgagctgaccgacgaaccatgatgcaagtgacaagacgaaagaaggagaaagggggtcgaacgagaaagaggaatgatgatatgctctagtaacaaaagctagaagggatccagaaagagagagcaaggcctgagagttactaaataaataaggtattcatgtatttatttgaattatgtctggatctcgggttgtgtaaggtaggatcatacgtgtggctcactatcacacagcctgcggtggcgtgatgatgcgctgatatgcgaccgcacgttccttctattcctcttcctgtaccttacgtcttccctagagagcgttcctgttcctctggtcgctcgattgaacaccttcaccagcatacctggtccccatcctttttcttcctttcctgatctttgtgcttatacagagagaattcattcccagcggaattgtctttggcttgcaataggtcattctctgtctatcaagaatcctccccagagaacggaacgatgcatctctcattccttccactcttactcagtctagctcccatcctttctgcttcatcatcatttcaagctcctatcgtcaacttatacccgcaacagaactcccctcaacctttcagatcaaccacagtcgatgtcatcgcggcagacccagaactctccatctttcttcgatacctacagagagcaagacttataccagcactcaatagcctccccaacggctcgaccgtctttgcacccgtaaacctggcattccacaaagttgcgctcgacgatccttccgaatggactcagccggacaacatccttcatgagcttaggcagaacctgctgtaccacattctgaattacaccttcccgcctccgacagaagatagcgtgggcgatagcgataaagacggtgacaatagcgctcccggtagcgatccattagaactcccctttccgtctgacacgtcaatccctttgaatttggaaacccttctatacccggacgatcttccccctcagaacggcacaaagccaccgccggcaagtccttgggttccactacctgtcggtggactaggatctgaaggccaacgtctaagaggcttcaaacgagacggacaggactggatcggtgtagactggcagggaaagggtggattcaaggtcctaggagaaggagtaccggccggcaatggcatagtctggaaagtggacgggctggttgatatgcccaaaaatatcggttcgaaaatttcttgtcattatcttctatccgtgatctgatttaatcgacttgtgcttttcatgccgcttctcttgcttaatcttcatcagctgagacgattcaaacgcacccatctttaacatatcttagagcacttctccatcagccggtttcacctgctccatcagctccttacctcgaactctttgagcgccaaccgtctcttactgtgtttgctccttccgataccgcgtggtcaaaacttccccgtatagaacgcacctacctcgagagcgggttcgctgggcccgatattgagcttattctaggctctcacctggcaaagtcaggagtggaagaaagcctggatggaacagtcaaagtgggttggagagaagctttcgagcagacagggtccggaaaattgaaaatgatcggtggcgaggagactatcgtcagcttgggaatttcaggagagatgaaggtccgtgttggatcagacaagaacaaacgacaggtattcgaagtctctgagccagatctgttgtgtaaaaacggtacactatctcttctcttctcttgaaccctcttgcctaaattcaatggagactgatattgaactcaaatgcaacataacatgtacaatcaataggtgtggtacacattgtagatgatctgctgatccctgctggagccttgaaacttacaactgagaaggtgagttcttttctcgctctgtgtcggactttaaaggaatccgcactcagcattgaactgactgtggcttcttgccagactctgattggcttaaacgctacgcgtttcgtttccctccttcggctgtccaacctgacatcttatatcaattcaacgacgcgtgctagccctgcctacactattcttgctcccctggacccagaaacgttttcctccttgacctgtcttcatatgaatactcccgaatgctcggcctccctggagcacacccagtcgcttgaattcaggaaccgactcaagtttcacattctgcatggtcgacaggaactaggggatttgaaagacggaatgttgattgagacagtatttgcatctgaggccatgggaggtagaaatcaggtgatcaaagttggtgttcgtaaagggttagaggatgtccagggcaagattgctcaggccggagggagcaagtccatctgggtagacagctcgaacaacgatgggagcgataacaataaccatcaaggtggttggtcagaggtcactttctcaggtgtccctgttgaacccaagcccatcgaatctccttcggaccagtcgctcatatatcttctcccgccaggatcagtcattgagcccccggaagatatcattcagacagcgctcactgatttaagtctatccgtctttatcggagcgctcatttcgacttcgctctcgcacgatcttaaatcttacgcggacggactgacaatcctggctcctcgaaacgtagcgtttgaacaactcggtcttgttatcaaatatctgctcttgcccgaggccaaggcagagttaaaggatgtgttaggattccacgtgctcaaggatgtcgtatatctagaagatgccaaacgatgggatggacaaggaaagaagagggaaacatggacaggagaggagctcgagataagagcaagaaatggttccatcgcggttggttctggagagcaaggagggaaggcggaaatcatcttagatgaaagtgacatgatcatctcgaacgggtaaggttcacccgtcaccttctctccttaacatcaaaagctgacacacagctggtgcaatgcttttctacatagtgtgatccatcaaattaatgaggtccagtttcctccctctgcaaatatcacgctctccaagatcctccgaggttcaaaatccaccgctatcatcaccgatcttctcattcaagcgaacatgagctggatccttgatggttcatctccttcgacagaggaccttgctgaactaggcatcgccggatggagctatggacgagaccgtgctctttcatcattatcgcctttgtctcgctcctctgcatctttcgacgacagagaaagcggggacagtgatgatcaagacgacgagcaagagactggaccagtgtcttttaccctgttggctcctacagacgaagcattctctcacttgaacctcacgcgatacactcacgatcggtctttactcattgatctgctcaaactgcatatcatcccctcccatgcgcctatcccgttgaccccccgcgtggcctctcattcgagcctgtcttttcttccggccatcacagatgggaaaccgctttccataaagccagacgtcgcttatttaacattactctcggcttcttccaaatatggggatgttgcattcggtgccaacccagatggatcaggatgtagagtcggaataaagggtgctcgacttggcggaggggatggcgaagaagaaaacgactgggccagtttgggtgctttcggaagaggcaccccatcgtggccttcatcgacatattcccctcgggacagattgttcaccatcgtcgaggccaacagaaatataaggtctcgaagaccaaaccaaacgaacggtctgagcaacggtgtccatccaggaggaggcgttatcatcttgggcgcagtgctggttccatataaacctagttggtggatcgtctggagctggacgatccttggtgcggtagttggtgggtcggctgggttgacgatcttgtcgctaggtggttggtggctatggcagaggagagcgagggagggaacggattatgaagtaagtctccatttttgttcagtcggtcttctttctgtctttgtttacatttatctgatggtgactccggtcttgtttgattcgactttcacaaacagcgcctcgagaatgaggaagactagtggtcatctctctataacgctcgccgttacgacaaacatacacatatatgtaccttataattttcacaaacgtcccttgactgccttgtcggtcttctttgttttattcttgtttttatacaagtccttgtccgggttgacaccccaatttgatgccacacgagtccactactcttgctccttttccattgctttcatatatgataccacattcaatcaccccgagaacgcgtatcttggtgttctccatttttgtatcttggtcgcacctgggtcaaacttcgcccaacagcacgaatacgtgtatttgtttggccagtgttgatctggtatagatgtctatcacatggtcagcggcaccccaaggttgaatgatatgcattttgaagaaaccagtccaatctatctatatctatgtatcgaattaattatatacctaacaaccggttatgaacaaacaaacgaccttaaaatggcggattaaccagataaggtctcatcacaccagcaggaacttcaattatctttcccctaatcgtctccttttctaagcgcttgtgagcttcgaatcggtgacaaccaccgacactgtaatagtagctctttgaagaatccaagggatctctaaccctaagaacttctatgggtgtaaactcgtctcctcgcttcaatagatcaaaagagaatattgataggcgtaagtggacaaaattgatatgtgaggatatgataagttattgagagaaagaagaagcaggacaaacagcaacctctttcatgaacacgttgactttttcctcgtctaactctgaagggataggtcgtcggatgatgttcatcggaactgtaagaaattcaggagagatagagaagtcagacgtcgtccaacgatgatttagaagagagagaaaagacgagcaaagaagaacaaaccatcatggatcttggtgattccctgcccaaagacagaaaaccctgtacccgcgtactttgacggttttgaagcgtctttttccgcactctcctctttgttttcggctgggttttggtcttgattctgttcaaagactttctcctgaggaagagaagagggaatcatattggacgatgaagacacagtcgagagtgtgctaatggagaatgtacgagtcgtctgagaagaaacaatcgttgagtaaagagaagggctgttttgacggttgatggatcgagtcaagaacacttgaagggcgaatcgcatgtaccgaatgggttgtatcagaaactccttttgtattctctgaatgaactttagaacggatgtatggtgggatggttaggaatgattggtgattctttcgaacagactggccagtaaggattcaacattcctctttccgggccgatgatgtcggatatccggttgttcgtgacgtcatcttgtatctttgacatagcctgctttctttgttcctcatttgacggacgaggaaagagcatccatacgtgaaggcatacaataagcatcaactagaacatttcggttgattctaccgtgccatagtatctgatgggatgtgatcaaaactgattcgactaagtgacatgaattgggtttagagccaaaccaactgggcgagatgtccgccgtctgggcgagtggaaccggaaaggaagcaagaaagagaagagcaaaaggggaagctcgtgttagtatatacacgaaatttcagtacgtccaagagagaataggacgaacaccgggctccagcagagggaaactccgcaaggatttggttgacttgatcaatctcctcgctcgagagttcaattgaggctgatgcgatatctaaagaagggaagaggagcgcaagaataaaacaattgccagagacctcagtgtttcagacaaggaggaaggatccaagaaaagctagaacggtgggataagaccaagagaagctcactctctttgattcgaacaacgttggaggatccaggaatgggaatgaggttggggctcaacttaagcacatatgctagagcaagttgggacgcagtgattcctcgtttctcggctagagacttcaaagcgtctgtgagtttcaggtttatagctgtaaagaaataggaaggcatgttaaagaggttgagtaacgagttggttccaatcagacatatggctggaaggactgacggaagttcaccttgctaaacttgggctggtctgttcaaagtaaaaagaaacatgttttcgcaagggtcatcaggttctgaatatggttgtatcagatctactttaagctattatataaagactcacgacgtctgatgtcaccttctggtatatcatcagctgtcttccaattggactggataatacctcgtcccaagggagctataccagtttgaaggaggtttcgtaatgttaacaaatgatctcttactaaaggaacagcaggaccgagagaggaacggacaatagccaatgatcgcaatatcaagctcttcacatgccttgatgacctcatagagctcgggctccaaagcccagagagagacctctacttcgacagcagccaccggatggatctgattaagtttatatcaaaggaccaagagataatgatatatatcagatgtctttatgccaactagtatatatccaaaagagatagatttacagcttgagctcgtcgaatagtggaagcgccgacttcggaaagtccgatgtagctaaacataccatcgtcgatcatcttcttcatgataggctgtacggtcgaaacaagcaatcgtgagcatcaagaaaggatgtaggtgctagctagaaaggacatactatggtggcctccacgggcttggtttgtcgagcaagctcaaacaagtcaatcttcttcacaggacccaaagcatcaagagattcttgaacgtcctttctgaggaaggcctcgtcactctacaagtttaaaaatcggtatgaatcgctatcagccgagcgtggattcaagaccattgaacatataagaaaatttgtcttgcctggtcttgtccagcaattcctcctcctttgacactcaaaaatatcttagaggcgtactcggggtatttgtcaaagaatcttcgaagcagtttcagattggccaacggactgaggaggaccaagttgagcagaacaagagattggcgtcagactgataatttagacaacagaagagacagagagacttactcggacattccataaaagttaccagagttccagaatgtagctccggcgtcagcagcggccttcaagctctcgaacacttcctcgtccggctgatgtgggggaggagtccaacttgatccagagcggcgcagagagagagaaggggtgaaagaagagcatagtgagattgaacgaaggcacatgagtagtcactgctagcttctaaactaacgtaagaagcattaacccatggccgctgtgacaaaaaatcccaattcggtcctttgagagttagaatacgatggtcaaccctttcaaagcagaaagatctcttgtgctcacattgctccaactggaatcttggatgatccgaggactcgagtaggcaaagagttcgtagaggacattttttgctagattctgattgatgtaagaaagatgtagaggttttgtagcgatatacgttggactgattgcttctgcttctgcttctgcttctgcttcttgctgttactgatgttgttgatctcgtctgttcttatatactcgatgatcgaagtggaggtcgggcaataaaacacgtgcccggttcggcgatgaaatacgtgtcagacttcaaatcgggcctgtggctcggccaagtgctgtgtaagcgttccggccaagataaccctaacaacatcgagacttccttcgctctcagcgtcatccacgatccttctagatctcgaacctccactttctcatcgttgagttcttttcatctgatctgtttggatgtctagaaaagcatccgtatatctttctcgttcgctcacgtcaacttcggcattcgtcaaacctccacctagaaggaccatgtcaaatctcaagattacctcacacaatcaatacaagacccccaggctcgtgcccgagtgcctcgatgactcgccgctagttcagtttcataaatggatggcagcagctttggacccggtatcaagcggagagccggagggtactccagcagttcatgagccagaggctatggtactaggtacggttgaagagggtggaaaacccagcagtcgagtcgttcttctcaaaggtccgtcttctaccttcgtcttctggagtcttccgctttccttacaaagaaaggcggaaacacaatcaggatctttgcagccggtctaagtcatacctttatcttcctaatatctccctgcatcagaattggacaagactgggttccttttcttcaccaactataattcgcggaagtctcgcgaactcactgtcaacccttatgcctctttgacattctattggcgtgagacctctcgatccatccgagtatccggccgagtcgagcgtctatctgcggaagcctcagatgcatacttccaaagcagaccgagaggtagcaggttaggtgcttatgccagtaagcagagctccgttgtcggagagaatacgttggaagacagggtgaaacagatcgaagagaagttcggaaaagaagaaacggacggtaaagtaccttgccccgaattttggggtggatggagagttgttcccgagtaagtccaagcgacgtgcagcatctctctttcattttcttctccctctggttgttccctcctgacttgttcaacaatcaactctatccataaatcgtatttgtgatttggacatgtttcccttttctgcagcgaggttgaattctggtctggccagccatcgcgcttacacgatcgattccgatatcttcgtctggacgtacccacagaggacggaaaggaatggcaggttgacagactatccccttgatctgagcccatcatccgcaggtcccgttctctatcgaggtcctggtctcttcatcacatccctcttctaaaaaaaatgtcaattatccaatgcccctaatcttacatgacttgaaatagaggcatggttcagaatgaaacgcgacgagggacagagagtgtgcataaagaataaatcatatactgatgctttgggcgcaactaagcagctggagctgaaggaatgagatatgaaatcgaaaatgacccaaacaagcaagagacagagaagaagacgattaagaaagatatggaaatggaggatgagggggtatacataatcgttggaattggtttaggaaggcagaactaagaagcaaggcatgagtcgacatcaatcttcctcactatcatccatcagactatctccttcttcttcctcctcctcctcctcctcctcatccacgagcaagctatcatccacagcgtcctcatcctcatcttcctcgctctcactctgggcatgaattggctgtttggaaatatgggaacccgtcacgcgagttggcggggaaaccgcttcctcctcttcctcctcctcctcctcttcctcttcactggcttctactacgggcacggatctctttccgttagacctacccgagggtattggcgtcgattccctatctctttcatcctctcctccgtcctcctctttctgctcattttccgtggaggcttcctcatcggtttctgtagcaggagattgtcgaagattgcttttcttcacgctagaggtcgatgcacgggattgagtggacgcagtagaaagtctgttgaatacaaagcacagtccgatcaactcatcaactcattcacaactttcctttctcttccctccgacgatagaaagagatcaaagacatgcgaagcaaagaagagaaagtatcaaagatagggaaacgtacggcgcttttcgtctaccactaattggtttagatggcatgggtgttcccgtatcatcttcatcgacctcatcgagcccgctatcacccgtcaatcacgtcagtactgaagaaaccgactggacgagagatatcgaaagagaaaaaagtgatcttacagttcactcaaaaactcgttgacactcttctttgcgtcctccatcttttcaggctcgtccttactaagctcagccaactgaagaccgaatcgcctttcaagagtcatctcgaatcgagctagcgcattccgtgagacagaatccttcaaatagttgccctgaacgttttgtccgagacgcacgaagtcagattaatttctcggagagcgcacgcttttgcaaagaaaggaagagagtacgaaagaacgaacagtctgaacggtcttgatcaagagaatgatttgtcgaagtttgggaagatcgcattcatcagggaaatgaagcttattgaggatctgagtgaagtgttttcgttccgttactgaatcattataaacgcaagacgttgttaatatgagaagaacaaatgaatgaagaggacaacaacgaaagctagacacacgccaatcggcaacgaagagtcccttgagcaggtcgattgacatatcaacctggatttcgcgatcttctggcttcagatcttgttggctgtttaattaaagtccgatgtttttttattcaggagaaaaccctccggtcagactaactcaggcgcagatcaactatcagaaagagagactgacaaagatttcagaggatccgtccattcaaggaagaacaaagcgacctggttagaagacatcatatccttgtcttcatcgagatcttcggcttcctcattcagactcttcaaggtcgagaggaaaatctatgacgcagtggaaagtcattcacgaggagaaaatatattagaagaattgagtagagaacttgatgagcaagaggtaaagcataggaaaggaggaacaggcagtactgacccgttgcatgcgtctctgatttgcacatgatgagaagcagtataccggcaaaaagtaactcaagcattgtcgaagcgctgcattatccgcattatcgggccacacatagagctgaaccagttgactaaggacctgttggacaaataagacatgtagagaggaggatatcaggtctgtaatattcatatgagtataacaagagagttagagattgcaaactacgaaccgattcatccgtaaggaaaccagcaagcatgagcttggcagctccttccacagcaattgctaaagcggcgtcttctgactgatcaagatgataaagcaccagatctgccaacggactctcctagagaatgacaaacaaaaataatccaagcaagggatgttgaatgcgacgagactctaaaaatgaaaataaaaacatagatgaaagttgcaagaggataatgaagagaagatactaacactattagactggggaaggagtgttttaatgtcgtacagcatgagaagatcaaatatgatctgtaagacctcattaagcaatggaccctgggcggattgtgcttgtgagaggaagagccctctaaaagagggcggcgcagatttctatttaatcatgagatcgaggaaagaaagaagttaagtatgcaagatgctattttaggcttaggagaaaagcaaaataacggagaagggagatgatacgacaaaccttatcgatggtacatattagaccgaggcaaaccagaccccgctctcgaagctcgggctgcttgctgatgacggaaggagtgataagcatagggatcagcccatgcaaaacagaattttcttgaagtgtctatcgtttccgaacaccaaaagaagggggtgagagagagagatcaggattttgttcacggtacatgatttcagagagttagcctctatatcaagttgtctgagcgtaaaagacagaagacgtacaccgttgactctctctagcaaagccttcaatatatccaagctcctcacatcgactaacatccgcttcaaggccctctcctcctctttctccttgtctccacctcccagactaagccgtctgagcctttctctcagctctctctcctttcttgctcctccatctccgccatcttcgccctcatcttcatcctcgtcatcattctcaagcgcaggcgtcccggctcgagaagacgaatctagtaccgtatctcgaatttcatgaatgacttcaacaatgacccgcatcagatccttctcagtagaagatagtttacgaaggacatccaggttgtaagggatgagagacgccggaagagactgttgtgaaatcatttcacctaccacggaaagacaatgcgagaagacgccaacgaatgggttagcgcacaagatcacaaagctacacatctagccgaggaaaatcagtacatacgagctagcccccacatctttctccggccgatctcatcagaataatctagaccgacagccaattttaacatctcccggatgacaaactctttttccaggatctcatgttcccaatctctgttttcctcggtcttatggccatcatcgttctggccggcatgctcttcagcgtcctcgaacaactgaaggagatgattgtactctgcttgaaggtaaaacgccagggcagtcaccacgggtaaggttgattccaacctggcctcgtctgaaatttctcgacaatgatcgacaaatattcgggctagaagtgccttctctggggttaaagttttccaataattttctgtgcgtacgtatttagaggatgattgagtcaagagatcgaatgataagtcacaatatgcatagattggagcaggagtaatcaaacagtgtgctcttacctgtaaactccaagctctgaaatgtatccatgtttccttcaaaaaccgacaaaagagctttttctgcttcctccgagctgacaacatcaaatcttttcaagaattcgatcagcccgttcatctcctcgtcacctaccgcggcctgagatgaagtcttgatcgcctcgacccaagttccaatcatatatcccgccgcctttcgaactttcggatctcgatcacccaagccagtccggacgagagcttctctctgggagatggtcaatcgtcgtggatcaccgaggttctcgggggagagtgagacgagatagacagatcggcgaagtgtcgggtcaagatccttgatacgaaggagaatatatgggagagtttgagacgtagtcgggagggagaagagcgcagtctggcgcacatcactttttgagtcacaacagcagcatcgtcagtgacggatatcataattcaaacgacaaaagtagagggcatgatacggtaagtttctaacacagcgcttatcacgtcttgaaaacgattggaacagacaacttacgacgaggggtccatggtcaggatgtctaacagaacctccatcacgtcctcctcgtcctcgtccggttcgatatctctgaatgccatcagacccaataccgcttgaactctaacaggtgcctccttgtctcttgtcctttcgagcagagaccttctaagctgctgaaataaatcttcactgataaccattgaagattttcaataaataggcagcacaaagtcagttggagcagaacttgatgaaacaagcatgagaccggagcttactcgatctctggcatggacttgagaagaagagaaaccaattgggtgcatctaaaccgaacagccttatccttcgcaggaaacccttgaagaagcatagtaatcaactccgtaaaaaatctagaagaggccgtgtcttcgtcttcatcttcgtttgattctgtagataggaaaaagagaacaacgatcattgaatgagttgggctgaatcctatctcgatctgtctatgaaaagaaccaacctttgtcggctaacgcatgtacaaatccagctacaaatttccctactcgatcaccagctacgactcctttcttaacacccagtcctcttcccagcaagtcaagaaagagctgattgaaagcttgttcgccaacgcgtttatccggccggttcttcttcggagaaggtgcaatgacttgagtcgcttgagtatgtatcttgatcagccgaacgatgtttttccgatggtttgttgttgattgttgagtttcatcaaaaatctctggtagagatgatagaactatagggagagactctgaggagagaagtgaaggtgccatggtggctccaaattggatgaatgtgtatgctggtgatgggtcaaacaaagcaacggagagaagtaaatcaattctctacgcgtctaacgcgtctaggcacatacgcgttgatcacgtgttataaatctgtgcaaattggtcaacctggccggttcggacacgaccgagctggttcagattctccgatcgtaatcatctctcgccatgctttctctatctttccctcttagtctttctcctctcttcctcttcttcctcttttgaccatcgtattcatcgaagcaagatggagtttgaaacagagacgtacctacatgttgtgtatacatcagcacaggttaggatagttcttgcgttgatcagggcggcttctcaatatcgagatctgatccagctaatccatatgtcctccatcattatttgactccgcacgatcttaggctgttttggcaaccactttggttctcttgatcggttatattatcgctggaactagagtttatgggcccgataccgctctggtaaaagcacatttctatcctagaacgaagagaacaactttcaagtgcatatgtttctcatgcttacgaagcaggagttcgttctggctttctgtgtacttgatgaacaacacagggtctgagaaggatttcaaacacgttactcctacccgcattggtcatctcgatcgttggatcgacgacatcgatccaatcaatcaaatcatgtcagtgatagttcttttgtttgtcttgatggaggcgtgaaccatctcgatcctgtcattaatctttctcaaactcgacgtccgatgttctctcagattggccgatcatcgcttggactcttttcgcccatgcatcctccttattggttgcttacgtagtattttactggctgttcggacttcctggctggattgtagaggccttgtctatcaataagtatgcaatccccatcaccgtttggatcgtttcaaaatttgttgactgatgaatgctttcatataactcttatcagcctcaccgcgttcccattgctagtcctaagcggcatgtctttgagcgctggtttgatggcccacataaagaatgataaccttcctgaagtcgacagaatagacgcatctgttagtcagcttgcccggggactgaactatatccttgtcaatgctttcgtctccgaaattgctaggtacgcctcatatatccctcaggatgcggccaccagtaagtactgacgcatttaattttttttgtgaaacacagaacaattattgttcggttccttctgcctaagtctattccggcgattaagctccctctagatgaagaagaggatgtttccattacacccaactctgagcacagcactattactcctagtgcaagtaatcctactgcgcccgtgtccgataacgagcaaacgcctcttctcgcttcatttgagtctcctccaaattatagtgctactccgaatattgctccttccgataacagaccagaaggcatttattccaaggtgaatcccctcgttctatcgggtattgtcgcgttgatgttggcgttcatcccgaaggttcagtccgcggtatttggatcgattggggatggcggcttgatcggagggacggttggaagtactctaggatttttgggatcatcgtttgcggtcttggagcttctaggagctggagggggattaagattcggagaatcgtatgttctcttacctaatgtaacttgtatcgtttttccgaaaggaagaaggtgtttcctgataccctctacaacctctgttctcgactctctgggagactagtcttacaaaggacgagaagcctctaggtgccgtgctgtctatctcgttttggcgatttgccgttcttcctgcactctcgattacgttcgcctaccttctcaaacatcataccgctgtctccattcaagaccctattctcgttcgtctctcttccttttaagtatactcagttctgctattcttatgctgacccatttattgatacgatcggcgtttctctctatatttagtacgttgtgttgactctgacgacacttaccccggcgctcctacctatatctcgttcgatcacatcataccaaacccaagcgtatcttcgatcgtactttgttcttccgttcattacgtcatttgcgcttgctgcaagcgtagccgtatccggtagaggcgtcagttttgaaagcagagttgattggggatcgacttccaaaaaggcgctaggaggtggaattgctggagcggcggcgatgatcgtgcaggtcttgacgcttatgcccttgcgaacggtgatgaactatcaataccggttcggagggtctatcaaacaggcgtggaacaacctttttggcgatggcggtttccctcggttgtacgctgggctaccagctgcgctgttccaaggaccattatctcgattcggagatacagccgcaaacgccggcatcctcgctcttctcgaatctgttgatcttccggtacttgtcaagacgatcggcgcttctgccgcaagcgctacgtttaggatgacgttgactcctatcgacgcccttaagacgactcaacagacccaaggaggcgttgcaggattgaggctgctgaaagagaggatcaaagagtttggagtatccagtctgtggtggggtgctctggcaacagcggcggcaacgttcgtaggtcactacccttggttcgcgacttacaactggttgtcggaagtcattcctcatagtcattcacttatttcgaagctcgctgtcagtttttattcctctctttctcatctcttcatctctgaacggaaatagattggctgaacagaccttctcttcttatctgctcaacaacagagacaagctctaattggattttcggcttccgtagtctccgacacatcttctaactctttgcgagttttgaaaacgtacagacaggttcacgaaggcgacatcgggtatatagctgctgccaagtctattgttgctaccgaaggtcttacaggcttgttcgggcgaggattgagaacgaggattttgacaaacgggttgcagggacttttattctctgttctgtggaagttgtttgccgatttgatcgctggaaagggagatgaatgaatttgatgagagagctgtaagaagcaaccgtactaggtacttcctctttcttcttggttaaagatgctgaaatgcgtcagctacattttaaatcttcttccttcgatatccatgtcctcttggcttccttttgtctaacttccatacttactcgaatgcctttccgtttctgttactttcgttatccgttctcattctcgtcatcctcaagattctatgtgaaagttaagtctgacatatcacaacgtctaaggttctctagatgggatcatacatgaatctcacaagcatttaagtctaaggagggaaagagacagggaatacatatataggttgatcgaccgatcaatgagggaacacgatctaagaagctttcttttcttttctgctctcctcgctattcacataccacgctctgtttccgtctctagccggacgttaatatcctgatgttctgcaactggggctggtcctctcaaatccagatcagactggttgcccgtcttctttcgttcttgttcctcttcctccattctcaataaccgttccttcatcggcgctttccaatctcccacctccattgcatcttctctggcttgttggagagactgaatggccagccggtgaacgtagtctgatcgaaggtccgtccggggaagggcagcaggaaggaggccgtacaccatggaaaggatgatctgtgacggatgcaggtaggaagatagggatgaaaggaaaggaggagaataaccaaagtggtcggtggagaaaggaaaaaatggaaaaaatggaaaggagagtgtgtgtgttaaggccggttatagagaatgatagcggtgagggtacagatcaggtgtccaatagactacaagaacgagaggacgagaggggagtcattttgttggctttccctttatcgctttgtttcgatacccttggtctagtgacagatagatgaagagtagatagttgaaagaagagacagacggagaacgaaccgtgaacaccaaccaccttgcgcttctagcctttgtccagccttgaaatattccgtctggcgctacgcctgaagtgttggttccaaatccaggagttgtctcccattctgcagctgggttatggttccatctgccacgaggctgggtcttagactttggatcaaaatacatggagtgggcgtagcgttcaaaatttgcatgatgataggattgggcggtctgtgaaaggttatggcgcgtggatgacgaccggggatagtaatttgaaggggagaggcgaggtgcgcgagaataggcccaaccggtcttgaagaaaggagggagaacatcagtgatgaagatgaaggatatacgtttggcagaagatatactcactttagttctgcaggtattacaacactccaacaggaatgacaatcagcggtcatgtgcctgaggacgacttgaccaaggccacaggaagcgaggcacaacccagctcaccttagatagagttctcgactcgtcgggttccctagtgtctcatatgctgtctgaagataatggaatctctccttcattacataaaacagaccagtcaattatcaaaatctttttgtagctgagttctttgaggggtatatgccatcctgctacccaaatcactcacttttgctggaatcggatgtttcttgagtctctcactcgtcgactggcagtctggatgatgtactctgacgagtctatagtatgcctgtttgacctgttgacaggatgctccttctggcagatgaaggacttcccaagcggacgaggggtcgatcgggaagtcttcatccttgaacgttattggtgaggcaaatgacctgatgctggatgggatgcctaaccttgggacagtctgacaacgggacgagcacagaaccgtgcgtaaagacatgctttgtatatgagtatgcgtatgccgcaagatggagatgaggatttgaagatggagatagacgtttgattgggtctactgtcgaggatgataaaggagagtaaaagcagaaggaagctcgtccagatcggaaatgcgcaggacgtagccgatctcggcctggcgtcggcctgggatactgaatgacgctctaactgccggccttgcgacgcctcctctttcctgttcctgttcctgttcctgattttgattgtgttcctgttcccagaatccatcacatctcatccgatacccgcaaccatcaccatcaccattaccatgtcctcagacgctgccccaccagatcttccgtccattctctctttcgccatcgatttggcgagacaggtaagcactgatggctctgactatggcaaaatcttccgtttgatcactccgtaaatacacctaacccttcgacaggtcggacatcgcatcaaagcaggttctcaaaatcgattcgccgctcagacgggagtagatgagaagaagaactctgtagatgtacgcatcgattacatgttcactttggtgtcgcgaattaatgccctacaatactgacttccgacttccgactatcgtcttcaaactaaatacaaaagcttgtgaccgagaccgaccaagctgtcgagaagttcatcctcgaaaaagttacagaggcctacccagaacataaattcatcggcgaggaaagctatgcggccggcaagaaggtcgtgctaggaaacgaaccaacgtacgtctcccacatcttgtgctgtcgattggtaacttgttgcttaaaagaaggacaaacttgatctgctccaaattcacagatggatcgtacgtaatttaatattaatctacagctctcattcatccaagtatctgtcttgaacgaaaaacctcaacctcgcctcattcttcgacaatacatcatgggtcttcatagattgatcctattgatgggactaccaacttcgttcatggttcgtatttacgtcgatggttccttcggaacaacacgtgcgatgaactgcctcctctaatcttcttcttatgtcctactttaggattccccatgtgctgcgtctctatcggattcacgttggttttcatcttcaatgtatctcagaacctctggagcgtgatcttaacctgatgtcactatgtgtaccgtaacagttacctcgggaaacccgtcatcggcgtagtttacaacccgtttgtctccgtgtttcttttgtgtctttcttctctcaaatcctccacactatctgcaaatattaaaacgacttctacgtctatgttagcttccttgatcaactctactctgctgccaaaggtcacggagcctacctcaatgaatctatcaagcttcctctcgtatcgcctcctccggtgttgacctccatctcgcaggccctcatcggtgtcgaatgtacgtcttccacatcctttatctgtctctgacgaatgaggaatgcatgctcttagattggttccttattccatctcttttgcggccatgaatcgatttaacagatggatcagacaggtctcctgaggtgatggacgccaagcttaggagttttggaaaccttgccggacaaggagaagggaagagcatgtgccgaggaatgagaagcatgggtagtgctgcgctggtcggcccattcttttttgttcctctcttctgttattcctggttttatactcataatctcatcaacaaccaaatttttcatatagaacttttgcgctgtcgctgctggtcaggttcgtgctcccctcacatttcaccttcactggatgtgaaagtaggtggctctgtgattcacctggattatgccttttccatgtgtcatctacagctggacatgtactgggagatcggctgttgggaatgggttcgtttttttttcttatctttatctcttcctcttataatcagcctctacttaactattcctcccttcctctttgaacgcaggacgtctgcgccggaaccatcatcgcacaagaatcaggcggtgccctctttggtagttcctctaccgatctctcaggtgatgtcacccccgaaatccttaccggaaggaaatatctaatcatccgaggtgtccccgctggaatagatggtcaacgagctctagccaaagaattctattcaagaattgtcgactgggatcagaattgaggccacgtcttttctaagtgcaaatttcttatagaatgtctcactcggtctggagatcgatttaacttttcaacctcgccagatcctcaatctgctgtagtatctggacagcaaaggccaaagagtgggttgggaattatacatggtaatcgagagaatgccagaaatccaaattagagagaaatagagagaaatagagagatagaatagagaggaaaggagggcagaggggtacaagagttttttcccatatctgatagaacatcgaagaaaataacaacgaaatggattgatgcaagacgacaagaaaggaaagaaatacacttcgagctcaacaaaactctactgggaatatgtgtgatcaaaagatgaattggggaaaactccggagaagacaagatggacgatggaaggatggaaaagatagaaagaaaaggagaaatagagcctatcatcaatagaggaaaaggatgacatgatactgtcggtcctgttcctccagagatgtacatgagaacacagaaggagaatgaactgcatccggcctgagaagagagcaaacaaacgaggatggaaccttagatctcttccatatctacgtgtttcctcttgtgagagggaccctttgccttcgacctcttaggcacaggggcagtcgaagtctttactttggctgtacagaagcgcagataagaatattagtacgacgacaattgaaggactcgattccgactttcgagtgaaggggcgtgtctacatacatttcttaggtgcggaaggcgtagacacttctgtctgctcctcttcttcgtccgctcctgcaggtttagatgctccaaagaaaccatcctcgtcgacatccttccataggttcttcgtcgctgctgctgctgattgctggcttcccgctttggactttccttttcctttcgcgcccggattggctgctgcatccttagcggcctgttcttggtgggccagagattcagccagttcctatatcgaaaaagcatccacatatccaattgacaataagaattcagcctgaatgttaagacgtacagagaagaagaaaatagtttacgtcgtcatccaacaggagagagagaacctcgttcggtttggcagtatcaccagccggcttgtttccaacaacaagatcctggacctaagatcgaagaagaagtagcaatatcattaggaacagttaaacgatgctgcctaaaacataaagaaaactaatagcttacatccttcttttgacgagcgagcttaacaatacgttcgtcaatagttccttttgtgatcaaccgatataccgtgacctgacgagtttgtccgagtcgatgagctcggtccatagcttgagcgtcgttcgaagggttccaatcgttgtcatctgttgttaccgacgataaagcgagcaaattagagaggagtaaatatctcaataagactgatgtataatagatgatcgaactacgaacagaaaatgactgtatcagcagctgtcaaattgatacccaaacctcctgctctggtagaaagcaggaagatgaagatctcggggctggacgcggaagaagacatgttaactagagactcggagagaatttgagcaaaaagatagtaatgggaaagcaactcactcgctctgccatgaagtcaccatgtctcgtcgatcctcaatcttggaagaaccatccaatcgaaggtatttatactgacggtagaccaagtactcctcaatcagatcaatcatcttagtcatttggaaatagatgaggacccggtgaccttccggcttgagctgtctcagcaatgaatctaaacggttcaacttagccgcatcaaagataagacgcttcatctggggcatctgcatcgtgggtggtggaagctgcattgagggcgcagacctgattagtccaataggaggaagacctgggagaacgtcatcaacagcttggcaagcagtctcgtcggtttcgtcggtaatagagagaccgaaaagggccttcgaagcgactgggtctgttcgaatagcttcctcggaccgaaggtaaccaagggaggtcgagtaagacgagattggtggagctagcaccgccggtagaacgcattgaagatctcgccgcgaaagagacgaggtatcgaggagcgatttagaaatctcgtgtaaaagaggaagattcgcttcgttagaggaaacgatggaagcaacgcgcgggattatcaatccatcgatagatcgacgagccgtcgatgctgcaaactcgggttcactactcagatcagagttaaatcagttttatgaaatcatgtgacagagtgtatatagatctgacaaacctctcatagggcgcaacctgaatgtcattcgagtacatgaaggctcgcgtaaaggcttcctgtaaaggagacctcttaatcgatgcatgagcctcgctcggtgaaataccagccaacgccaagaatgcgaatggggaatctgagaacacccaaaagcaaatcgattatgttcaatgctgaatcagcttcgaattctgttagacatattccaataagaaaggggactgactgtcttgataaattgactgttcaatccaatccacgctccaaacgttcatcatgttttgaagccagtgcgtatctgacccggcgtttgagaattctccaggcacagagagcaagccgccatcttcatatatgaggcttggaacctggtactcgatagggttgcgtgtcgagtcgggacaggtaagaaggtccggttctctcatcaaacttgccgtgcgagcaaaggtggcaaaagccatgggcgcctttatgtcggctcgttcgaacaattgtggatggttgcaaaccttatcaaagaaagaagatacggttgaaagatcagaacaggagatcttctatagaacgaaagttaaagccttgttttcctacctttcggaactgcataaccaagttcatcaacgatctaacactatcctgatcatcgaacgaagcactacggatgaggtccgtcatcgagacatgtgctttgaggctcttgtacatagaacgctgtagaggacttggttcgacatataggtcaacctcgatctataaatccaccagcataaagtatccaacaaaagtgagccgtgtacgcagatacttataacgcgatcaaaacataccttgtctccaagctcattttggacgttcttctttactcgtcggagcatgaatggtttcagaatcatatgtaaccgacgaagctgatgctcgttcagatttgtgttgcctttgttatcagtcgaagcggcggcagcttcaatatccctagagaaccactcgctgaactcgtcatgggagtcaaagagggttggcatgataaagtgaagaagtgcccaaagttctaaggaaggcaaggtaatcgatcagcttgtcatctggaagctttcaaaatgatgaaaaatagaaagagaaaatcagcgtaccttgcatggaattttgaatgggtgttccagtcaacagcaacctgtttcggcaatggaagcctagcaaagtcttccaacgggcgctagatgaactcttgatggcttgggcttcatccaaaatcatatactgccacttgactttctggaagtacttctcgtcagcgacaacctgcaataaagacaccaaaatgatgattagcatagcattggacatcggtcagcatcaagtaatatgagaaactgccgacacgaaccagttgataactcgtgatgagaacatggaatggcgcgtcctgattgtaactgatctgttttcggttccagaactttcgaagtgttgctcgatccttgacatttccccagtagggtaacgtcttgagctgaggtacaaaccgagtaatctcctgctgccagttgtgtagtgtagaggctggggcaatcaccaagaacggaccccagatatcctgagtctcggcgagatgagccatgagagagatagattgaatggtctagaggacgacattgcaatagataggaaacatctgatgtcaacttcaatttattcatctactgtacgaaactggaatgaccgtcgcttacctttcccagacccatctcatcagccagaattccgttaataccttgatcatacagactggccagccaactaagacctttaagttgataatctttgagttggacagtcaacatcttgggttgttccttcaacgtgtttccgatcgaagtcgggttctggaaattgagctcttcagagtccactgtatgtttatatgttcccgccgatatgaaaacaattcaaactttagtgtctcctgtttttttacagatttagtcatgaagtctgtgtgaaggacaactcacggttcaaatttaatcctggctccgcgttctctcccttcttggctctgtcaagagcctcgtttttctttcgctcttccgcaaattggagatcgaatgcgacggctttcgcccgatctgccgccatggcggcctgcgcattctttctcgcgtgggcttccatgttcgtttggtcgtctatggtgtttagataaactgacaacgtaagcaatctttcgagaacaaatgttttgtaaatgaacaaacgtaccatcgtcgaaatcaatgtcctctagttcgccatcaacaggcacattagtgcctgcagcagcggcgggcgctgtggtaattgatggaagtccactcgagccagtgtccgcagactcttccgcctccgccgctatagtcgtaacagagacagaggatgagattggagaaaggaacagaggaaaagcattggaagttagtgaaagagccaaacggaatcgtccatgatgttctcctatcggtcgaacgactaagacaaacactcactcttgatcttgcttccgacgaaatgcgaataaagctcggtttgcgtgatcaagaaattgagctttctagattgacgctgggcctctcgctgttcttcttctcgtctagcttgttcgagcgcttctttttctgctcgtttcctgttttctcgctcgtctttttcgtttcgcttccagaacatgagcatctgtttgtttgtttgtttgtttgtttgtttgttnnnnnnnnnnagagagagaaaagtaggtcaatacagtcatagaagcactgaacaaaaagagaagagggaaagagaaacgcaaagcatacctctcgaaccatttttttcgaccgaagctgggcgtttttatttgcttgcttgatcctgatctgggaccgcctactctctcgaacaacagcggcactcatctttttgtattctctatgacgagcgtttgagccatcaaccaccgtccggtagacctgcataaacaagatacgtcaaactcgactgattagtaagaaacaataacctccacagatcaccttggttgggcgaagaactaaaaaaaggatgaaaataaacaagtacacttaccctaggaacgtctcgaactacatgcgaccaaaccttcttatgggcctcctccatccgttccgctaaaatcttctgatcgtcaatctgcggcggtggcgggaggaccggctctggtaatggcgatggctgctgttgctgttgctgatgaagttgaagctgctgttgttgctgatacgccaataccatatcaaactctgcatggtagccgtttccatttccgtttaccatgtggtacggacgagcggcagagaatggatcgatttctccgcccaacataggatacggcgaatagccaggcggtcgaggataactcggatcgaatccaggagggagaaccccgttcgactgctcggtgagaaaatgaaccgaaaagtatatttcaaatcagtctggtgggccgttggaagaaggaaaaggatctcgaaacaaactgacctgttgatacatcatggcttgtgcttccaaatgagccagccgttctcgttctcgttccctttctccttgtttccttgacctgcccttcttcgtaggttgaactgagagttcatttgtagtcgattgcgacttgggctgtcgggtccattttccctgttcagatagaaacaataacaacgacaatacatcacagttagatttgacggcaaagatatatagcgatagtgggaagagtttctcacctttccaaccccaggctctttgcctctcgtgcccttcttctttctctgagctggcatcttgtccttatctagggacaactcgctagactctaatgctcgagcagctccgtccgatgccgagaaatccaactctgttccatcgtcattcagcttacgccgcttcgatcgcctatcatcatcctgcagcccgaagttctcaaagtcagagaagtccgatttatcctcctccccatctttcctatcatctctatcgatatcgtcctctccgtcatcgtcatcgtcgtcaaacgattcaggacccgttccatcatctgatgggtaaggcatttggttcaacccggaaaccgactgcctggcagcctttttctttgctttggacgaagcgagaatcaaatcggccgcctcgaacgaatcttgatctactaacgcctctagttcgtccgccgcgtcccgaggtgtatggggttcgctacctagccctcccaacgatccacttgctgatccgcctagaccgccgcctagtgtcaacctgatccttgttgaagaaggcccactcaatcctccagatgactcgaccgcctgaagtcgttccctcatctctgcctcgattgcttcgtgtttctcctgcagctcctgtgcccgttgggccgcctgaatcgctcgaacttctttcgcctttgcccgagcttttgccttgtagcgagatcgggcgacagccgctttggccttcttctcctctgctagtcgatctcgttcggcgcgatagatggcagcgttttcggcttcctgtcgggctcgctccgcctcggcctttgctcgtgcttcagcttctgccacattccgggcgatatcttctcgggctttggtttgagatccataaggtcgagttagaatggcagcaagaatcctctgttttgatttgaattttgattttgattttattgaaaaatatgcaacggatacaatgatcgaaaaagcatgagcaagataccacgagaaaaagaaagacgaggatgagagatccttaacaagaagaacaaaccttctcgtcgtcctcgaaccattctcccaaagctcgcgcgcgttcccttcgttgatctttatagctttgcacagccgtcacccagatcggcttgttcttttcctcgtccaaatcgctctccgccgccctccgggcgagctcaagctgtttcttggcttcatacgctcgagttcggacagccttcttgcctgcaagtggtccccatggtttagtcggcgactctccttcgacggaaggagcgggagccgtagtagctggaggaggaatggcgctggaacgtctctttgctttggtctgtgtatcgagttatttttatgtaggggcaagaatgaggattcccggtatataccagtcagaagatcaaaaaatagcaaaaagaaaaaaagaaaacagaggatagacatgagaagcgaaccgtttttgctttgcttgtaggctctgtagccttgggagcggcgcccgtcgctgaaactctgcctcttctgcctttctccttctctttttctttcacgttctcactagcggccttgtcggcgagcattgccctcttcgcctttgctttagcagcggccagagtccgtttgttgatggcaggttcaacctccggctggatgaaagccatttctccttccagtgcgaaggactcctccttaggtggtgcctctaccatgagcgtctcctctgtcgttattgaccctggatcttcggacccgtcgtcccaaccctgtcgggatgccagcgccggatagtcttcatcatacatggccatcgaattttcttcagcataggatccattctctcctgcttcgtaggtcgggtggggagtgagcgacctgttgtgatcagggtaaggcgacggggtagatctcgaggcagagatatctgtccgaagggaggatgtagtgagatatgtgccgggtccgtcgctcatgagcgacggatcgatcagactgtgaagccgagagttggacggggcatcttggagagcgggatctatcattggttttggtatggaagaggacgggtcgacagtgttgagcatcctggaaagagccatagtgttggacggggaagctgagggagatagaacggatttactgggagagacaaaagaatgcagggcctagagaaggatatgaacgcgagaaatgatcagtaagaaacacagcgcaacgggaagagtcccaggagatcaactgtagaggaggagaatgagagtgaaggaagagagagagaaccccagaagaaggagaaaagaaaagaagacaagaaaagactagagggaggaaagctcggaggggtattcagattcactatgaatcaataaccactggatgtgatcggctgaatgtaaagcttgtccagatatccgtgtgtatgtgtcaggaattgtgtcggtagctcgacggataccgttcctttgtctgtgagatgtctcgcaagggacgcctccaccgaaaacgagagatcccaactagacaagagacaatcgcctcggaggaagacgtagacggccaaactcggaaagagatcgtggttttgttttgaattttatcaaagtgtaccggtcgaagtatagaacttacacgttgccggtgatatgttgaaggtgagagaccgtcctgactctccggctgtggggaagcgcctggataaggcgggtgcgatggcgacctgtggtccatttgacgattggcccaaaggacgtgactgggtgtttatcagttagtggatgtttgcaatgttgattttctcacggacagagctgatgaccgattcagcgaagcagagcccttcgattcgagcggatagctcggcgtgcttagaagtaaaaggagaagatataggtgttgggcgagagaaggagatgtggcaagggaagaagaggagcgaagagagagaacggaaaaaagggagggaggaaaaaatgggcaaaaaaggaacaaggctgagctttttccttgaagtgtcagcgatgagaaggggttttctctattccttgtgttcttctgtgctctctcttttgtgtttcccgattctttcattgaatgtagtgtatgctcgttgtcgttggattcatagaaagcttacttcattctatatgcctgctctttctcgcccatctgggatatagggatgagggatgccctgggatgcatgctggtgcttcgccgggatggatgtaaccagagtaacaattgatggaaatggcatatttaggaccgatccctctctcttcttttaccttcactctatcgatctcttcctctctgtacattcttccgtcaaactcatcatgtcgtctcacgaggacagagagtggaacaacggtcctgtgtacagacccaccttccgaatacctacattcgtcaaggaggttggtcttgcccagaacgaactccgaccgagtacattaccggataaagagaccttggaccgtggagagcgcgtgaaaaacatttatcaatctctcgccgctacttggagttcggacaccaaggaagatccagaaatcatcaatctatgcgaacaggatgacgacgatgacgacgacggcaacgacaacgacaacggcaacattcaagagaatggtaatagctcagatgccgaaattcagtttgtaaagtgtgtccgtcctcggcctcttcctgtgattggaacgtcatcgtcaacgctcccttcgcgtgtcgccaccagtgtcactggtgatactatcagtgcctctgtcaattctacaaagagcaccacttcaatagctacaagaaaccgttcaagcgcgcaaactcctgtctcccaatggttcatccgtcatgctttggccaccaccacgcctacgaaccagttttccttaacggctccgccgtctagcgcgggcgcgccttcccaacgagcatcactggcgtcattgatcgaccttccggatccagggaacggaccagctttcgttccaccaccccatttccatatcaaaccaggaaacaaaggctatgacatgctgaagacccttggttggtcaggtagaggactgggaaagatagaggcctctgcagaatcgactcctgctggtgcgaccgatagcgagaaaagaaggtcggtggtcaagcaagacccaagtgattgcagcacgaagaagaggatgagaaaatccacttctcaaagtttctcagatttcgcgtcctcttcatcggatgaatcttcattcgacacgcccccctccccaccgcgtctatcctccacatcatacaatgcacgttcctcgggcgcgacattcccttcgtcccgacgaaccctgatcgcgcccatatcaaccacattgaagagtgatctgctcggcattcgtccatccagctctaccggcggtcaccatcgggcgattactcacacggctcggtccatcaagcttgcaaatagggactctgctttagctgaaggtagaatgggtccgaaagcaacgagaagaaaagtcgagagagaacggaaggagcggttggaattgatggctaggttgaacagatgattctcatcttccattttcaagaaggtgaagccttccattctcgtcttgtggccaaatgaggagaccagatacatatttcggtttagatagatcgaattctatcatgtccagccgtaatcgacagtccggtttagatgagttcctcattccttcgacgaatatatgaatagcttgtcgtatgttctttttatttttccttctatcatattgatatgaacctccgaatttcagaagagaaagttcaacgcaatccttttttcttccatctccactcctcaagccctttgccgctttacctaaatttcgtctagatgtgtatcgatttgggcgcaatactcggactatatccctccacaaccacgcatatactcaggtgacatcaagccatcaatgatccatactgtcttcctcttattcatatataccatcgtgacatggtgatgatggtagtagtagcagtatcatgtatatcacaattggcttccagtagatagacttgacagtagattaggatagaaccctggctggtttcgagatatagaccgagagagtatatctcagactccactagatttttctttcacttcgtgtttgtttctcgtgtcatagagatcaatgaaagattgatcgagccgcttggtttcaatgcgcgctctgtccttgtttgaatgtcattccgtgttggcaacatacgatgtgagatatgaaacaacaaaagagataaggaaaaaggtttattggacaagggaaatattgaatcatgagaactttaagaactaagataagcggtagacagatcaagcactgtcttgaaagaatatgaaaggaggaagagaaacggaacattctgaacgagaaagagggcggtactctcgagttggcttcattatgaagcatcatctttcttttactcctcctcatggtacctgtgataagaaatgatttagttcccagagagaaagatcagtcgaccggtcaacccaagaaatgtagtctagaagctagagtgaaagaagtagacatacccagcccgtctcatctcgcctagtcgtcttcgagcgccaccaagctccttctctagtttgagaatctcgacctgctgctccatctctctgaccttgaactcgtgggcggccatcgccttatagtctaccgactcgtcctcgtctcccttggccgaaattgcctttacctgcctgacgagagccttgcaggcctccgtcacagctctcgccgctacttctaatctctcctgggtctttgacatcagactggccttcactctggaagcagctacaagttgggctgtggcggcggagacctcgttcgaggcgacgatcagctgttcgagcgagtgcgtaccagagatcactccatcagcagactcgatcatcaatgtcgtagcaaacgcgacggctttggcagcagagatcaaaccctcggtccatcggttgttcctcttgtagaactgttgaaccgagcttgaacctctaccttgatcgacaatctcctgttgagaatctgtagcagccttaatcaatcgaccaatcgcactcgtgatggccaaagcagcttcaagaatcgcatcgtggacttggacgtcgagcgcagagtatctgcctgaatccttcggtcgggacatcaatgcttgtaatcgttgggtagcagcctcgatggcgttcgcggcgttcaacatctctcgttcgacaagatccccgatatccccgttcgctttcgcaatcgggtttgacttccgttggacgaaactctcaaccactttcgacaagttcgcaagagcagcaccggtagacgcgttgttcctcaacgctacgtcatccgttccgacaaggttatacgactgaaggttcataaagaacctcgctcccgtatctccagccgatttagccacagacacaagcttatctgaggcctcatcagaggcagcgagccgggtgatccctttggaggaaacaattacctctgacaacgattgggcgagttcattagcggccttaatgacgtccacatgagaacctcctcgttttcgaccgaggaagaggttgtagatcatcgcaaactcggtcgcgttcgttgtggccttctcgatgatcgaaagcgtatactcaggggtggcgttggtgtttccggtttgtgtgggtgactcgagttcatagatggagtcatcaactttttgaacgcaagcttgaaggatagaatctgaggagggagatgcagttcgcaatgagataccagaatcaacaaatctcgtatggcaagacgaaacaaaacaaaacaactaaccgatgatctgattgagctcctttcgatgatccaagatgagtgtatcgacctgtgtggtgaacgcctgatcggcttctccggtagtctgtgcaagagcgaaagatagattgaatttcggctcatagggtacgttctaaacacagaaacgacgatagagaagacgtacgagcttgctctcgttcaagttttgcaaagtcgcgtccagactttcttgcatcacgctcaactctgcctctttgtcctcgatcagctccgcatgatccctcgcctgatcgtccaactttctgaggagatcgtcgatctgaatctgcttcgacttcaatgaatcctccaactcgtttagctgtcggttgtactttgcgatcaacgaggatgtgtcggcggacttgtttcgagatgcatcgtccgctctttcattggcaaactgaaggtctcgcttgagtcgatcgatctcttccttgtggctctgttcggcccgcaaatagatggtggagacagtgatcagagagaaaaattaaagaggtatttgaacaccaagagagacagagaaggggactaacagatttgactcgatcaatgtcgaatcgacttcgatctcgctctctgatcatatcagccagctccaagttctttgccttaacatctctctccattcgctccatcttatcgaccgcctcctgagccgagttggctcgaagctgcattcctttagacttgttgagtagctcgaggtgttctcctcggagttgagagtacaatttggcgagcgcctggtatttattcttccactcttcgacttgtcgttgaagttgtgcaatcaggtcgtccttcgattgaagttgagctccaacattggcagagaccataccaagttcggtctccagcgctttgactcgctatgaggtataatcgtgcaaggaacaacatcagatgcgtttgttggaaatccggatcagtgcctcgtacaaaacatagagaaagacgtggattgaaaagacgaaccctatcgtactgctccaacatcatctggtctctttcatattgacctctcattccaagcaactccatctcgagctgttgacctctgccctggtccatctgttggaactgcatctgttgctgcatttgctgctgccttagcagttcctcttgttgccttctctcattctcctgctggactctcagctgttccgcatgttccctctccaaccgggcggcctcgtcctgttgtcgtcgctgggctgcctctcgctcagctaccaatttcttttgcttggcttcgtactcgttcaacattcgtttttgttcttcgatatccgcattggtcgcatcgagcagagaaggggtaggagcaggagggggtgcaggcgtcgccggttttggagcggctgttcgaggtcgatcggggaggtccggcgcgttgccagattcagccaagttcggaggttcctttttttcccgttcgggatcacaggagatcagaagaagccgggtgattcagcgtatgttctattctgattggcatcaaggagaagggcgatagcttgaggccctagactcacctgaccaagcttgggtacgttgatcaatccggtcagatattttaggttcgagcactcgtagtagaactttctcaagttgtagtgctgagcattgtatcttgcctttagaggctctagcgcatccatcgattccgttcctgtgtgcagtcaaccaagcggtccagcacaagaaaggaaaaggcaagaaaagaagagggggaaaggtacttaaaaatcagcatcatgtagaatccacgatccaaagatcatgatgacaacgattagaaaagaataggagaatggaacgaacgtcggtgcatagctcgcatcatgctagttatgaatcggtagataccataactctccttgacgagaggaactaaggaagaaatcttgcattcgttgttggcggagcctctaaagtgggcaaacgttagcttttggaacgagtcgatttgatcttgaagagtcatcaaatcggtgatggtttcgtatctgttagaagattatccagattgaggtggtgagtatggcaatttacacgcaggctttgaatacctaggttcgtgtaaaaaggtaagaaaacgcgtacccttcattgggatcatcgattccccgaagtgttacatactcctcgtactcgaacaatccattgaagtctacgtgatgtcggtggaaccgaagtttggaaagaaggaactgaacataggcgcggatgagtgttccatatcctgtttgaggaatgaagattcagcacgataggaaaacagatgtagagagaagagaatcatccacaacggtcgcacatacctttcgctccatccgaagagaccgttcttccgcacgtgtcgagccatccggtttgttgatgagcatctttcagcgtctagaaaccatcagtcaaacaactgagctcagctactaccgacagcagaaacttagttctgaaggaatacaaacagaaggaagagacgtacaacagggtggccttcctggagcaacttgtggacgatgatcaacgccttaaacgtcatcacctcatccgtcaacacaggctgaactctgattccattccagacaggaatagaagtttggtagtcccaggtatacacgatacattctataatccgagcgcggaagggatacagtagagaaaaagccaaggatgagctcttctgatcagatacatccgttgtaggagaatggcgtgtttcctctgtcgacgcgaccgcatgcgacacgtccagagagtccgtctgacggtttcaaggaggatccaagattgagacaaggaaaagacgactaacttcggacgtgtttttgcttgggagcagtctcttctgcgcttgtggccttcttgatgtggaccgagagctcgatctcgctcttgtctttatcgaccggccgggtgggctgatgaactatagctctgattcgtctttcgtcttgctcataatcatcttcgtatctgttttgtttgtttgttcgtgtattagagggacgacagaataacgctttaaatcatcaactcgaggagagaatgattgaagagattgtagacagcgagagacgagggacgagatatatggagaagatacaagagatggaattgatgagatcaagaacgggaaggtaacgtacccggcgactctgccgtcttgattctgaggagtacggcgaccgtaggacattattgagacaaaactctccggagggatttaacaagtcgttgtgtgtctgctgtttgtatcctaaattgcaacagctcgatggacgaaaggaaagaggaaggcagacgaagcgaaaaaggcgataggagatgagattgacgttcaccacagcccggccaagtcatctggttacgcaagactacggcgtacgtaaccaaccgttagcagcagcgacaacaacaccaacaatgagcaccagcatgttcttttggctcgtacgggtcggacaggcaggtgttgaaccatcgaagggtacagaagcttggtggcttagaatgcatcgtgtgcgccttgctacataggaaaggcagaggaagcttccaagacgactggtctcatatcttttacgctagggttacgtcaaatcctacattatttctctgtgttgttcttgatggtcttttccctttcaatcgttcatccttctatccatctgatcgtcagtatttcttatccgtcgtttgctctacatcgatcaacatgggaaggacaagagaaataagaagaataaaagaagaagggagttctcaatgagcgagaatgactagtaatccgtttcatgaacgaaaccaagaagcaccgctcaaaatatccccttcccacttgtttcttctatgtttttctcaatttcgagcacttctcttttcttcttaaactgagagaggagaacgggcttggtacttgagatttataaagagtgtgcatgtcggaaggcgagatcgcagggtgctcgaggggaatcaaaggcgaaactgagagaacttccctattccttttttttttttttt

SEQ ID NO: 616 - DNA, 6735 bp, Xanthophyllomyces dendrorhous
tttttttttttttttttggtgtttcgtccagccctgatgttaaacttcatacaccctttttagatacatactctcatgagtagaacggtttaactgacatctgctttgtttttctgtctggttatctcaacgtgatatagagttcgacgggtggcacacggaagcttatattgatggaacgtatgtaagtgatcgcggtgcatatcacgtcgtaaatgtcgactatactcatgttgagtaagttaacggtggatatgagaatgtgtagtgtacaccgtcggatatatgaagttttggcattggtttgtatttacatctcggctatatgtttcagcgactctggatataccgtgtgttggttagtctgaggacatggaaccgttaagagattttaacaaaagaagccccaagatgcctctgcgatgcattacatccattcaagacacccaaccatacacactttggaggacagtaagagataaacgttcatcgagaaaagaaaaaatccaaagagaataagaatcaatcaccacgtcccgcccgacttgatgcctagaccactcatattgatcgaccctcctcctcctgtcatctcctcgattgatttccggtactcgaccttttcaactttcacctagagagtcagtcatatgtcggtcagaagtacatcatgtcagccatcaacatccattatatctactcaagagcagtggagagagcgagagagagaacgacatcatacctctcctccgacgagtgaatacacgtaggtcactacttgaggtccttggatgtccatcagagcaaaggacgggactgtcttttctctgcattaacaagccattcggatcatacacgcatgtattaggccaagagtagacaagacgttaagggaaaacggagtggcgatgaattcttacccaggtcggagaccagaccacgctccactagccgaacctgttcatccacaaggccggatcgtgatatataccggaagaatcctgtttagccggggtagaaaagaaaatctctcttcgaaagctacacagtccgggacaaagagaggaaacataccagggttgatgaagaatctgccctccgactcgaagctttcaaacttgtgcgttcccccggtgaccaacacatcgacatccattcctctagctagtccagcgagcgcatcatgatctcctggaggaatgacctgttgaccgccgagaacccctatccgaagtgagggcggacagggaattgttaacgagagcgggtaatgcacattctgagaaaaggcaacctcattcatcagtttcgagcaaacaagtcatccaagagaagaacagacttcggcaaaaatgatgactggcagcggtttcttacctcatcacaatctcctcgaacaacattcacagccggtgctatcgaccgcagatactcatacgtctccttgtcgcaaacatttcctgtacagatgatctgctgtattttcccttttagaagacagcgtcaaatagatagcaaccgatcaactttcagtccgccaggttgaaacacggataagaaaaggacttgcctggcacctgtttcgttcaagcaagtacgcggttcagacgaacggtcagacccgaaccagagatgagagggcagaaagatgtgcgatagatatggaaaggaggaaagactgacaagcaacctcttgaacttggctggcaagtcacctgctctgtccgggatatgaagatccccgattataagaacgagcatggttttctatttatcgaagagagaaggctcggagggtgtcgaatgtgagaggatattgaagatgtgttctctgatctgtagtctgatggcttatcgaatcgtttattgcacagctttcgtgctcttccaccatctcatcacctttctacatctaacgttcccgtagaatcatcagcagcaacctcgacatcctcttgcacacgaatcaaaatctcaagagaagaagcagaagcagaagcagaagcagaagtagaaggaaaggctagagagaatgtcatcgtttccagacacatctcaaagatcgcttctatcgccctctccgacgccctggtctatacctacggccagctcgcctctacctggtgctcaagccggcgctccggatggaactccaggacggatcgctttggaggagtacaagaagagggatggtagtaaaggttcgcggacagaatcgttttccacatgaatcaagtcctgtacagtgactcgtcgcgctgatattgaccttttgaggattcgcttgattgatctgttgcctgattcgaggagatcagtggtcgtgaggttcaaggcggtaggatcggcaccgatcatgaaacagaatttctacaagatcactggaagcaaccggttccaggtaagggctcatcgatctgatatctatcttgaagaaagagaactgactcgcttggctgttggtttctctatgtttgtctgtgcttggacgggcaggccgtcattcaatttctgaggaaggagctgaattggaaacctaacgatccactagtgagtcttctagtagggtaaccgaccagaaaaattgaactgattcgcctcattatggtgacacgccctttcagtttacgtatatcaactcatcgttctcacccgcaccggacgatacggtctcgaacttatttaaagtgagccttcgtcgaatggggaaggccctcacaagattgtagctcaccgactttctttctgcatccacaacacagtgtttctcgacagaggggcatctgattgtcaactacaggtatgtctgtgcttgtactagcctctaaatattggctcacgaacgcagctaaattagaggtgattcttccttacctcgttttctttcagcactacccaagcttggggataatattccacacgtaccccttatagtctcaactggtcttgaccagttcaaagagaatctctgcgtgcggctccatgtcactcctctctagttttcgttacctacatggttataccctttagttctctattattctgtgccctcatctattcaaaggcacatgtccaaacgaagcttgtcatcgtccaacgactcccacacctgatgatctgtataattctttgataagatcactgcattctcatctgcaccctagctttcaagcttaacactgcacagacacatgagacatacgtgatccatacaagcaagactggggccgaaagtttacgccggccgattttcgccacatttaccaagtccatcagattgaccctaaacaattcatttttttttgcactggcgaagaagaagaaaaaaggtcgtcgaggtccttttctctcttctctctatccatcgggtccctctatctttccaaccttctcccctcccttccgcaatctttcaaaatgtatggatagaccgtctcttctgtttttaggatcttgcatttggcagagttgagagatgtggcaatggccgggagatcacaagctcacaaatctcgtttttcttctttttcctccttccttccttttgcctcttgtcaattttttccctctctttccaccttctatcgcaacgtgatcttccattccatgtggcaaaaatcaacctctgctgtctatatcgtctgccatctaaatacacagggttaacttcaccaccgatggttcgttcatttctcagtcattttttttttgtaaaccggtgctgatggttttttatcctctttcctgcagagattcgtgggcttatgggtaagtagagattgaagcctcctgtgacaagcatctcaatgaccaaacactgacccaaatcgagccacggtaacacagacaagcctacgaacgtgagtcgatcttttgtctggttctcaagtcgagatgatcatgttttgaccctgccttctgtctccttctcactcttctttcgccactccgttccttagatccgaaacatgtccgttatcgctcacgtcgatcacggaaagtccaccctttccgactctcttgtcgccaaggctggtatcattgctggtgcccgagccggagagactcgattcatggacacccggtaagactgtatttcttttagttctttcttcacttcaaatactcaatactcctcgcccttgtttcaacagagatgatgagaaggagcgaggtatcaccatcaagtccaccgccatctccctctacttcgagcttcccgaggaggacatcggaaacgttgcccagaagaccgacggttcgttcagttcagctcatgacaactgaaatttgattagtcgtactaaacagtcttgctcctctcttttaggaaactctttcttgatcaacttgattgattcccccggtcacgttgatttctcttctgaggttaccgctgctcttcgagttaccgatgggtaggttacaacacactcgatctgtatactaaataatctcatgtatactaaagctgatctgtgtatcttcttacagagcccttgtcgtcgtcgacaccatcgatggagtgtgtgtccagaccgagactgtgctccgacaggctcttaccgagcgaatcaagcctgttgtctgcatcaacaaggtcgaccgagctcttctcgagttgcaggtcggaaaggaggagctttaccagaccttctcccgaaccatcgagtccgttaacgtcgtcatctcgacctacatggaccccgtcctcggagacgtccaggtccacgccgagaagggtaccgtcgctttcgcttccggtctccacggttgggctttcaccctcaataccttcgccggccgatacgccaagaagttcggagtcaagaaggagaagcttctctccaagttctggggagataactacttcaaccccaagaccaagaagtggaccaccaagtctaccagcgaggacggacaggagctcgagcgaaccttcaacatgttcgttcttgaccccatctacaagatcttcgccgccgttatggactacaagaaggaggagatctctccccttcttgagaagcttgagatcaagcttacctctgacgagcgagagctcgacggtaaggccctcctcaaggtcatcatgcgaaagttccttcccgctggtgatgtcctccttgagatgatcgtcatccaccttccctcccccgccaccgcccagcgataccgagtcgagaccctctacgagggacctatggacgacgagtgcgctatcgccatccgagactgtgaccccaagggacccctcatgctttacgtctccaagatggtgcccacctctgataagggacgattctacgctttcggacgagtcttctccggaaccgtccgatccggacccaagatccgaatccagggacccaactacgtccccggacagaagtctgacctttacgtcaagtccgtccagaggaccgtcctcatgatgggaggaaaggtcgagcccatcgaggactgcccctgtggaaacatcgttggtcttgtcggagtcgaccagttcttgctcaagtctggaactcttaccacttccgagaccgctcacaacatgaaggtcatgaagttctccgtctcccccgtcgtgcaggtcgccgtcgaggtcaagaacgccaacgatctccctaagcttgttgagggtcttaagcgactctccaagtctgacccctgtgtccagacctggatcaacgacagtggagagcacatcattgccggagctggagagctccacttggagatctgcttgaaggatctcgaggaggatcacgccggtgttcccctcaagaagtccgaccccgtcgtcggatacaaggagaccgtcaccgccgagtcctccatggtcgctctttccaagtcccagaacaagcacaaccgactttacgccaaggccgagcccttgaccgaggaggtcgcccaggacatcgagaagggaaagatcgccccccgagacgatttcaagatccgagctcgattccttgccgacgagcacggttgggacgtcactgacgcccgaaagatttggtgtttcggacctgagggaagcggacctaacttgttggtcgatgttaccaagggagttcagttcatgtccgagattaaggattcctgtgtcgccgccttccagtgggctaccaaggagggagtcgtctgtgaggagaacatgcgaggtatccgattcaacatcctcgacgttaccctccacactgatgctatccaccgaggaggaggacagcttatccccgtctgccgacgagtgtgctacgccgccgctttgctcgcctcgcctggtctccaggagcctatgtactctgttgagatccagtgccccgagaacgcccagggtggtgtctactcgtgcttgaacgtccgacgaggacaggtctactcttccgagcagcgacctggtacccccatgttcaccatgaaggcttaccttcccgtcgccgagtccttcggtttcaacgccgatctccgagccgctaccggtggacaggctttcccccaggctgtcttcgatcactgggcccttatgtccggaactcctctcgataagggatccaagctcgagactttggccaagagcatccgaacccgaaagggactcaagcccgatatccccgctttggacacctactacgacaagctctaaatggttgatgtgttggatgttatgtgatggttttcctttttcctctattatctggcacagcctgccttttttttttttttttt

SEQ ID NO: 617 - DNA, 19868 bp, Xanthophyllomyces dendrorhous
ttttttgttcggccttcagtttttttggacgtttcttggttctgcttgccttccgtctttgtattctgacgagtcatgagattttgtctcagtcacgcagagtagtcactaactgatctgaacacgacacattataagagttcggagtagtgtcagactgagtgtatcgtcttccgtgaatatgagaactagacatcatccacagaccaggtgcagttgccaaagatgtagtcatccgatgcatctctaaacatctggcatgtaaatctccgagcgagaaatttgaactaaacattatgacgcgtttcctcaaacatcgaccttctttttggttttgttctgtacgatcaataatcttctccttgaaaactgaccactgtcatagagaatcgttgcagcatcgagagcttagtatcttccgcgcccctatatgaaaaccaatgccaccgaaacggaaaagccaatcgaatgcctcgacgaaacaatcgcacacaaagaagagagcccgaccaacacgtatagcgttcggggcaaccaaggccgaagacgagatccaagcctcagctcatggacctgctttcagagtcccaacagttcatggggaagtaaaacatctctcggcttattgcctagctgttgttgggagaaacgttcgaatgatgtttgagccggactataaagggggtggcctcaaagagacgttcgccagtacgtgatcgactttacaccttgatggttcgaaactcgcggtttagaacactctgatagacgctttctgtcgtgtttgtatctcttcctcagattatttctatgtattgccagagcatttacgcatcaaagtatgggaacggttgttggacagtgggagtgggctgttgaaggaggatctgatctctcaggtgtgctttcgtcttgagttgggtgagcccgttctgctgcggtctgactgagaactaatatacatcttcctcttctcattccacctgaccgaatgggcgaaactctcaaagtactttctctcgagctatgagatcgtcctccgtggggaccttctcccagtgctctccaacctcaaatcccttaggtctcttactttttcaacatcgaacgaacatgtcaggagattagttctctcctatctgccccaagtatcggatacgtcgattgcagatttactgagaaagatgcctgcgctggagtatatcagcttacggttagtgctcgctttatccattggatgcatccatctaattcccatgaagggtttatacccaattcttcttctgtctttggattggtatattcatgtgctattgcttgctgcgtccaaagtggatcctctcgagctgaagatgtgtccgtcaaggctatcgagaggacgcattataagacgctcagaacactcatcctatcggaaacaaatgtcaaactaccttcactagcgaatctactattgaaatgcacagagttacaagaattaaaactagcggagatagacaagatggtaagccttgattttggctctgtctcgggttccttttccagagttgatgacctcttttggttaccggtcggacagaccgatgcatccttcaacagactactggatactctctatccgacacccgaatccaactccagcatcagcttgacttctgcttctcctattccactctttcgactcactaagctcaaacttcgagggaaactcgatcgatcgatcaactcattcaacctctcccgatcgacacttcatcgtttgctctcccatttaccctcactcagctctctcgatataagttattgcgaaaacgcaatcacctctctaccttctcagttcctgtccaatctgacgaaactcagcttgagactttttactcggtgggatgggccttcaccgctggtggatcaactcatccaagcatccccaccactccagacgttaatcctcgtcaattccaacatattggtagacggtagtctgggcgcgttaacaggactcttggagaaactggtcgatagtggcgatgtcgggagaggtcatagtaggagagagaaacagttgagcaaagtgtgtttgatcggaaagatgaccacaaggggtccaatacatcagagacgacagagagtttctctcgacggtgaggaagacgatcggtcggacttgatactgtttttggagaaagttggtaggaagttaaatgtaagacgcctctctattctctcctctttctcttccgaatcgtgtcgcgcatacttaggatgaacgaaatccctcgtcgattgatttctgtgaaaacggaaatctaccgcattgtactgcaccgcacgatttatatttattttaattaaactaactaaaaaaaaacagtatctggatctctccggagcgatccttggattggacgatctacaagtattcatccctccagggtccacgctgactcacttagtactcgccgcctgtgaacttccggatcgagtgggtgattgcctattgggatgttcggatctgagagtattgaatatcgctcattccagagtagaacgttcgtgcctctatttcctcccttcacatctgtcccattcacatgaccttgcgcgaaggtaccctgagcatataaaccctcgtctgaatttccgtctcttgttccttgactgtgagccttcagtgccgacgctgttcactctcctcgatgcttgcccgagattaacgcagatagactgtacatcctgtcgaggtcagcctgtattccgtcgccgtaattctttttcctttcatatgaccattggctgatagagaaaacatgatcactcatcgatctcagggataagagtgaacgaacggcgagcgatctttcaggtttgtccatcccgtttctcttctcttctcactgtcttgacattactgcttttctgggggttcgtctctcggaccgtatatttcaccaaaactgatgaatatacgtatggatattgtgcgcttgtgtacttctatctctgttctcttggaacggaagttatggagagagagtgatttgattaatgaaccttagtttttgatccgaaagctgtcgcatattaaatatgaacacgagaggttccacgaattttgaaaaaaaaaaccgacattgatacgagtgacaaagaactagaaagaaggaaagagaaatcagaatgggatgggctgatgcggttgaaatcgcaaaatggaagggaaaagaggatagaggagagaggatgcgggagaacgattggtcggacagacgtggtaaagcatctgcgagaccgaccaaccgactgaccgagactgagttcgaagaggcagagaggaaggcgggtagataacacggacattggtgtatactttggaagcgaagacggaaagaggaagaaaatagaaaagaggagaatatgaaaatagtaacgattaaggtgcgaacgagaagaagcgtcgtcgagaagagatctaagctggattaacttagaccagacatggacgacgtatgttggaaaatataagagaggacaaaaggtagttagacgagatgttggacgaggtgtggacgaggaataggatggatagagtggagtggaaggggaagaagacctgtagccctcctaatcttgcggctcccgctcgacctgttgatcggcgaagagtgaagaaatagggacttggcgtgagatgaagctgtcaaagtgactacaggacggagagtagagaaagaggagaagaagagacagtactgtagagaacaaacagaaagcgatggataggtcaagacaatgagaagagaagaaaacaaacaaacggaaagtttgaaagggtaagagaaggtagagaacggagagcagataaatccgaggggaaggaaggggtaggaagaaaccatacgtgaagcaggcataccgatctcgttctatcgagctcgactaccagatacaaggagaacaggtccggagatggcagctaaaagtcgtgttatataagagagtgaacagaagctaccaatcctccatcaatgaaacatagagcggagatgaggaatgatagaagcggtcgggaggtgatcctatgagagcgaaagattgaaaaaggacaagtgaatgatgtgatctacgtcgtttggtattcgttatgggcgttgttgttctgcgttgacgaagggaagagggactagaagaggttgaaaagaaccgatgagggtagccgagctctccaattgcctaggctttctagaaccctttcccaaaatcatgctcagcccgtactcttcgtccagaatcgttgccccaagtcttcccacggctcaacactcgtctcctctgttacatatccacagacacaatcacgttcagtagcttatccctatccttctcaaactctctcgtgttccacctgcttccccaagggacttccctcgaccgccttaataccaagcctgagggacgggctcatccgccggcctaatccttcgaactggaggaggcgcaggcgtgactccggccttggtctgggatcggagctgcctgtccgttccgcccttctggccctctgggtcctcctcgccgacgactcgtcgaacaggcgctctgggaatggccgaggtgctcgggttggcaagctgcatctcatcagcgacagaacggggttggacactccaatcaaacacgtagtcgtactggaaagcttcccggacaaagaggtctctgaagagctttcgaaggtatgaataatcgggctgataggaaagatagagatagaggaaacgtataaagcagaaatatcagagaatgatcgaggcaagatatgcatacgcgaagaaaagcaaaactggaagatgtaccttgtcgtcgaatcggagagaccggcagtagttcaagtagatggcaaactcgttggggaaccctcgagtaagaagctcagtaggcgtggtcatctaccccgttggtatgattggtaaggataaaacattgtcaacatgagctctggtatgacctaacttacttatatcaagacagaccaagcaaaaacaaaagtgatcacaaaccttcttctccataattcgatcgtacttctgcttcttggtagcagccttcaatccctgccagggcagctgacctctgaggaaatacataagaacataacccaacgactcgagatcgtctcgccttgactgctcaactcccaagtgggtgttaatactagtgtatcgagcggtacccgtcaagttcttgttctccctgtacgggatgtgaagatgcgtcttgggatctcggtacttcttggccaatccaaaatcgatcacgttgacttggttacctcgcttgccgattcccataaggctttggattgaatgtcaagatcgagataaccgctgataatcagaggactgtcttgggagagaagaaggacaagaaggaagaaaacctacaagttgtccggtttgatgtcacgatggatgaagtttcgagagtgggtgtactctactcgagaaatctgttgattgtggtttccgtcaaaagcaagtgggcgtcagtataataaagtatgtcaaacaagaagaatccaatgagcagagagaaagtagctgacgagctgatcggcgagaagcaaaaccgttttgagagagaactttcggctgcagaagttaaagagatcctccaaactcgggcccaaaaggtcgagaaccatggcgttgtagtcgcactatcgttgttattgtcgtcgttgtaaagtaccaaaagagggccatgcattcttcaggtcagtgatctgtttgactgttggttcaaaggaataccgggagtcatgcagaaacagtcgaacaaacctcggtcccgtaccacctgacaaaaggcacaccaactccgccagccaggctcttgtacaccttgctctcatattccaactggggatgcttggccttaattgactcgagcttgatggcgacctcctcaccagacacgatgttcacaccaaggtagatatcacctgttgatttaagcgtcacgatttggtgaacgacaagagtttacccagttgatatcagtcggtgtacccattcatcggggatttgaatgatgcagaaaccaaagaaaatatggacaaggtacggaccgaaagatccgcttccaatcttcttgccgatgcgatacttgccgccaacacggagatcagttgccatttgtgtctggaagaagatttggatgtggtgtggttaaagaaattgatggtaaataggtttgtcgggagaggtaccatatagcaagggaggagagtgatggtcagggggtaggtggccatcgagggaatgaatgacggaaacaaggccagagatatggatccgtcggacgttgtgagaaggcaaagcattccgagtgcaaaaagaagagaaaattcgccgagatgagacacgaagggtaaatgaggggaaagagcagaagaggtatgtcagtcagaggatacaagatgcaagtaagaacagtgaggggcatatgcaggtaagacttgaatcgtctgcagctgcgacgggacccgacggcactatcgagacgatgtcggccgtgacatgcctgttgtgtcgtcgagcaccaggaaacgacgatggaaaaggaagagagagacgaacagtgtattgaaagattgattggtttattagagttgaagggagaaagggaaaagaaaaacagacggaaggaaggctggagcaagaacgtatgttgggtgattgacaaagtaaaccagattgaatcgttagacaggacaggaacttttactcaaacacagagcgaccaaatccggagtatgatcgaggcgaggtgcaaaagggaagaaaataaagagaaacgaagcagaggaatgcctgaagaattcacacagagatggaagaggaagagaaaaggtcgacagggaaggaatggaaagagaagggaagggaagggaaaactccaacgaaggaacaagaggaaggaaaaatctccagtacacacggtcgtggctcttttaacgagggaccggatggcgagccgtatttatcaaacctgaataggtatgagttctgacagcaagagacactaaacagacagacaccaacccagatgagaagaggtgatattgatgcagatgaatcgatgcacgatgcgttcccggtcatttggatgggtcagctgtaccaacagccatctcacatcctttttcgtttcccttgcctttctccccttttcccttttcttcctttctgccttcccgtcattcgatcttcaaacttttctttgcagattccgatagatcgatcaaaaatctgtggattcgtgaaactttgaaataacttacaaaaggggattgtgtcggggatacgctgagcggaagggagggaatgaagacaggtggagaaagtagaacaaaggcgagagattggatgcagaccccaaacagactcggccgatttgtcggttacgcgtgattttgttacacaactatccagtcatgtgaaaagcccattatcttatctatttcacaactctcccctcgttcaggccttattactcctcatccttctcaggaaccatccttagtggtcatgtttttgtataccatctcgagctgatacttcctatatgttggatacatgtgctgcctctaaacagcagaaggctaagtaaagagttccaatagactcgctagcttctcatctgttcggtcgagccttgcccttgactactttcagcataaatccttctttgacggctgaacaactgtcggacaagtctattcttctcaatcccgacaatgctatagactaccatccctcttacatcttccgattttgcgctcaaaagttccagactatcatacagctctgtatctcatgaccgctctcatcgtgctccttcgattcatcattctttccatagtacgtcttcctgtttgagggaatgaacaggatattcgtctacaacgaggcacaggtccccttcgggattatatacccaatcgcgagactgagcagtcagaggcactctgatttcgatcaaagatacatcaactctgttaatacaaacaatcatacgaacgcagcttagatgaacaataggccttggcagacccctatgtgcaaggagatgcagcaacagattgataacgattatcaagatgactcctggccgaggaacggggggtaagaaggggccgatctgatcctctccttcttctctgtgaacaacactactccgattcagttgagtgtggacattgaagacattacatgctcgatactaaagtttcttcacataaatgagtttctctacaagttttaaccacagttggaaacaacagactcgacacactgggatggtctgttatatctcaagcttcaaatacctgagaggaatatcacaatggacaggccttcttcttggcctttccttgcatcgtttcgacgacaatgacgaacgcagagtcaacgttcgaaagtctcctctttgcaatgacgtcaagtctgccgcgttcgtcttctggtctctttcttgatacattcataactttctttcaagttaggttctagtatttctcccgtaatccacttgttaattatttcatactcttccttcccaatcagcttcttctgttctttggtagatcattttctgtgcgtgattttagcgcgtctgtagcgtcttgaaaacacgtgttatatcctcccgaagtgtatgtgtaaaaagtttaatttgctgaggtttgttcacatggcagtccggattatcataaggccggtaaccctaatatcaacatggctttcccccttgcatacatttctactgaccaaggtttaattaccaacaccatcctcggccgtcttactctgcctgtcagaggcccgttcttgaaccatgctcttggcctacatatcaacgttgttcattctgatgtctaccgtcctagctatccctcaggttttggtctatacgcggacagccggtctgtctatttgcaatttcttctgagagaacaacagagcgggctatattgagttctctacatttttctaggcttccgacacgacagtattcccacggccatacagagtctgggatctctcgggcctaacaacagcatatcatttacattcacagaggatcccgccagattcactgaccaaggtcttgctgaatttgacgcgatcatgtttgtctccaactcggatgaaggtccgcccttctccctgtatcctcattttattcgagtgaacgtgtgctgaatcctttctatcccttcccaatcttgtgcaacatccatcagtcttggatgacactggtaaacaggcccttcaaacgtatctcgaccgacaaggaaacttcatggctgtccacgctggatgcgcctgcttatttaccacggatttcttcagaaaagaagtcggcgcgctttttgactatcatccaacgtttcaacaggccgtatgctcaatctttttgtactgtcatatctttcctccattccttcaactgattggtcctcgcgcctttactgttgtttcaacatgatccgatgtagacgtttctcccgctcaacacaacccatccagccatgacgatgattcccgatcgatggacatttgtgtgttcttttggttctctttcgcgctacagcctcatctctcgttgtcttcgtcgagtatccatagaagactgaccgaattacaagtaaatatttgaatcataggaagaagaagtctaccactatcgttcggatcctcgggatgtaggcgcgcagatcctcatgaccgtcgacgagtccagctataccagtttcgtctacttgttccttcttgtattcctcctgtcgtcatcatcacgacgggccgatgttcatactcgagtacagccacttatacgtgttttcgttctgattttcttcgtagatgatgggacatcctcaggaacctatcctgccgtgacatcacctcttccaataggttcgtcttatcaagtgtaccaacaaaaggaataaaaatgaataggcagacgaagaacaaacagcatgattgatagagggatttctcgataactttaccaaactatctgacttcatttagcatggtaccaagatcgaggagccggaatctcaaatgataccgttcttcccgggggtagaagttttttcacgtctctcggccattccaatcagacttggcaagtcagttgttttcttcttctctctaacttcctcctattatccctcgttttaccttctcgtcgtatcgtttcgatccataggttgatcataggttcgatttgaattctgcgtcacaattcacattgtctagaacgaaactttcctagcgcacatctttggaggcctccaatggacgctcgactcgcgcaccaccaaagcttacacttcctccggtcaagtgggaacttcatccttctcttcttcttctataacatcctcttcgacatcatcatcgtcatcctctacgacagccactgccggcatatcagtctcgaagtctggtacaacatcccattcttccactcaagcttcaacgtgagtttctctgtcctccttctccctcaagatatctttctaagagccttggggagaaaaataaaaaaatagaaactaaaatggatatctgtctaatgtggcctgatactggtgtcctttagatcctctagtccatccaccacatcctccgcgaccactagttctgcgaatcgacagtctggggttcttgatggatatctcattctcgtttcggctttaggcataagcataacggtcgcaggagtttgagcaggagcaaagtgaaattggtcctaaaaagaaaagaacaaagagaggtctttcgtcgcgagcgtaactttctttgtcggaataatctcagtttggacagcctttctatgttatgtgtatttctgatccttttcaggggctgagcgtacagtacacacacgtttgactacgcgtcattgatctcgcgtgtttctcttctctcgattagactatcacaacaacatggattcatcgcatataactaggctctgaaaagaaatccagtcacaggccgatcaatcaatcgggtaaaaaacaaacaaaaaagacaaaaagaaatacagcaggtgtcgcaggatcaaggcctagcgagaagaatggcatacaatgagaactaagaaacagagaacactaggctaatctagtttactgccctcctcggagtcgaagaacgagatgaagggtagactccttctggatgttgtagtccgacagggttcgtccgtcctcaagctgctttccggcgaagatcaatcgctgctgatcaggagggataccctccttatcctggatcttggccttgacgttgtcgatagtatcggatgactcaacctcgagagtgatggtctttcccgtaagactatgaagcactgaagataagatacgaatctcatcgatacgggtgactgaatgatttggtctacacttacgtcttgacaaagatctgcattcctcctcgcaatcggaggacaaggtgaagagtggactctgtgaaacagagagagagagagtcagtgatcttcgtcagaaagcgacgaagcctgataagttactcacccttctggatgttgtagtccgacagggttcgtccgtcctcaagctgctttccggcgaagatcaatcgctgctgatcaggagggataccctccttatcctggatcttggccttgacgttgtcgatagtatcggatgactcaacctcgagagtgatggtctttcccgtaagactaaggccatatttgtatcaagctgtcagcatggaatagtttgagaaattgtaataagggaacgtacgtcttcacgaagatctgcattcctcctcgcaatcggaggacaaggtgaagagtggactctgtgaaacagagagagagagagtcagtgatcttcgtcagaaagcgacgaagcctgataagttactcacccttctggatgttgtagtccgacagggttcgtccgtcctcaagctgctttccggcgaagatcaatcgctgctgatcaggagggataccctccttatcctggatcttggccttgacgttgtcgatagtatcggatgactcaacctcgagagtgatggtctttcccgtaagactgaaaataggcaccaatgaacagtccatcacgtcagcaaatgtaaagatatccgttcaaaggcacaagaagaatatacatacgtctttacgaagatctgcatagctgtttggatggaataagcaggtaaacacgagttagttagggatcgaatgatgaggggtggctagaagtatggatgagcagatgggcagatcgacggataaacggcctgtaggcacgccgccagcgcatctttgtcatcgccaccacacaaacacacagctcttatgacaggaaacaacgatgcatccatccaccaaggtgcctgtttcaccatgtgagcaaaaacaacagacccttaaagtgacactaagaatgaaatagcaaggttctcttgtctaaatcgtgatagcacaaacaatcctcatcgacactggtggtggcgatggatgttgttatctcttcggcaatcgccgcatccatccatccatctacacggacgagaggagataatgaaggaagagatagagaaaggaagagaatactcactgtagtagagtaggcttggtgttggatgggcaagcttgggagataggtctttttgggggttggggacaaagtagtagttgagtggtaagaaggaaatggaaggagggaagtaactggcccgttcttatcggtggccggaaagagatgaaccctcggcgggaggccaaagcgtcaagtcaggtgcccactaagacatcgacgccacaatgatgactcataaacaaggctgtgcaaggcaccagtcatttcagccctctctcccgctgcgcatcatagagtgtgggagagagacatctgttccgtcccatcttcctttatcgccacctgtttcttctgccatcgacacatctactcccgttcttttgatcaagttataaactcaagtgcaaacatgaagctctctactactcttctttcttcgttggttcttgttgggccctctcttaccaacgcgatgcctcaggtcgactcgttggttggactggcttcttggggtgccgaggctatctctggtatcggccgaggcaaagtcaatacctttcctgagggaggatggagctgggttgactgtggttcgtttattatcctttaggaagacagcttatctaaagcaatgccacatccactaaaacgtcttgcgtgaattgggttactgtacatctgataggtgtcgctggtgatgccgtgtatgtctgaattcgaagatctttcttcctgagggtctcaaacgctgcaagcttacctgatttgatcctctcggggactcctaaacttagccaagttgaatccattaacatctccccggaccctcctgtgcctggaaagaacctcactgtgtctgtcaaaggagtagtcatcgatcccatcaacgttcgtcttcttcctctgatcgtgtttccaaccagtcttgtcagccctttgtcatggagacatctaatctgtctgttctcacgactcgtcaacataggagggatcttatgccgacgtcttggtcaagctcggccttatcaagcttcttcagaagagattcgacgtgtgtgatgaagcgtgagtaccatttgtaccatcttctgcagaaacaagaacaaaacatgggatgtgtctgttgatcctgtcaatctccgatatcggatatctctgtagtgaaaacgccaacgccacagtccagtgccctgtctctcctgggtcttacgaagttagccagacggtcgagcttcccaaagaaatccctcgaggtatgtgcattttgtccgcttcaccaagttcagattcggcatgtctcaaagcactgatttgaccatacaacctgcccaccgattctgttctacaccgcagctaaattcgccatccaggttcgaggagtgactgccgaggacaaggacatgctctgccttgatcttttcattggtaagttgtttctcatctttttcgctttctgctgtctgcacaagagaaagagcaacactaacattccgtgttgtgtgtatactattatttaaacagactttttgcaccgaaagcccgctctcaactagactgatagacagaacctccctctctgttactcgttgttctgatgggaatcgctcacttattactctaattcgcatcctgcctgaatatcttgaccaatcaacacctcttttctgtctgtttgtcttctcgctcgtcttttgtagttttctgtaatcacttgtctggaggaaaccccgctctgtgcatggttgtctttacgatgatacatgctatgttttcatacgatagcagatcgacagagataaacattgcggcaaatagccatcagattagagaatttcatcgatctttttctattcagactacaaaacccctctaattaaaacacgatgggggccataagagaaaaaaacaaaaaaagcgcagcaaccccaccaaacctccgctcttccgttttttgctcctctccgtcttccgtcgttgaagtttgcactctttctctacatcctctctctcctcttcgtctcgaccagtccttagcctacctccatctctatcccgtcctccctcgtcctccctgtttatcttgaacccgccttctaaaaagaccagttctgaaaatgcaccgagccgctcttaacatcgcccgacgaacgcctgctttggccagaggtttgtccttttcgttttccccaccatttttttctctttttctcttcatctgctctggggaaagcaaacaacaaatagatacgagatatgtcgtccctttccaatcatcacaagaaactgacctatatctttgctcgcattcggattgttctcttcacctgcctttgttgtgatcttttttttctcccactccgatttgggtttaatttaccgattcatcaggtttgaccacctcggttccccgacaggccctccaaaagtacactttccctgccatgtcgcccaccatgaccgagggaggaatcgcctcctggaaggtcaaggagggagagaagttctcttccggagatgtcattttggagatcgtacgtttctgcctgttcaatctgcgtctccatctctttcctctcttttttttctcttttccggcttgaggcaacttgccaaagatcaactgtgattggagaaaacactatggatctgttggatcgtgatgagaggtttttcaggatatgcgaacgaaatcaagaagatctctcgatagcttagaaacatttgcaacaagatccagccgaccgatcaaatacctttactgtatgctgttggttatagctcgatttcaacgctaaccccgatctctcctccattcttctatgtgaccctgacaggagactgacaaggctactatggatgtcgagaccactgaggacggaatcttggccaagatcatcgtacgtttatgatgcttttgctttcatatacctgccagccgtgttctcatcggtactctttctttctcacctccttatgttgtgacgtcgcttgaatgtaggtcggagatggtgctaagaaccttcctgttggagctcttatcgctatcatcgccgaggagggagatgatctctccggagctgacgctcttgctgccgagggaggagatgccgccccagagaccgccaaggaggagtccgctcccaaggaggagtctaccaccaagaccgagtcttctggaaccaccgcttccggacccctcgacactcccaccggtaagcccgctgtcggtacccccgagaccccggctaaggcccccaagattgcttctcaagccggaggaccaaacaaccgagtggttgcctcgcccagcgcccgacgacttgctttggagaagggtgtcccgcttggtcaggtcaagggaaccggacctgagggtcgaattgtcaaggaggatgttgagaagttcaaggctcctgccgctgctgccgcttcctcctcgacttccaagggagctgccgttgccgagtacgaggatatcccggcgagcaacatgcgaaagaccatctccaagcgattgttggagagccatcagaacgtgcccaactactttgtcaccgttgagatcaacatggatcgattgatgaagctccgagaactcttcaacggtgccggcaaggagggacaggtcaagctcagtgtcaatgacttcatcgtcaaggccgcctccctcgcccttgctgacgttcccgaggccaactctgcttggttgggagatgtcatccgacagtacaagaaggccgacatttgcatcgccgttgccacccccaccggattgatcacccctatcatcaaggacgtcggttcccgaggattggcctcgatctcttctgagaccaagactcttgctaagaaggctcgggacggtaagctcaagcctgaggagtaccagggtggatcgttcacgatctcgaaccttggaatgttcggtgtctcccagttcactgcgattgtgaaccctcctcagtcgtgcatcctcgccatcggagcttcctcgcccaaggtcgttcccaacgacggacccgagggtggttacaagactatcaacgtgatgaacgttactttgaccgctgatcaccgaacggtcgatggtgctgtcggagcccagttcttgaaggccttcaagggtgtacgttcctctttttcactcttctcgaactttggtttgttttcttgagaagaggctgatgggtttatctatggtttcttcataacagtacatggagcagccccttaccttcatgctctaagcggcttgtatcatcaagatgtaactctagccaagggttttaagactagtgcttcgattctttctctttttggttccaaggctcggtagacaagacggttcctctttctttattctcgtctaacattttttcttctccatcaacctttcaaccttactgctctctctttcctcaccaaatgtcttactcgtcgtctctctccgattcttaaacttgatgtctctttctctcttcatactctttccttccttctctctcttcttctaggcgctctgttctcctctatctttttgttttgggatcttatgtataaagatttctctcatgaatcctccttgctcgtgccctcctgtgcctagtcgtttgtgatcggccaacccacaggtctcaaaccgctcttcctcgatctttgattcaacactctagtggggctcaatcaagaatctagaactgtgaccgctgaatgggatcttgccagggagggggaggagggtataagatcaagatggtgctttcgcgtatcttgaacagggagggaaagggtgatcacgcggtttggctgtcgattcacgtactttcttcacccaagactcagaagaagacacacacacacacacacacacgacacagaagatataacccaatagaacataatacaaaactgtaagacaatcgtgagagaaatatggaaagggaaggaatcccatatagagcggatatcacacaaaacaaaggacccctttgtcttatcgttcgatcgggtctcgtcaccatcgacaaccatatactttattctcacgcccgttccgactcgacgtagacaaagacagtgggacgaagggaaagattaaactttcgtgttcagaggagggagcttgcctgcgggcggtgcaaagtatccactctaaggtattcaaccagagagaatccaaacagagagagagagagagcaaaaaaaagtgggaggatagacaagacagatttagaccaagagcaaaaccaaagtgtatgagaatagagaaggggaatcagtactgatgatctataacccggtcgaatatctctcacccgagcttgagcatctcctttccgatttagtcccccatctccgcttccccctcagactcggcctcaagaaggaaaagcaaggaagaaagcagggaaaaaaagaagacagaagaacactcaccctcgtagcggcatcggcagcaaaccaaagtgcgactctgccagcctgcaacatcccatcggctacgtactgctggttatactcattacctagtaagtgtgtctgaggcctgaccaattccaatgtcaacgatgaacggtaggcagccagcgacggatacccagggatacccagggattcccataggatatacagatgttttggcacaggagaaaaacgggatgatagagaatgaaggataaaggcatggagctagaggtcagacgatccgaggacaacatccgagttttgacaagagaagtacgagaagagacagacgaacctcaacccggtctgagcttcgatccccgcactcaagacactgataccgaacgcgagcttgacagtttgccagacagtatgaagaggtctcatcgtttcggtttgatttgatcttttagtgagaagttgaagaaaggcgatggagggtttccatcaaaattataagaatgaaaggaacgaggttgtcaaaaagaatattgaggatgagcatctcgcaaatagccagcgagagtatatactacgaccagagtcataaaaaacacacatactctagctgatagagagagaccaaacgatgatggatggtagaaggatgggatggaggatacaccgacggtcgttcacacaagccggggatattcattggtagtcaggctcgcgcacacacgtcatccggatggacgactcggatgtggcctggaaaccatctatcgatcaattttctcttaagctctcaaagtccatttataatatatctctttccgtgtgtgcgtgtgacttgagagtgttctcttcttgaagcctataagcaggcaaggaaaacacataggaggaaacaataaagtaatacagtgggccgatagggtaggctacaaatctaagagttgttctgtgaggtcgcttcaggccgaccatgattcaagggcgtccttgccaagcttattctcgatcatctgagtgcttaatcgccaaagattgtctcgaatgactgggtcggatccctgctcggtctctttgccgggggtctcaggactttgatgcgaacgggaagagagtcagaaaaggggacgagagagtgaagaaagggagagagaaacaaaaagacagagcagaataacatactcgctgaggtagtaaccgttccagtcgttcttgatgatatcctcagaagtgccggcgtagatggcagaataagatccttggacaggagacctgccaccaaacaaagtgactgcctcgacgatctttccaatcagcccagggtacgctcgttgccaggcatcctgcatgtcggtattgaccgcaccaggatggacggagagtacatagacgttgtctgagtttggcttgatgaccttctcgagcagcccgtgggtgccttggatcatcgcgagtttcgttcgaccgtagagctcgatcggtccaatcttttcattctcttggatctctgcgaccgattggaaggtagtcgactttggtgcgaaacggtgcatctctgaagactcgaacacgatcctcggggctggcgcgccgggaagcttggacgtctttcggatgagagggtagagcaggttgatggcataaaagtgaccgagccagttgacaccaaagtgcctgtcgatcccgtcggcatcgagcccaggttgatcagagttgattcccgcactcaggatgagctgtgtgtgtgtgtgtgtgtgtgtgtgtgtgtgtgtgtgtgtgtgtg

SEQ ID NO: 618 - DNA, 12554 bp, Xanthophyllomyces dendrorhous
tgtgtgtgtgtgtgtatgcataggagagacgtcgtcagtggccgggcaaggaaagagaaccggaagattgaaaagtgatacagacgagatcaagcctgtcctcctctttagcaagtttctcaaagacctgcttggtctctttcaagtctcctagatcacaatggacccattcgatgatggcctctggaacctcggccttgatctttgcgatcgcttcatcaccttgttcttcctttcggttgatcatgatcgtccgagcccctgcctttgcgaacgctcgagagacttcgtatccgattccgagcgcacctccggtgacgatggcggttcggccttgaaggttcggcgggacacattccttggctagccagagagagaaacagcgaagatgagcgatttcactagccgatgagttgatgagcggtatggtaggtctcaagtagcaagacacttacgtccgatgagaggagcgagaacagactgcattgttgtgagtgtgagtgagtgagtgggtgagtgagtgagtgtgttagtatggcagaatgtgaatgtatgtacgtgtgatggaactgaaagagaaagctccacagcaactgatccaaggcagcattcttatacgattcgatcctctttgatcgagcagaacgaaaagaaaagagaaggatgattcatcgagctgaactcaatccttgcccaccatgcgcactcaccaccaacgacgtgctcacgatcaagaacctccaaccgatgatatccttctttggggatgctctctatgacgttcgacgcacagccgacggagatgctcttgatcgacgcgtctcccacgcgccggctcacgtggccggcttgacgcgtgaacaggtcgcgttcaatcttttgtcacccgttccttccgtgcaatctgactcttacttcttaccttcgttctcccattctttcatctctagtcgtacgtcgttcgtcgttcgtcgggtctgcttgatctgtgaggttaatttgctgatggtcgggtcctcttgttgacgctcagcccgaaagtcaaatgcctaatcccgttcgtgtctcgtttcgttcattcgttcactgcatcctctgatcgttcttcaatctttcgtggtgacaccgacactgcctcttctggacacgaacactcatcctacatgtttctctgaatacacacacgaacacaaacacacaggccacaccagggaccgtcctaactcttgcggccaccatcctgctcgccttagcttcgttctgcacaccgttgatcaagtcactctacctcttcaaggcgacactcgacaacgatgacttcacaggtactctcacccttggcaccctcgggtactgcatagaacaaacttcatccaccaattgcagctcggcgggcttcgggtacaccctaggtgagctttctctcgttccagacaactcccgagctcttactctgtctgactttcatccgttctgtcctgtgtacatttcatcagacctcgattccatccttgccatcaccgcgatcgatattcccaccagtcttagcaaatggatcacctatgttctcatcgtggtgagcaactcactgctcttacacatgctccttccgctcttctttcaaatcaactaatcgctttgtctcttcctgtttttagaactttgttggcaagtctccttttcccttacacacgcattcaagcatgtacctgaccggcgccagctctctttttcactgtagccttttgcctggctgcactgtcgttcgtgataggattgatcgctcattgtgggcagttcggaatgaccatcttatcctctattgtagctgtaggtcttctctacctatccaccgcgtttcgttctgaccaagagctgacggagtctctaaacgtattcaccgcttgctgtagggtatcggtgcttccgtcggttcgtacttatcaattttctctctacaacgaaaccgaacttgacgtcaacatgttcggtttcaaatgttctattctacccgatcagccatggtggctttcggcttcgatatagtcctcttctttcttgcaaagaaacgaatcaactccctgtcaggcgcatcatcctctatcgggatgtccacctggctcgttcttgccggttggatctgcttgatgttttctggatgtgctttcgggtttggtcgtcgatgcattcagagtagaggtcctcgggaccccgacggtggagcacgtggtcgaaaggtcaatcccgatgatgcttacgacgaacaaatcagacaggacgccttccagcaggagcaagatcgaaaatacagactcgccaatggagatatggctggccagggaggagtcggtaatccgaaccatcttcctggcttccaaccctacgagactatcccacttacctcgaccggaaacagaggtcaggggacggatcaatggttggaggaggaggacgagcaggacgagcgagatctcggcgttggagggaacgcagctcatctaggctacagagatcaagctgagaacccttacgcggctggagccgtcggtgttggcgctggaaacgcatacgctggatcgattgcagggaggagtgaagtagcaagttacgcgatgggcggtttcaacgcaggcagaggagctggtggtagaggattggatcaaggtgcaccctacggtcagcccggtgggttgaccagaagagagagcgatgactttgcggccggtcaggccacaccaggtggctatccttccgttaccgaggccggccaagattgttagtttccttttcgttttgtttctcccttactcttagcgtcttttcccttccaattcgctaaataattttgggcttctgtaaccactcctctccttcctcttagattaccaagccgaaccgtactcggatccttacgcccagccgtaccgtcaaccatacaactctgcctccacgtcaccccctccaaaccgattcttctcgccaacgaccactgcgtcccactatgatacatactcttcgccacagctacagcaatcccaacagcagccagaccgacaagtctctccagccatgcatgcacctgcccctcaaaggttagctgaccctcaaggaaactcttatgcgaattttttagatgttcagcatcacgatcagtacgttaccagcgaagccagcggtagcggtggtattgagagaggactggatggggagggagtgaccggaccagaacccccgaggtatgaactcactgctacacctggattctcatccgatccctcgagtggttatagacaggaaaaaagcgcgttcacagggtatccttgatttttttttgttatggatttgtttctcctcttgctatctcgttcgtcttcttgttattgggtcttctacttttctctctctctctctcctcatcgatctgttcttgtcttctatctttcctccatatcttctttttgtcttggtcaagaaagagtcaaaacaatctaattggaccgaagatcagaacgatctcgttgtctttttttcctctcttgtcccagctctcttttccttccctttgttcttcttcgcttttcttgtctttgaatactggctattccacctctttctttctttttctttattcacggacaaacaaacttggttttcgatctcttttgctttatgggatgtgattgtacgatgtcaaagcatgttttctcaaagacccttcaataaatcgacattgcatggttgtttcttttgccgtctaccatctagcgccttccaggcaaggtcttgcctgttggatagatcatgtgagtcgtaaaaaataaataagaagaacaagaggagaacataacatgccttttgcggatgaaattctcaggcgggctcaaaaaaatcaacgatgatgacgatgacgttttttttttgttctttttaaaaaaaatagtgatagacgccaactgaaactcggaactcattcgactttctgtgttctttctttccttttgagaagcagttcctcctcatcctatacatcatatagagacaaacgacgagcgagcatgaatatgaatcttaactatggcataagcttaggtttgagagattcaggtgacagttggcaagaagagcgcgcatctgatcatctggaagggtgaacgatagatttcattagcgccaagcaagtttcaagtctccctccgatcacacaattcgagaccgccaaatataaggatccttccttgccttcatagccaaagcctcatttacttcgccaccatcataaacatatcgactaactggccaatcatcagtaaaaaatgactaaaccatcaaacgtgttgaccgtcgctttcttggcttgtgacaagatacctgaggaatctgaagctgctcatggagagtacgccggtatgtttcccctatgaacacgttgggctgattgaacacattgggctgattgaaccacgttatcgatcacgcttctcctatcttcttcttcttaacgtttatttattccgatcaagatgtcctccataacctttttgagccacatatccctgatcatttgaatctagagacacgcaactatgatgttgtgaacgctagaaagtacccaacagaagccgaactcgaccagatcgacgccatcgtgatctctggctcgttcgaggatgacgctgacaaggacacgacttggatcctccgtctcgctgggttccttatccgtgtgaaggatgattatccgaggatcagaatgattggcatttgtttcggcctacagatcatcgctagagctttcgggccgagtttaatcgaaaagaacgagaaaggatgggaggtcggtagcacaaaagtcaacttgacgaagttaggaaagagaattatctgggatctatcggatgacgatgaagaggagggagtcgatgttcgaggtcatatcgttcgtctgtctttgttgaactatggtgtaaagccgaccatggctcaaatacatcaattcggttttcatggtcctcctcggctcgcctacagatgatgcaacagatccattccgatatcgttcgagaggtgccagagaattttgagttactcgcatactctgaacttacgcctatccaaggcatagtcaacttttacgattcagaagacgttccacctttcactcattcggaagctcataccttaccggatgatccatggagaaaaatacatatcatcgcttttcagggttcgttcatcttcgcatgtgtacgatcctgtcggagtatgctgtgatactgacgcattctttcttggtctgggatgactgaactctgggatcttctaggtcatccagagtggtgcgcgctcttttcgctctcactaccctggtcatctccgtgctaaccttatcaaccctgctatgtgttgcttttcccgtcaactatattaggcatgacgggattttggtccctctaattgataactacgagaaggacgggacgttcgacaaagagtttgcgaaagacgcaagggaacggtccagacagcatcacgatggcaaacgactcggtcaggttcttcttcgagttcttggagttgcctagcgcgattgctctgattctgtcgagagtgtttggggaaagagaaagaagaaagattttgtagatgaataatctgtatgatgtaatgtatctgcgctactcaaacttcggtcaggagtttttgctccggccggaaaaacacgtggcggatttcagagagaactatcgtttgactatcgttttctcctccaacccatctccctgtatacatctcgtgtctccatagaaaagaaagatgaagatgaggacaagaactgacgatcaagacccattgataccgacaagtacagctcgcagtcaattatggacggtacccataaaagatcgaccgaaatcccacggttcttggttctcggtaaagcccatactttccgatcctttgaatgccattctgttcgtctgagttgaacatgtctctctttccatatgggtgcagtacattgtctttccgatcgtgtttaatataggaatcttgtctatcaacacgacccaactcttgtgtgcgtgtgtgtttcctcatttataaaggtcataacaccgtctaactctcacgaaggtttctttctctaaactcaaggctggccactggctatccttccaccgacacgtccgctgtattacaagattcttcgctccacaaaatcatcctggtgctctctcatactccttatctccatcttgttcggtccaacctcgctcgtgttgacagctggagagggaatagatcttgatgatatcgtcgtcaggcgggataagacagatgatagggtaattgggctggatcttccaaaacgggcggtcgtcatgggaaaccatcaggtttgttcccgactctctttcctttttcatgtaacacttttcgatagttctcctctgtctagctatgctaaactcgtccgtgtatataggcgtacacggattggttgtatatctgggtgcttggttattttgctggtactgccgatggagtctatatcttgctcaagaagagtctcaaatggattcctttcgtcggatggggttgccaattttttgattttctattccttgcccggtaagtctcttcatacgggcttgattctgtttgcttttctgttgtctcgtgactaacgactgattatatcagtcggtgggctcaggacaaaggtccattgttcaagtatctgaatcgattgagtacggagtctgtcaagaatcatgatcctatctggatgatggtcttcccggaagggacgattgtaagcgaccaagaacgagcaaactcgagcgcgtacgccaagaagcaagatatcgttcgtccatccttgcatcctttccttgccttccccgtgcatttattcatcagcacatctcttgaattcatttggtctccaaggacgataccatcaatgtactactccctcactcgctaggtcttcaaacgattctgcaccaattatcacaaaacctaccttctctccccgtgctcgatattactattggctaccccggcgtacctcccgctggtgcagctcaagagtatcacaatctgttctcaatcttccatcgttccgttccgccgcccgcggtccatatgcacctaaggatgtatgactctgctcagatccctctgggcgcgcaaggtggagagtctacatcagacagagaagcatttggagcctggctgttggaacgatggagggaaaaggatcggctgatggcagcctactatcgagacggcgtgtttcctacccaagaatcggagcaaggagtacaaggaggaagtatagaagttcctgttcgattcaggtcaaattgggaggcaggcaacgcgctctgttggggtttccccttggtcggccttccggtcgtatggggtatcttgggctggggagtctggaaattagttactggttaaagtgcgcctccatgagttgtattcagagtatatcttatctagaatgaacatgaggcatagggtaaatatccaagagaggttgctgtcaagatgatgtggtgaagatttgaataggctttagagaggaacatttatgtttgtcggcaccgcccgaacaccaaacaccttcatactcacccatcaccatcacttccaaccacaacgacgatagattgttgtacgcttgcagtatttctctacagccactcggaaagaccatatcaataagtgcaagctccagccagatatttacatcctttaacataacgacatacgaaagctatggccaacaacagacccagctcggcagataatgaagtcgtttttgatcaatcaacagaagacgaatgggattctaactcggtcgtcgacccagagcgtggacacgaacgttcgcctggagaaggatatcccacacaggacgggttgattcctttattctctctctcttgccgcttcctttgatgttggatgaatgctcacgcacgacctcgctttcggcttgctcgggatggtgcgactatcacaggccattaggttctcaatataggctttcccgaccagaagtcatcaaagggtttgcaaagtaagtcatcctgcttagagatccatctgtaatcacatcttaaaaagaaacgcaaagtgctctaacactcggttgggcggggtggaattttttcttcttggaaatcactatagtcgtatagttcattcggttcgttcatatatggctggtggacataacattcattctgctgaaggctcatgcttgttctatgatcttgggaatcggtttatgtgactcacagagatcatatatcatcttatatgtttgtcctcttcactcgaagattttaataatcgaggcgatcaactagcttatatacttgtcttgctctcctctaacaactctttggatgatacagctaggaatggccgctctatcgatcaccaccgtcgttctctctctacaaagtgaatgtccaccaatctcgttttatatcttggaagtagtagtgaatctggtgatgatccttgaagtaggaatcaggctcgtcgcgttcggtcgagttcgttcgcctttctctgattaacctcgccaatcgccgtcctctgactgactcgtgtttcaacctcctttcctcctcttctgggacgcatctgcgttatcttcatttcaactcaagcaattttaccaatcaatattcaaccttctagatctattgatcacgttgttctgtatcattactctactcgtcgtattttggacaccttgtagtagtcgagaggaagtcctggatgatgtgatcctcgttgttaggaatgtgtttcaattcggacggctggctgtgttgatgagaaggtgcgccgatttccttccgattacctcctctctctcgcgcatgattatggaatacctctaatcttgtattcttgtctttactatgatgatcaatctggccaatgtcatttagatccgggacatcccttctgacaaatccgacaccgatagatctttcctcggcccgtcaagcagcttatgcgctcgatcttgatctcgaggacgaagaggctggtcgactgattaccggggcgagagctggctcggtaggaggagacggcgcggggtatgtaccggtacaagctgagcctcctaggaggggggttggaccggtgggtggtgatagaggaagagacgggttgacggaagatgacgaggacatgtgggatcgattgagttaatatagagggagatctggaagagaaatgagataccccgtttgcaccttctcttctctcgatccctctgggttcaatccggcttttggtcatatatgaatggtttctttcaggataattcagactcgattcaaacttggctaggtaaacttcaaaacagctcaaagacctcatatgtttgtgtgatcggacaagaagacatggatctaagattttgatagacgcaaccttaaaactccacaccctcctcaacagcctccttgacacctctcgcaatcctctgtctttctctccatagttgcctgacagattgtactgaaaacttccattctccttcttccgcctcttctgctctctccacgcttgcgacaaggccatccagtgtgctctctccctcggcggcttcgatctcgacggctgtacatatccgcgcgagctcggatcggacggaggattcattagcgtcggatacgaaaggtaagtaaccgaggatagtgtcacgccatgcttggatgtctgtcgaggagcttgaaggaacaggaagtaggaggagacggagagcggtgatgaggttgtgggatggatgaggtgtagaagagagatgcaacgtgtattgtctgtttggtccatcatagaaaacgacgaaaacgatatcagaacagaaagaagggagagggatacctctacacgggatgagaaggacataagaagtaaaccttacccccagtacctttcttcctccaagatttccttccgtttcgcaccttcggaccccaaactactgacaatctcttcgacccatcgatcgacacaaacctcgttccactcgttcccacctcgaccttcttcgtcaggcggatagcacacgaatccatactctgccatcaagaacccgtcctcatggggcccatactgtagcaacacttctcgctttgagtcgttctgtccatccgatctcgggtccggctgatcttctgaagcaggaaggacgtaagtactcgctttcgaagcgggaacagacgaagggagtgtacaaggaatgggcgtcgaggaggaagaatggttcgccatgtcgaggatgggcgcgagagtgagatcatttgtgccggaggaaggctcgagcagcagagggaacgagagacatcgagtgttaacattcaaccaggcccagagaagggagctctgagaaagagaggttgataagtctgttgaagagtatgttgggtgggttttctatggagaagaaaagaggaagaaggaggtcagaacaaagcgcaatgagaaagcagtttatcagagatcaaagatactgaacaaaaagaactaaaggatagaatacgcaccaacactgtcttcaacactttcacatcttcccaaaaccttttttcaacgtcttgaaccaatctccgcacctccttcggcaagaaacgttctagatctctccacctcttcattcctggagcctcctgatctccctcttgatctacctcggcaacaagccatgtcaaagggtgatgccatctgaaactttgtggaagaaccttcaaaaaaggtgcccaaggatcctgggtactgagagagcttaaagccggttgattcgggttgtgcaatgctagatggagggtgacaagctgagtggctgtcaacggatagatctcgtcgggttctccgtcctcagtctgcgctttctcgagggaagtcttcgatcggctagaactcgctttctttgatttcgttaacggtagaggcgtgaattgggacggataatgggttcgaagagtgtgcgcattgatgagtgctgatgtaggtatggagagaacgttgcttggaggagcgaacttgttataagggaagcttgccgtttggtagattcctctaccggcgccttggagacagacgaaagaaagaaggaagcaagaagtcgagttcaatcagatgttcattgaaaaggacgcgaggaaaactcaccgcagctttacgcaccagggatttcttcacacgacacatagaggttttccatgccatgttcttcggtgagccatctgatcagactctgccagtcttgctcgagggtggaggaggacggagaagaagtggtcatcgttgttggcaagtatacacgctggtcgatgttgtcgtcgggggaaaaaaggaaagttgttagggttcaaacttttcgttcacaatcttatcagtcaaaatttttatctcaattttcaatcgtccatcaacaatcaaccatccagccgacaaaattgcaaacatggtcgctccaaaactgtccaagaaggaacaaaaagctgcaaaacatcaccctaaaggatccaaaggaaaaggaaaggcggaagagcccgaggatttcatcggggatgaagacgacgaagaggagactgttgaaaacttgactgctcagatcgaggctgtcaaggctaagaagagtaaagaaagcggaaagaaggtcggaccggcagtaaagaaggatcaaaaagagaagcctatcactacctctgctgctgagggtgacgaaaagacagcagagccgaaaaagaagatggcaaagtctcggttcatcttgtttgtcggtgggtgttgttcttgagctctttctttctatttctcttcagaaggcagtatacgtgtgcggttctttgaacctaatcttttcatcaacttgctctacgcatgctatctttatctaacaggtaaccttcctcgagatgccaaagtggtcgatgtggaagaattcttcgaggataaggtcaaggaaaaacctcaagttcgactattgacggagaagcctcagcctggtcaaccaaaaaattcaggcaagagtcgaggaatcgcctttattgagtcagtcattctcatatgattacttttctcacatgatccaaccactaaaccaaagaaacatcttcctgctggttcaaacatttccctaatcaaacaggtttaaagccgccccaccgcaccaagccgctctccttcttcaccagtctcccttcccacactctaccaaactgctcaacatcgagctaaccactggtggcggaggagccggagagaaccgaaaggccaagatcaccaagaagaacgaagagatgaggaaagagctcggtatgggaggcgctttggcatccgctatggagaatggctctggaggcaaacgatcgagggacgatgcaggtgataatggatcgtatcctgcggtgtctggtaaagggtgggaggatggagaggaacgaagaaagaaggtcagaagaggtggaggaggtgaatcctccgaccggggtggaagg

SEQ ID NO: 619 - DNA, 73495 bp, Xanthophyllomyces dendrorhous
gaggtggaggtggaggcagaggtggaggtggaggaggtggaagaggtggaagaggtggtttcggttcaggcgccaacaggggtggtcagggagctgccccgatacggaagtggggagctactggtgctaattccgctcctcttggatagacatgacgtcttttgtccatgatctgtcaaacttcggtgtcaagataatcacgagagtacagtagtcatattatctcgcatcttttatacttattacagagccaaggaggagtatcgcaaggcattgattactatattatgagaaggaagaccattgaaccctgtcgatcttcagaaccctccaaatagatccattacgaccttgcccgccagttcttttcgctcgtcctcatcctctactttcatcaattcctctctgagtgctctgagcgagtgaaacgtactcgttaaatccgagtcctcaagttccccattctctggcggaggtttgaagcttgacgagacacttgacgacgttggaacgttcaaagacgagtttattagagagggcgtgaacgtatctgaaaactgacggtcttgaggagtgggatctgggcggagatgctgaggcggtagattgaacggatcgagggaagagctcgacgacatggtacgaattggtgacaagtccgaggaggggccagctaccgttgttgtcattgccggtatcgacgctagaaatgaggaagaatgttgatcgggaaacgactcccaattatcttcacggacatccattgctaggggttcggtggattgtttgaatttccagctgttagcctcatttccaccccgttcaaattcctcctccattcccatggccagttgtactgcgctctgaagttccccaaactcgtcgtcatccccggcggctggattgacaccatctccctcgagggagacataccctggttcgtctccatcaagaacctcctcatcagaatcggagaagaaagacttctcggcatcttcaagcgaaggcgattgagatggcaaccgattgagtgtcggcgggggagatagtccaagggagaaagaggtactagacatgtcggacaatgccgatgggcccgttgctttgagcgtaagtgaaggccaaatgtgagtttggagggtttgaagaatttgttcatggggaggtaaatctgttggggaccaagagtacagtgagatacgtgatcaaccatctagctttttggaacccatagcatagaagtacatactacgggcaacttcatcttcatctagaggagcacattcttcaatgacttcgatattttgctcatcgaatgcatgaacaagtttaggcggtagctcagtcagagatccatcggaggacgacgttcggattgctaaggaaacatcaggttcgttcgtctgaagaattgcttgaatctgaggaggaactccattgtatgcttcagtggttgatataacctgttggtaatatccatggtttctttgtcagcaagatataggaagaaacaaaacaaggcgcagatcaaatgaacagaacacacttcaggcaataaatatattagcaccgggatctcctcttcctcgtcgatctcccaactgacccctggttccccttgggcgactatcctaacgacgaaccagacatctgctgagtagtacttgttatcgatcttcaaagggacgtagtaaccatggtcttgatcacgactaaaagaagcgcgtgtcgaagcatgtgagagcaggcctgaagacgcgagtgcaagtgagtcaatcagacagacaaaacagaaacccgatcaatacgaggctgaagtatgatatgatatgaggaaacagaaaggtaacagagacgcttacgagtcagaaattctgttgcctgactctcagaatgggtatataccagtatcgagctctcaggtgtaggggtatccatgcttgacaacaaaggagctcaagagacgaggcactgagagatccaagatgacggtcggaggatggagagaaggtgagattgtgggtgtggaggaatgggcaggtatttcaacaaaaccccaattatgcccaagtcaaatgggctgatcgggggtggctcaggtcacgtgatccgtacgcgttcctcattaaacatacacgaccaaagctagacctcatcctatctcgtcctaactgaccatgtcttctttctagccgagcccagatagaaaggatccaaggagacggtgagtgtggattgtgttgtgtttggtgtggcttgataggtcgcattctttcttccgttcgctcacatctttgtttcagtgttcccaatccttcttcgtcgcgaccgcgtccagtcaagacatgcagcaggactccctacctcgaaccagatcgtctcaaaagcgtcatcgatctcaatcttcgtctcaagagaccaactttgaggaaaccttctcttacaaccaatcagaagtactcgttcctccccctgttgtccgggacaatggggtcttccaagctatagggtccagctcccagtctcagcggctccctcggaatatgtcgatagtcaatccttctcgaccatcttctacattgggtccaatacgctctaaaagcatggttccagaagttctgtaagcatgccagaaaatttgaacaaggtatagatggagaagccacttactccccttgtttccgcgatttgtagttctgccgctgtggacaaggaatctctgtcgaagtcgtcttacggatcgcagtcccaacctatctcatacgatcaaacgagtgtctacgatcaatcgctatctcaatgcattcattcattcgccagagacccaggagtacttcaagctctaggctataactcccaaattacccattcagatcataccatatatccatatagcgccccggccaacgttatctcggacgagacttttccacgaagccttttcaatcctgctctcgaagaaagcctccttgaactcgacacatcaatcactcaaggcttggagagtccatccaagtcaagccatcctccaagattacctagtccggctccaacgaattcagatcgtcaatcgtcagactctcctgccagtgtacccagtgcttttgctccttccactacacctcctcttctcccggatgatccttcccaaacaaaagacctccgatcacatgttctttcatcattcgtcggttttgacggaactcgatcgtatctttcgtcagactcaactgtttcgaaagacattactctggatgagagtggctggacagagggcagcgccggagctgagaacaaaatggagcgtggagaagaagaggaagactccgctgttttttacgagaaaacattcgatgcatccagttctctcaagggaactcaacaaacacaaaccaacgaatgggagaccacgccggcgagaacccaagtggacacccaagtagatcctcagaacgtcggaacagaatatcagcaagcactctctcctttaaagaaggggggttcttcgaagaaccgtattttcgagggttctctattggagagaagtgtagcggaggatcgagcaaagaggtcactcgtttcactcaacaagcgacgaaggattaattcaccaaaagactacgaatccaatccttttctcccgttgaagatacaaaaaaacgcgcccgttgctaacttccatcatgctctagatacccccaagcgtccagaacaatttcccgcaacatcgtccaaacagacgattgtgaccttacacgtacgctctcccggactcgccttgacgagcgaagatacgttcatcccagcgacctcatctccattgcatgtagactcgtattcccggtcgaacttgtcagagggcaatcacgagacgttcaattcttccgacgtagaagacgccacaaacctatctaagcccatgattcatcatccctcatcatcaggattctcttccagaccatcgacttggtcaagtgtgcttgacaagtctaaacctactggttcatctcatgtcaaagacctgcctcgatcgctgctagctgatgaagccgttcaaactcagtcaacattgtcttctcttccccccagctcactttccgtgcccgttcacactcaacctacatcattggttccatctttcatatattcctcgcccgataaagcagacatcagcgacaagggtggcaaggaggaggaagaagaagaacaacaacaacagaaggaggaagacgaatatgtttttggatcaactctccctcctcaacaacttgtgtccacccaatcttctgagctctccaacccacccccatcacgtgcagtaagcaaatcacaggtaacacagaacaaccaagggacactagaatcagacagcagtctcagtacgatccccagtgaaacagaatcatctctatccgaactattgactatagaagcggatcacgggatgaacagtggtcagagtgaagaaatgcgtgtcgatgaagacgttcaaatgcgaaggacacgtagtgctgataagaaggagaccgcgactgctagttcgctcataagaaccagacagcgaaccaaaggaaaacctgggctaccagatgctccaacagtatcatctcttactggttagtagtacttgtcgcgctcctgttcaatatctttttacaagatcttgattcagatctctcctctcgctggttagatccacctcactcgaaacgagttcaagattcagataggacgcttccaaattctcaaccacccaaacaatccatctccaatccgaccaccatcagaatgacacgatgcagaggtcaattgcgtctgggatctagatctgctagtcattcttcgagcttcaaggccaagcaatctaacgaaaaagacgatgactgtgccgacagcgaccagggagaagagggaagagacgacactatcgaatgcgcggatgatacggtgtggagaacagaaggattctcggcgacggctttatctatggccacagcgatgaccacaaggagcggaaatgctagaccgttatctgcgatgcctactattgatgttccgaggcgaacgcgactcgtttccagcgagtctagtcgactaagaaggacgtcaactgagcgtccatcagtagacgacttgcaactgcaacaactctttgcttcgggtagggtacagagagtatttggattgtacaaagattctggatcattctggccgttagttcatcctaagaaacagaaagctgatctgactgttgtcgacgctgcgctaatgtgtgtctttaaatttcttcatctatcacaacagagggatgatcgttgaagccagattctttggcgactaccttctaaattgggacgagccaaattcaaagccttcgaacatcaacattagagacctccgaaaatgcatgcttcgaaaaggagacgttgtttggtcaagctcaaatggagcacatcaattcattgttgccgaagactacgattctcccgaagggatcggtcccgatacagagatcagtgtgtctcttcctgatcaggtgctcgaaagaacactgagagggaaagtgactctaaagatgagggatatcgtgatagataggttgaatgtgcctcagatggacgatcgcaagctcttcacagaagacatgtacgttcaagaaccggcgttgttgactttccgaccacccgtcacacctagaaccaccatgcctgtttcgagctccaatccatcggcaacgggctcagggacagccagagcttcgtctcctattaaaaacactcgtcgaagcgggagcgtggacgacgtggctcgtccgaccaaaccgggatgtttcgcaggatatggcttcatcttcaccacacctacgttgaccgaaatcgaacggtcaaagattcaaaatacgatcgtcgaaaacggaggactcgtagggaacgacttccaaaatttctaccatgtcataaacagttcagacaccacgtcgattcaagaagaactcatatacagaaaggaaaggaaacaggacgatctaaaagcagtcttcgtattggcagagcaaccgtgtaggacaccaaaatatctgaaggcgttggctttgggtattccctgcttggcgacgagttatatccagaacgccgtatcaaatgtgagtgatatttcttgatagtatcaatcttgttcccgatgaattctcatgagccgctgttttctccgaatgatagggtgacggttggcgaggatacatgttgtccaccccattctcagagcacctcaaagcattcggttctcaacagtttgttcacccaagttggtcggtcgacagatccatcgttaagactctgatcttatcgacgccaagttatatacatcgaccgtttacgaatctgacaatgttgtatctgaaccctaagaagaatgaacgagtatgtatctcctttttgttttctttttattttctgactagagttcatggttgctgagggtcaatactctctgttcccttctaccacacgtgtaggaactagtcgtctttctttgtatagcactaggcgctaaatcgataactacaacttcggacttatctgatccttccctatcattcatatttaaatcgttcgatatcctggttgtcaaggatgacctcaaaccgtttccttcgagaacgacagtaggcaagaagagtgggaggttggagattgttaatgaagaatgggtgaaacaatgctcgatcgtcggtcaacaggttcgttcgtcgtctttgtgtggacctgttctctcgtcctacccatttttcctttccccctacaaaaatctgaccctttctgagatttactcctctgtctcttgcacatgggtgtgacttccaggtcaaacgtatgccgtggaaagtaacttcgaagaaatgaagagagaacaaaaactcaatcgtctatccgtctatccgtctatccgtctatccgtctatccgtctatccgtctatccgtctatccgtctatccgtctatccgtctatccgtctatccgtctatcctgtccccttcttcttctctcctttgctttctctttcgtttcttcttggttgtttccatttttgaaaacatgttatggatgggttgtatcattcttttcccttcatttgtacttgttctgttttagttttgttatccttcgttcttttctgtcctcttttctttcttttcagtctgggtctatagtcaataggcgaagctaagaaaatctaatcataacaaacaattccttcatgcaacgaatgaatggagaacgagccacaaatgtatattgaaacgaagaaaaaaagaaaagtcaaagacgaagagaagaagggagtaagggagcaggtaaaggattcatatggtagaagaaaagagaaaaaatctgattgatacatagacttgagaaatctttggtgcaaagaaaaggagtgttaaaccggaaagagatacaacgaagatgagacccagaaataagagatatgtagagaagaataaggaaggccaaacaaagcaaaagaaagaaagaagtcttcttaaacagcgacctcggtccgtttctcgtctaaaagttccatctcctgttctccatccttcttaccctcctccccttgctcttccaccacagctctccatttttgattgatcccaaccaaaagcgccttgatgagctcgatatgctttccagcttccagccctgccccagagagagtcgactgagactgggtggtctcgtcctcgttcaaaggtctgcttatagttatgggagaagcctgggtggaagaagaagacgaagcagctagtcgaagagtgtttaatcccccaacaatgtcttccgttccggatggtctcctcagatgaatatctttaagcggtcgagtgtccatcggtgcaattgagactctctctgattgggctggaattcgggagaaggaaggataaattgaagagatcgaaggaagcgtctgcgtccggggcgatgactgtttcgtctttgaggtggacgacaaagaggcaagaggaggaggggtggaggatttactgatcgtggatcgaagatcggagtaggcggtggtcgaccgtcggccagcatcgaacgatggggtggaagctcttgaggaaggcgaagccggcgaagccgatcggctatgcgatccatctcgagaggaaccatcatggtgagcggtcgcatcagatgaagcggcggatgagtcgatcgaatgctgtcgaggtcgatagggaggaagcaagtctgggttgttgatcgagggaagcttgagggattccgcttcgggataaccaaacggtccacccttcatggccacgtccgaaggagacctctcctcggccgagtctggttcatcctcagtcttactttgcttcttgatcgactttcgctcatgctcatccaccttggacgttgacagaggagctccggcctgtagaggctccattgctctatacgaccttaagtcacctccccaagaaggaacaagcccgacgctgacggatgctcctctaggtttggcgagcgaactgaacgaaagcgcaggatgggtaattccatcgaacaacgtgcttgagtcttctggcgaagaaccagcggtcacgccttcgccgacaatcgagagcggggaaagtccgtgcgaggaaggcggagagaaagcagtgtggtttgagaacgcgtctgaagaactgctggattggtagccagacgatctgtgctgaagcgaggcttggtgagacagatgaggcgatgagttcaaggaggaagagtccgtcgaatcgtaggaagactcggctgctctaggagaatcagcgttcaagtgggtagccgtctggaagagaggcgcgttttgaagcaaggtctgcataccaagcccagtctggtttgttccacggctgatggcggtcggggcagacccagatcgattctggttggaaggaagatgagcaatcggtcggtgggcatctgatcccactctgatagtcggctgttgagggtaaagcgacgagtaagactgctgttgctgctgctgctgctgctgctgctgctgttgctggtcgagattctgcgggtacaagttcaagtcagataacgacgggtacatcatctgctgtcgctgtggctggttgttcagggtctgccgctgatgaagactctgttgctgttgctggagcatctgtaactgcaatcggtggttttcgatttggtgctgcaactgcatgtcggcattcaataccccaggatccaaaccgggcatcccggtcagtcccagttctgccagcagggccgggtcaaactgctgtgctcccagtacgttcttggcgtcttcctctggtcgaggcccgccgactaaagccggctgctgatgctgctgctgctggtactgattgtttccgttctgtccttgtacggccatagcgccgactaggagattgaacaagaatgtattggtctgagcgacctcttcttcatttcggaactctgggatcaagcttggcggtgcctgggaaaacaagtccaagtagttctgattcgtttgattgaggtttgtcgagattggctgctgggactgaagagacttgtgctgggaggtcctgttcaaagcatgcggttcgcttgagtgatatgacgggacgtaagaaggcaaagcaccatttgtacccgacaacgatttgagttgagactgaacaagataggaagcattggcgggtaaaccggtagaaacagaggctcctccgtgctggttactcgtcaagttgcgagacaactcttccaatcggagcgccatgtctataagagaaaacagagggagaacaacttttagtctggtaacgaacccataggccagagactttcaggactcactttgatcgtatgtaggctcgacccgtctcttcttaacgtcatcaaaaaatccgtcaaactcgagtcctctcttctggccgaggaactgaggttgctgtccgtgtgctcctccatagccgtgcgttgcaaaagggtgactatcggaccggaggtagttttggttgaagggatgtacgagaggcccttgactaagagatccagggcccgtggaaggatagagattctgggcaaacggatagacctggttggggatttgagggtaagcgttcatggaggacaaaccgtccaacggaggtggagtcgtcaaagatgaggtggatgccgagttcggcgacagggaagacgagcttggagaagaaaagtctacagagaggcgttcgaatgagcctggaatcacgaagagaaaaaacatgagtaaggatgtaatagtacgtaccaggctgttggggatcctcggacagtcgcttcttcttttcaagactcggccttctcgaactagcagaaccagcactcgaacggcgttcctttgcagaagatccaaagtccggatcatctgcaacagccgccttggagtatttatggacggtgtgatgttcctgagtatggattcgctcatgctttttgagatcttgaggtcgcttgaacgtcttgttacagatctaaaagtgttcgaaacaaagagagtaggacgggatcgtgagcaacctgagaaaacaaaggagataagaacaggaaagatgaacagagacgaacggcacatgagtgtggcttcaaaggcgtatgaactgtggcaaagtggaagagttgtaaacagaggatgacatcagatctctgaacagaacaacagcggcagacgatggatggtagacagatgaagagaagggaacccatggcatagagggacgatgacgacgaacctcggaggtgagaagtgatgtgatcccgctttgcacacgtaatctcgcagcccttccaatgacaagtcagacagagattctgagtcgactttcgcccgatatgactgcgaacgtgtaatcaaagatgatttgtcagctgagaacgagagaacataatgaaacgaggaaaaggagacctactcgttgcagagatggttgtagagtgtttccggatctggtgcaattttggtgcaacctacccagaggcagaggtgagtgtcctgctgctgctgagtctgggtgtgagcctgtgactgctgttgctgcatcgaggcgagattaagaatgtgtgaatggagccgagcagggagaaagaagagagctgtctattaattgtactatgtgaacaggcgagtgagtgagtgagtgggttggtgagtatggtggtcgttatgtgttctcctcaaagacaagaagaggaaaaagggagcaagaaagagaaggagaagaagaaggcaacagaagaggatgtttcttaagaggaaaaaatggccaagccatcgccaaggaaagaaagtttggcttggctacggctcagctttgaaaggttaataattcagctgcctctcgtcagacgccgagcgaagtgttaatcaccgacgtcgccgccacatagctgaacagccgacatggtgtgcagcgaattcatatctgagatcacgtgactttgaggttcagctcaacctaccaaccgccttccagcacagacaacagatcgtcctcgtttcatgttattggacttggccttactgcgagatacagaggttttagccgatcgtctacgactatggaggcgattcttatcttttcacttcagtctattcttgtacttctcttcaagtgctttgaaggtcaaccgtgcgttcctagtgcgtcattttcatatcatcaccctcataattcttctcattattctccttcttctccttgcctcactcctggtttatccatctcggttccacactcaaatcaaggctccagtcgagtaggatccctggggaagagactcgatcgtcggatgtttccgagctggtggtttgaatcaacatgagagaacgtggtcagcgttgattctaaagagacaagagaagaagaaagcgaaacccacgttaaggtagaactgcacgattcgctcgagaccgaaaccagcaccggcatgagggggtgctccgaatcggaaagcatcaacgtaacccttcatcgaatccgggtcaacatccttctctctcatcttttgacacaagaactcagcgtcgtggattcgttgagcaccagagaggatctcctctcctctcatgaagaagtcatacgagtttgagtagttggggtcggttgcatccggcatggtgtagaacggtcggatagcgagggggaatttgtcaagaataaagtagtcggtctgatacttctctcgaaccagcgctccaagcttcttctcgttcgctgtgctgtacggagcaaagacagaaaaaatgggcaaatgcatgtaagaccaatgaatatgaagagcaaaaattaggacggaaagaagaccaacctaagatcgtcgtaatctcccagctcagatccatcctcgttcttaacattagcttccctcaacatggcgatagcctccttgaaatgcaacttgacagtcttctcggggatcaagaactcttcggtcgggaattgcgttcgaacggtagcgacctccttcgcgtacgtggtcttgagctctttgaaaaggtagaggagcaagctatcgagcaactcgaggacctcatggtagtgggattcaaaagccatctcgagatccaacccagtgaattcggtcaaatgtcggtgtgtgttcgagttctccgctcggaaaactatgtgtcgagagcagatgaatagataaatgagtgatctcagtagatatgcatacacaagcaaataaataggacctaccaggagcaatctcgaaaaccctctccatatcaccagcgatacacatctgtttggccaactggggcgactgagccaagaaggcgggtcctccaaagtactcgaccttgaaaacggaagcaccagactcagtggctgctccctgaagctttggagtgtgaatctcgataaacctctgcttggtgaggaactctcggaaacattgtccaacggccgactggatcttgaagatcgccaaattggtgtcggtctagagtatatgcggaaaagaggtgtgccgcgtcagcaataacaaaaaggaaaaggggcaggcccgcccaaggcctgtaacacagatgaagacaggtctcactctaaggtcaatcactcggttgttcaatcgagtcgcgagagatacgctcgcatactgcgagtcttctttctcatagtcggcagccgaccgggaagcatcagcatacaacatagggagcgtcgcagagacctcaaccatagtgtgaatctgatagccattgaaataagagataatcgatgcgttcagatccgattacgagacctgctgataggctttcctctctgctgtacataccttcctgataacaatttcggcgtccttcacactggctcctcggacctcctcaaagggcgccttgacgactccctcgacaaggacaatgctctcggtagggatcgatgccgcatactttagcatctgctttgacacctgatgtgggtcggaagcatccttcgaaagctccataagagcctggatggaagacgactgctgtcgaagcgaaaggaagaccatcttggatcctttgaagtgtgtttatcgtcggtgatgcagtcaagcgctagtcagaagttgaggtagagggaaagaaacgagaaaaacaaaagaaaaaggaagaaaactctcttaccctgggctcgagtagtggtgactctggctcggaagtagatggtctgtccgatgttggcctttgagatgtcggcgagctgggctcgctccctggtttctcgttcggccgactggtggagaggaagctttccgtagttttgcttagcaagatcctatttcagatgcaagaagatgggcaagcaagatgagcttcttttgcctcaaggataggtcaaaagatgttgagcaagaactgacgagatcgtccttctcctttcgcaacctggcctcctccttctctcgttcggcccgggcagcagctttggcagccttctcggcctccttagctcgcttcttaatttcgttcttggaaagaggctttccgtcctctctgtattgacgttgaccgatccgcgcgtaagattgttccagaccgaaggaggtagcagaacgaaagtagaaaacagggacaggataggatcagtatagagcggacgagattagaggagagaagatcaagggtctcacccaagaggaacatcaggcttggcttcaaccgcattgtcaatagcgggagcaggagtagtaggttgatcggacatgattaagaatgaatgtatgtgatgatggatatacgaagagaaaaattaaaaaaagaaagaaaaaagaaagccaagaaaaaagaacaggacagaacttagaggacagaagggaatatgatgcgtttacgagtcatagggttacggcgtaaatgcgtgacgttgtgacgttgtaaccaggtgcagctccatgaccactcaacctttaggcttaacaatcttagaccgaccgtgcccgagctcgactcggctggttggctgcggatgctgacgacaccgggaccataagggcccggcgacggcttggctgtgccctggaagagacgtcctgaccgtgtcgccttggctgcgtgaaacaatttgtgcgtgtgcgcaagtgtgggtgcgggcggcccgtgtatgtgtatatgatcctgacatgttcctgatcaggtcgttacctttttgctccttctttcccgttcctggtattctctttatttttaagttcgccgtgcctcatctacaccatcctgtcccctcttctacctctaccacccatctatccctatcgccatctctcctagcctcttcctgttagagaatggtcgccatcagtccatctcgcgaggtgctcgaattggtcaatccgcagatcacagcaacatcatcatcatcatcatcttctcctcggtcaggtcttcgtcatcataaatcactcacccagattctcgctcaacaacccaaagagagcgagatcaaaccggaggctgtcagagtctcttccgcatatctgcccaagccagcgtggtacaagaaggcctattggaaactctggtcggatggtggccgtcagcttgagaaagaccgtgggtcgcgcacagaacaagaacgtcaggccgaaagagacctcgtcagacaatgcgggacgtgggcaagagaaggatccggtgtagatccttcagacttgttccttgatgtgagtctgtccgtcttgagttgcttggtaccaaggcatgaggcagcaacctctcccgtattttcccttcttcacttgccggctgagctatggacggaatactggaacggaagcgagagacttgggaggttcatccaacgacctggcacatactgacgagagtcttttgtcatataaatagatctatggctctgttctccagacgctcaacacagacccaagagtcggcctcgtctctccctccctgttaggtgtcaccgggactgtaccgctcaccgtgatctctctgtaggtgcttatctctctatctctttcgtcacgtcaacatacgtccaaagttcaattcgctcacactccttgtctatgtgtgtgtgcagtatcccggacatcatcgcccatcatgctacgcttattacaaaggcacaacacgaagtccttctgtttacaaactattggcagccgtctaacagccagcgctcaatctgccaggctctcaagaccctttccggcaggcttggcaaagagatcactgagggcacccgtaaaggggacaaaaagataattgtaaaacttgtctatgacagaggtaccattagacaggtagatgctacaattcttcttctccgtcgttcttgatctcctttgtattcgtttgataattgcgtctaactctcttcacccatattttgcgttggcctacagttcatcaatcgacattcacccgtaccaccctcgctgtggccatctatcgatctgcctttacccgatgaaattcccaacctagatatgcaaggtaggagctcatatctactcagtttccaaatgatctttcaatgtacccctcactgactgatctcatacacgcgcgtgcgaacgtgtcacaatttccagtcctcaattatcatcgacctctcgtcggaacgtttcactcgaaattcctcgtcgtcgatcggtcggcagccatcctgtgcagtaacaatattcaggaccgaccaaatctggagatgatggttcatcttgaaggagaaattgtccagtcgctctacgataccgcgcttatctcgtttgcctcgacgctcaagccaacgcttcctctgcttagtctgcccccaccgacgctacccgacatcgaccggatgctgtttcaggaaaaaaacccctggctgagtgaaatacccttagtgggtgcagcagaggcagctaggcgattgatccggctgttgcacaagcagcagtctaaagacgaagaacagagaaaacgagaaaatgctccagagagaggtcggatgagaaatgtggtaagagggatgattgagcgaggtgtcgaggaaccagtcaaggagagcggaccgaactggttagaagagattgccgaagctgttgctaggcctatcgcctccagggcaaatagtagagcaaatagtagaggccccagtagaagaggcagtttcgattgtgtgtccaaactttctatctttttctccctttcttctgtcgcccccctcattgccactgacagatcgattccggtcaatttcttgcctaaatgtgatacagtccgacgatcacttccccagggcccccttggccaaacacatccacatcaacacactcacaaagatactcttcccgacctcactctcgacactgtgatctcaaatgctgcttcgcctccagtaaccactcggagccctgtcttctccgaaccattcggagctccttctcctacaaccgtcactaccgataccaccgttgtcggacatgccccggcgatcacttcgtctgatcaagtggcatctccagccgaactcgcccctccgcttcctcttccactcctgtctgactcattgtcttccaactccttccacaccacatccatctctcaagacgcccaccccgcggatagtccgagcacgccagatttgcttacgccagcagaatcggtagtagatgctccgtatgtctcagctattatcaacaagggagatggacaccagcagaccgtcgacgaacacgtacatccacgcgcagagggtgtaaggtttgcaaatgatggcgaagaaggcatgatcgataggtcctcgaatttagcagtcgggacagatgcatcgaacaaggagatcaacgcgttggcgataaacactggagcgggagataagaagaagttgaacaggttggagaagatgagtgaaaagctgagtgagtcggttcagctttcgactcgtgcgataatgagaaacaaagtactgatcgtgtgacctgccgcttctgacctttagacgccggtgtactttcagagcctaaacctactgtcgaggattctgacgcaatcgatcgtaaggagttttcttccttgaaatcactcatctgaagtttcattctccttatacacgacgttaacatttttgactcctttcaccttgtacattcatggttccgttcacgaagaatttatgcctcatatattccatgatcaacaccgacctgtaccaatgtgtcttgtcaatcgaggtcctcgaggggtaggttcttttcctctatatacacctttcaacgactatcatctgagccctttactcgtttcaatctcaattctccccatagttacctggtcaccaaaatctacgaacgccacagaatgctgcctggctcggcgccttcaggtttgcgcggaaaaaaatctttatccagaccccgactttcaatgcaaggccggcggtggaggctgcgctcgatgcctgccgaagaggaatagaggtgacgctctacctgggtctcgggttcaacgataaaggagaatctgtcagtacccttccattttcttctttcttttattcatctcagtcacgcacagatcctgacttccgttgtttcccatgtgtagatcccgttccaaggaggaacaaatcaagaagttgccataaggatgtatagacagcttaacaaagaaagaaaggcagaactcctgaagatcttctggtacgttggcaaggaccagagtcggccattgaatgcggccatcaaacagcgtaactgccatatcaaactctgtattgttgacgaccacgtcgggatgtgtggaaacgggtcagtgattttatccgctaccttcttatctattcctcttcatttctgcatatattgtaaaatcaagaaacaaagaatgagactgacaagacggtgtcatgcgctttctcttttttggtcatggtggttacggtcaatgtggaatgtaacagcaaccaagacacccagagttggttccactctcaagaagttaacgtcctcatcgattccgctcagatatgctcagactggatgcaagcgttaacatataatcaaaacacacacctgtacggacgacttgatgcaaaggatgggatttggagagatgagaagggtaggacggtagaagacttggatagactaaaacaggcttctgaatgaagtgttcactctcgtttctttactttctcttgtattgccactattcgaacacgcgtctcatgcgatgctttcttatcctctttcgtttttatgtaattccttctctatacacaccatatacactggcttctaccttcactctcttcgcttttttttatcttatcattgtcattatcgatttgtctctccgttcttatctttcctatacggctcaaacactcaaaaggtcacatacgtcacacagtagccttcctttccatacgtctcccaagcttctcggttttgaattccgaatcacaagctctgtctctatcgtttttcgctctaaccccggcataacaacctctttctatcctctcttctgtaaagatacacgtctcgttttgtagaagcgcaacgccggcttccctcacttccgaatgaagacattcacccaagtgatcagacaatactacaaattcgattgaagagagcgttacttgtagatatacatgttgtggatgagaaaagagaaaagcagacgtgatgaaaccgatgtacacatatgaatagaatgtattttgatacacgaaagaagaaattgcagaagtcaagacatcagagatgagaaagagtagaaaaggttgaagacatacttaaggtgaaccataaaaccaagaggcaggaaggaagagacaaaagaggataaggcagaaggcagatacgctcagaatgatgtctcttcaagttcacgttgaacaacatcctcaatcgtcatcccatgtttcccatagcctttccattcatgtttagccactgttcctccaaacttctcgtcccacgccgatgacatcatctctggtttataggggtgccagctgtgatgtttgttgtgaagtaatcaaagcaaacaaagaagggttgcatgagtcagaaggatcttcttgctttgaagcacgcacagaggaaatgaggttgaagtctgaaagaaagaaacgtacgagacatcccgaacacaacgtgacgtcgatctatttcctctgaatgaatttccgttccattcactatccgctctagatggatcggcataatactcgtttttggtgccatctaccaaaggcgaggattgaaagcgatcgagaacttgcgctacccggccatcgaggttccaaatctattgagcgtatacgtgatgatgtacaagatagaatcagatagatatctatcttgcttcgacaaagaaagtagacaaaggataaacaaaacatacgtgaatcctaccgtcggttgaccctgagtagatatattgttgaccggttgtgttctctggggaaaaatgacatctgatcagtgtttgcacgaccgaatgtcctcggtaggtctggtcaaaccggaaagagagaaaatcacgatttagtcttgaagaatcatcctttgatatatacggtcattctgttgagtaagacaccataccatgatactacaatctccaggcgcagattgaaatcttggtttgggatacgctcctcgtctataatcccaaccggttccgtacttagatgccgcatcagggacattgtcgcatacagaggcaggagccatcgaacgaaggtcccaaagcttcaaagtttggtctttgccattcgatatgatgtatcgaccatctcctttagcagagaccgaagtgatcccttcagtatgaccgacaaagacaccagacggctttccagatgagagtgaccgtcgatccctgtaagaaagggcgggaaacatgttcagactgagagcaaacataacatcgtgaaagatcaaataaatgaacagagaaataaacgcttaccagactttaacatatccatcgtctccagacgaacaaagcaaatgcttgctacctttgtccgcccagcagacgctgttgacgtcatcttgatgtgcatgaacattcatggtcggttttttggcctcgatatcatatactagaagatttgatggctcatcaaaaggttagcaaagtagaacaatgtatgacatattgatgaaggacgaaccgacgatctttccatctccttgatattcgccactagcacccgcaaatatctcctttccgtcagccgagaacctgacagaccagatctaaataggtattgatgcaaaggtcaaccacatgtagcacaacattcaagtggaagagtacagaccgagacataatacatacccgaacgtaagaattcgctgctctcgagcgagaattcgtgctggagctgaaatcgagagactcaatctgtgtatcagaatctaatgggcggaacatttgcaccacaggtgactgccgatacagagaaagcagatctgaatgaggttatggttgacaaggcatgcatgataaaacaatagtagaacacaccatcgaggagtaaatcatccattcatcgtttgcgcctaggtctgcatcggtgactgtgtggatgttcaagatgatgatgagcttataaagatcacgcttgatagaaaggtcgaagatgatattcactcgtccaccctacatgagtcccttggaatcgtttcaagatcttcaaagagctctctccactacggccccgaatgccttcgtcacgatcatcgtcatatgttcctctgtgcgtcatcggtcttcttgaaaaccgactactaattggtggaggaggtggtcgaacgaacgggccagtggtaattgaaggggttgtggctgagtacagagtgagtttgaaatctaacaccatgaggaactcaagtcaaggaattaataactaatctgtggccacaaatgattcatgaactgagaaggagaaagattgtatgaccaaccccgagtagcggtatagaaaaattcggaattcgccgagtattgaccgcaataaggagcttcggttagattagctaccactgtcccagccgtgtttggaatacattcctgttttgaacaaggataagcgtcgttattattccgagcatcagagcctaacttgaaggatgaaccgcaccttgccaaaggtcgtcttgtgaaccttgcccatagatctctctcgaccccagacaagacctcctagtccttccttacttctgctacactctttcagccttccgactccaccaaactcgcccccgaaccttagcttcaacccttctttattgggctcggttttctgtccaaatgagttggaagtgatgtccggatcatcggcctcggagtaatatacatccacgtcgtcctcatctgttccttcgaaatcgtcgtcctcatcctcgttgtagtcagcgggggagccaaatatcgtattcaagttgataggtgcgccggtggatgcagcgttggaaactatcactcgaatgcgatcaatgatcccggtaggaacttgtcctgacgcagcactttgacgaagcgctgtcgcagaatttttgaagtaaacagtttagagaagcctaagagactgaacgttaggagatgatgcatgtactgaccagtcaagaatctaagcattgatgaactgttagatggtgtatttccgtccgactctgatcgcgcggcagctctcgtttccgatgtagttgctgatcgaacggtctgcccagtttcttcttcgtcttcatcttctgctctgttctccgaatcgatcaactccctcatcagcactccaaatgattctcctccctcgtcgtcttcgtcatcctcatcgcggttcctaccactccgcctactgcgagccaacaggtcacccacatcgtcatcatcatctaaaatccctctggcctctgcatcgatgagcgctctgaacatgacatcgtctggatccatgtctacgtctacgtcgacctcatcttcataatcagcatcgtcgtcttcatcatagaattcgtcgtcttcgtctccaccattgggtgtccagtcttctgtagcagtatgtgggatcggaggaagatagctctcgtctgccggcgataaggaccgcgataccgaactagatgccatgtttttctttactgaatcgatccgatctacagacggatcagaatcaggagcttactgatgttataaagagttaagagtctgctgtacaagcaaggatgagatgatggaagtggagggtgctagatatcgagagatggtcagttttatcggcgatcggatatcgccagttcgaaagtggaggtttccctgattagccccgactgaccccagatttgcccaaacataatcttaattgactaaaccatcaatattcgttcgcatacaactaacacactcgatcatagacaaacacaagactagacaaaagataacaacagatgacgacaggaaatcccagaagacaggatgacctgcagtaggaatacaacgacgacaaaaagtagaagaacgcatcacgaaagatcgctgtcgaaggaaagagggttctataccctggcctttgcccacaaggcagtcagcgccatccaggaggtgatcacactagaggatgaatagggattcagaatcagtactatgaatagcctgagagagaagaagagtagatagatgaagtggatgcattacccaatagctccgaccgtgccatcttgcagctcgacgagacccaagttcgaggcaggaatgaaggctatacgaaaggacgtcaccagatgattgaagacatgttaaatccaagagacattccattcttttgtaaacccggatcaacaagagacgaaccatcaagagagtcctgaacgatctgagtgaacaaagcggatctttgtctaccagatgtaaagaagcacagaaggatataataaactatttagtgtgtacatctccctctgaagtctgtgagagaggttacttacgcaaccaaggcctttgatctggctccatctcccttctcgttatcgaccgtcaagcttgctctcttggcctcctttcggaccttgacgaccccagcagcgcttgagatcaagctgagcaagattccagcaagccagaaccgctgagacacctttgaggtccgagcaaacttgtcaggatttaaattgaggaactttataccctgaaggtaaacaaccgaatcggtagtcaagtatccactaagacattgggaaggcacttggaaaattcagtatctcctccgtgcgctgcatatctatctatcagaaaggaccacttacgcgtaggcgacctgtcgagcaacttgagcgattcgctcaatctcggcagctttcccggcggaactagaaagattcgcgctgaagaagtagagaacaatgatcacgatatcgaagactagttagactacctcttcactctttacgggcgccaaagcagatattctttatcgtacgggggggcttgagttgctttgatagcgagctgactaaaattccgaatcagcagatagatagtcaaatcaccgtttcagcataaattctgacccatatccacgaaacatgaagcataagaaacttacaggtgctcaacaggtttgaaaacccgcatgactttgtgtcaattgcgatcaaagtcattgggtaaacctcaagtcagaaatgggcaaatggatggactcgcccggcgaaagaattctttccaaatgagtagaaacagatgccccgcttacgttttcttccgactgtaagaccacctttcagtccggtccatctgatggcaccctccttatcaccttgcctgagtaggtaccaggcgacgattctagcaaagtattgaatcaatcggtatagctatgtccaatcaaagaatgaatagagccaagtcgtcagcgaccgttatggagtgagtgaaacagacatggaagcatcttgctcactttgtctcgaccgacagtggtggagagtactttgagcgactgtgtcacctggggatgaaggatcagctgagcggggtacaacgcgagagacctatagacaaaagaagaaagagagattgatcaacagagacacacggctgaggctcgaacgagtctcatacatatcatcaaggcaacgcaggatactcacgacatggtagaagtatagttagctaaactgcagctctgagatacggaactgatgtaagtgagagacacaagagttgattgtagttgctctgtaaaagaatgtccgaagatggagcacaaagcacgcacagaccggcttgtggttacccgactgtcacgtgatgtcctgaccaagttttcctcacctctcccagaacaacttcacagcccttttcgttcggttcacacttttcaacactcacccttcctgcctttcggacacatccaacccttatctctctacgtccctcttccaggcctcgtcctttgttgtgttttgcaaacagggtcttacgacagaatttaaacacctagactgataacaatcaccatgtccgataacgaggagaactacggaaacgagtacgactattttctttgttcttgtgtccttcttgttgcggtgtatctttcgtcaagtacaaagagtttgaccgcaacaagtggattgagcctttatcatgtggctaactcacactctatcacatgatgccccgtctgcttcccttatgatcggtttggactgtaaagtcatgatgagcagatggtatgttccatgtacgcgcctgagttcgtactgtcttggtaatgatcatggctgaacctttgttctgttgacttggtcgggacattcaataggaggaggacgctgtgaacgagtatcaagatgatggagtcgatggaggtgaggatgaggctggagatgagaacgaggatcgagaccaggttcgtccattcgaattgctctacattgccgactcactggtacttacatatccaccatcttcaacttgtcacggttcaggctcattccacgcgaccaggaagtcaaagcaaacctaatgagaagcgagtgacgtctcactacatgaccaagtatgaacgagcaagaattctcggtactcgagctcttcaaattaggttggtcaccttgttttaacttcatgtccttcagagcttcagctctatgacattctctctttttccgtactgcataccttgtgtcgtttctttaaactccaaatcttaagctcacaaggactgatactgatatcttttgtggctttgtgattttatcagtatgaacgctcccgtgcttgtgccgctgaatggggagtcggaccctctcgatattgctatcaaagagcttgccgcaaagaagattccgttagtcgttcgacgatatttaccaggttcgttctttatattcttattctttttatactgtccggtctcggtgctatttcttttggcaaatggttctaactcgtacggtgtatcttctctatattgtcatcatccacaaactttagatggttcatttgaggactggcgagtggatgagctcatcaccgataactagatttcatcgtgtcttcccctccctccaccttcatctcttcccactatcacatcataaaaaacttcagaacccacacggtacattcaatatttctttcccagtcttgacgtttgtctgcgacgacaaaaaagacagctctatatccttactgaagagcgtctctcttccttcaggtactttttctttcatttctccctttgcgccgtgctatttcgaggatcatatatataggtcctttttgtttccctcctctttcttctcctttgcatatataacggaacaatcgggaatcgagcggatcgatttagctatcagaaacaaacgatcaacagcaactttcccaatcgagaaaggtcgtaaagatcatgatagatgatgacaatcgacagagtacatgatacagactgggaaaactagatcactagagatggggaacaggaactgcgaagaacgtacatatgtgcgtgagagagcaagagaggagggtctagaaacaatgggtagggtgaagcaggaatagaagaaaaaaaatcatgataacgagattgagactgattcattcgatgtcatcgctattactcctccaagattctctctttcgcttgcttcgatgcactctccacagcctcagtcacattgtccgcatgcgctcgttcttttaccttctctctcgccttctgttcctcctcttgtttctttatattaaccttctgttcctccaccagccttgccttcctctcttcttcctctttctgctttctatccttctgcatttgttctttctgcctcctctcctcctcgagtagcaccatcttggctttctccttctcttcctctaccagcctttccaactcagcctccagttgttcctcgtccacgccatcactagtacctccagcagcagcctctctcgctccaatcccaccaagcgagatggcttgttcgatctcggcatggtctgccaaagtgtccgccatggaatccatagtacgctccacattctcatgggaaagtgttggatcggctagaagagttgacaacgtctgggtcgaggtctggtaaactttgagaatctgattcaagaaggtttatcgcgaaaagaagagggaaagaaggatgattatgtctgaacagcgcgttccaaatgacagagaagagcatacatccaggttggctcaggacaaggttgaaaagaacgaacctcaatatcaccagcagctgtctcaattttcagcaacacgccctggacggtttctagactgctcagccgtttcaagacgagttcctccaacgacttctttgagcgcagatacgacattgctaccgtcttttggttctttcttaatgcctctttgacttggttagctcgtctgatcaacaaagttttgatgaaaatacacacacacaaaaggacaagagatttaagcatcagtttcaaatcgcggatgtcctgcaatatttccagatgcagagaggaacgtactcggtgattcgaatatccaattcatccatttgagattttaatcgagcaacagtagtcgccatttcaagcacaccgtggtcaaccgaggtgattggttccggcggagcagctgtcggatcaaacttgataacctgagtaccatcatgatcaagcacacgaatcaaaagattagaatctacgtctaaaggttagacgtcattaccagaaccggcacagagctcaccgagccatctctaagcaggacttgacggtctcgttctaagaatttaatcaacacggacatctcctcctcagaaagtaccactcctgggagacaacgagaagcaaacgcttgggtgaaggacgtgagggaaaacagaacgtcggtgatagatgaatgaggaattgtctggaagtaggcgactaggttggaggctgctttctggaaagacatatacgaatgatttcccagacagggaaagaagaataccacataagcgcctgaatcgaagagcaacaggatgagttgcagttgcgctcacctcgagcgtcgccttcagtacatatttgcctttaattctgctccaaacctgtccggatgtacctcgcgagatcgcaggttctgttccgaccaagctcatctgttgtagaccccaccagagcggacgggcgatcagggcggaggctatccgataagggatcgaagagaccgcgtatatcgaagtgggactcgagaggaaggtgtttagtggatagacagtctgagacgtcaccagctcggccttcctcatatacgaacacatacgagatggcttcgtttagcttgaaggcaacaataaggagtcgaaaatgacgcagcatagataagacgtacgacgacacaacccagtccacttggtctcttcccatcctccaactttagagcatccaaaagatcttcgccgactgtcaataacaacgcctgaggaccggacccggtatccgaaggcaagaggccttgctcgctcgctccctctaaaaccgacttccaccatgaaagattggccgagaaaccatgtgggttggactgcttttgagaagaaaagtctgcatagagtgaggatagacgagctttcgacaccgtgttgtaagcgggaagggtgatgatgggcttgcttgtatatgcaacagactcaggtctaacagatgaaggaggggaataagatgccggcataggaatactttatgtggtaggtgttcgggcttcaggaaagcgttatcgaagacgatgcttgtagtctgctgatgatgatgatgacgacaaggaagggaagcatgcaagcataggtaaagaactaaggggaaatcactacaaaattagacaagacgtgaatagaaaatccgaagtcaatcaatagaaacttgaatcgttttgttgcctcgctggaaggatcgtgattgacgtttgatcgttctctgacttccatctctctccttcattcacttttcttattctcttcttcctttcacacatctactcctctgtgcttggactgttacatcactatctaaacatattaacaatctaacatgtcgtcttcagcagctcccaggaaacaggagagagatttcagtaaggaggttaaagctctcattcctcaggtcacagagctggcaaaggtacggatctcttgctcacacacattccacggtcatccttgaagaaactcatttatatcttgtttaaatggtatacttgaacaattaatagaacaatcaacttcaagaagctgtcgataaactcttagttcttgagaagcaaactcgtaacgtgagtcagcctacttcacgaggtgacctccacatcaccaacttcttttgactgatgcagtctctatccgaatatattgtaggcttcggatctggcttccacttctaccatcctcactactatccccaatctatgctacaaggcttccaattacggcctcctcggatcctctgtcgttcttcttgccaaacgacacggtcaacttaaggaagctgttgtcaagatgatggatgaggtactgggttacctgccagcaatcaaagagaaggaaggagttgagcagtggttagagttgattaagacgttccgaggtgtgactgaaggaaaggtcagttgaaatatgtttaacttgcagacatgtagatcacggtcgggctgatgcgtttgacatatgttggatttctttgtaaagattcaccttgagcttcctcgagctcgtctgactgtccttttatctaagcatcacgagcttcttgcccagactgctccaccgccgtcaactgaaagtgagttgatcacagcagacccaattttgactagactccagctgattctcttccgctcggtcttcaagcctccaccgtttctgctaccgctcccaagtcgacgacttcttcgtcggaacctgagaaagagaaggagcctgtcagctcgaaagagcaccttgatcgggcggctgatttgctgagtgagcttcaggtcgagacatatagtagtatggagcgaagggagaagaccgagttgtgagtcgttaatcatcgtgaatgaggtagacagcgaacgacgggggactgcaatgcgttccgaaagctaaccgagttggttgaaactctagtattctggagcagatgcgtctggagagccaaagaggaaactggactcgagtccgggttggaggccggaaaatcaaccgagctcacttgaaagaggatggctacactgtgggtttgaaattttatgagaccatgttttgtctgagagggtttgtgctgattgccttcttctggtctctaaactctgacaggatctgaagcttaagttctacagtctgatcatcgcgttggctttggaggaagatgcatttttggatgcttgcaaggcctaccaggaggtctatgacaccgatgaggttaagaacgatgaggccaaggcgaaagaggtaagtgacacttttgaggttgattcatgcacatgaagctggacgagtgtcgtctgatgttcccgttcatgtttgggtttcctctttgaccaggcgctcgaaatggtcgcgtactttgtgatcctcgcggtgtacgacaacgagcagtcggacatgcttcacaaacttttccatgacaagaagatggaaaaagttgctctccagcagttggttctctttcctttattgctcacatgtacacgcgacttttgtttcaatctgattaatctttgaaaatctctatcttcgtattcgacagtgagcttctcaagagtttcactactagggagcttatgcgatggcctgggatcgagacgttgtacggaccgactttgagggcgtccagtgtgttttctgccaacgataagaagggtgaatctcgatgggaggtacttcacaacagagtgatcgaacatgtttgtccttcgtttttctttctctttggaaggaggaatagtcgggaacagaattttgatagactgaccgaccgagggaaacttctgttctttggctcgacagaacatccgagtggtcgcagagtactacactcgaataacaattggccgacttgccgagttgttggacttaccggaggagcggacagaattggtgctgtgccggttggtcgttgccaagacggtgtacgcaaggattgatcggttggccggcgtgatcatctttgatgcaaagaagagcggagatgatgtgttgaacgagtggagtggtaatctggaaaagatggtaagtcgctctagaaataagaggagggtacggcggaaaggattgcaaaagctgactgaccgtggaatactctcttttccatctcaagttgggcctgatcgagaaaacgagccatttgattaacaaggtatggaaactttcgatggttttatgttcttataaggcaatatagggcgcaagatgtagactgatgatgtccttttttttcttttttctcctctcttcttctgtaggagtatgctgtgcacgctgcaaaggtgatttccaagtagacacgtgatcgtattaatgtttcttcgatatgtaatcaaaatgatgacaagaaatagtgatgaatcacattcggatgagtatgttggttgtgtaggggttgcggaatatgtgttgaaggaggatcggcttatcaaggaagattgcatacgtttgcttagtgtttagttatcagaggcggagagagcaggctgaaggagacacagtaggacacgtacgagagaaagagaagagatttttaaaatggccggttagttaatttctacggtgttttagacacagacaaaacaaagaacagatctctccttctgaagcgcagtgagataaacaaacactctcaagttgttttctttcgttctttttgttgcttttcttctgttttccttacttttctgttcatctatctctcaattttctcgaggatcatgaaaaatcgaaagaatgaaatgtcgatctgtttgtgtattaacggatgaagatgtgtgtccacatgtttacttgtgtgtttaagaatcgaatcggacgaaagtgaaattcaaagagacggccgacattggagctgaatgggaatcggcgggttgaacgagacagaataaacaaggatttccctccgaaactgattgaaaggcacgccaagtcaaagagattgatggtagatggaaaggagaactcacgcaagccagtgatcgaccgggtcggcctcaattgagatttggtgatcgaatgaaaggatcgagagagttgaaagtgagctcgattcttgcgtctcaaagtgattctcttttccctatgtcttgatcatcactcttgaacaagtgaagtgggagggtgagtgagtgagtgagtgagtgggctgcatgatgtacgcaaaggcagatagctctgtgataaatacgaaacgctctggttccggaagcgagttgatctattaacgatcgagaattcatattgccaaatgtctagaccccactttaattagtccgttcctttgcggcctctgatcgaaattactatcctttttttcttggaaccgctgaaatggatgctttgaccgttgaagcgcttggatctttcagagacaggaaagcacatatagcatacagaatacattcacactcgttctcactcagactcacacaaggaccactaaggccacatcatatagcatatctgatcgaatttaatctaatgccaacgactcacacactttaatacataccttgacacacccacacatacgcatatacagactcctatcggtacaaatatcatcggttcgtgtcccttgtttcggtttcctctttcccttcctctttttctttctcttcttcgaccaccagttctgtcggttcttttttcgtctcttacctttctttctatctactcttgcttctccatctacatctttcatcctctgtacctttacttctccctctgtcacccctcacttttcttcaagacagatacgcaatcattatccctagaatgccgtacgtcaagatcaactcaaataccgggacacagaacatctattacaacatctcgacgccaacagaggccagcgccgatcagatcgatcccacaaggccgaccgtgctgtttctccatccgatctttatcgcttctgaaatttttcatcgtcagtcccctccccttcctcttttcctgtcgtgcctgttggatgtcaacccatcgacaacaccgctttcagccgtccgtccgtccattcatgctcaaccgacgttacgtccctcctctgtcaaccattctctctaaacagcccagttcacagatcctttgcttcgaaaatttaacctggtcgcgctcgactctcgattacacggcctgagtgaaggagtcctaggatcctccttcaccttcttcgttcgtgtcccttggtctacagtcaaatcactcatgtttccatttcaggccccatactcagttcttcgaccattttcccatacatacaggatgccgcggatgatatcaataactttacgaacgccctacagttgcccccggtgatcatcgttggtgtctccatgggttcatctattgctctacactttgcaacaaagtattcctcaaaagtccttggtctatttttgatcagtccactaaccgcttgggaggtgagtgaccgtgcctgaactctcttctccatcacccaaatccatggctatatgcgcatcatctgacatgcccttgtttccttggatcgatatcagcctgaagatggtgggtactatatccgactctacactgtccattttcgcattgttttttcttttgttgcacagtgctgaagtcattgatctttcctcccaaaaccagtcgccatcggccgtagagagatttgggaactctggaaggaaggcatagagatgaatgatgcagatctgaccgagcaggctatctcgggtgcccttcagctcggattcaacggacagacaacggagactaccgaaaggtaagataccatccatccctcaattatatgagcgcatatatgctcttagctaaagataaatctgcatgcttcatgatgaaccgtcaggatgctggcttcgagtatctcacactccatgaacaactggagcactgaacaaggagtaagtttccgtccccttgcttcgaaccctcaatcggccttctatctttcttaagctcaatttcttgaccggtttcttcttctcaatcctaatttcatgaaccgtcagattaaagacctcaagacaatttctgttgacttttttgccgaccgtaaacctttaccgctcaacgtactctccagcattcaatgccctctccagatgatccatgctggagcagatgtggcatacagtctggaagatttattggaaaagaagaaggactttgatgatgccggtctcaagactaacattgtaaccatccctagggcttctcatgtacgtctctttgatatcctctatttactcggccttaattcttatcctctttctctttttactctttcctctttcttataattggatatatcgaccaaacagtttgccaacgttatacatgccgaaaagtcagtaatcatgatatcacttgtgtaaaaaaagatctccgtcatgtttcatgtggctgatgtttattcatccacctttccgtccgaagaatcaatcctcttctctcggactttgtagcggcaaacgcatcgctcgaaacaccggcagaattaactcatcttgtcatctctcctttcgatcatttattcgaaactgagccagatgaggctgacgacgattattagtaacaggctttggcgtgtcctaaagttctcgcacctgattcttattctcttccgaattgctcttgatttttctttcagcatcatgaaacttcaactctacgacaccataccatatgataccataccatattctcctacgcataccatcacctcaactcttgctagactacttcatcttccttccaagttgtgcgatgtattttctgttttttctcaggaaatgcttcgtatctattcaaggaaatccactcgcccgctctatttatcttgacagtgtgttgtatatgtttgctccttttctccttcttgttcattgaaacgacttcatcctcttagtgttatcgtgtacacgtcttaatatgttgccccttctttccccaatatttttgtatcagtgtcttggatcacttcctgtggttttgaacgcatcagattccataactataaactacagaaagaacagactgttcaccctttgaagcaaaagcaaaagagaaacccaaagacaggaagagaaaggagaagagaaaagacagcctcctagaaaaatccatcctctctctctctatgccagaccaagtccggatcttaacgagactaataaatcaaaggccgatgtgtctccatggatatcccaaacgttgaccccgcccagcccggcctggagagcgaactgggctttgagcgagagcgaatcaggatcgtcataagtgatcacttggccggatgctgaagaacgaaggaaaggagtggatgaacaggcatcccatgaccgggtaaatccaccggcggcgatccatttcttggtggtactggaccagacgagagcaccttgagcaatcaaatcgttgaacatgatttgaccatccaccgcttttaagaggaagacgaggaggatcagaaaaggagagaagcttcagctggtgacccaaggggaaagagagaaagagagagggacaaacatcctccagcatcgttgtagagcgtgacggtagtagatcgtttgctcgaccaagctctcttcctgtggtctttcctcaaccctttcttcatacttgccttcctcgccaatgatgactttcgaaggagttgcccatgaggatctctcttggccccaccggcaaagtttatccagtttccgatatcaccaacagacgaaagctgcgcgcctccacgtcgtcgttcctttcgacgttcgacgagggtcgtagctgtggacgtggagatgtaaccataagcagcggtggcaaggacgatctggttgacagggaaaccggcggtcgaccatgacttcacagcggcgtatgcgtttgctaaaggttgaagagagtttccacagccgtcggacaagggggcgttaggtccaggagtgcttgatgcttttgggattagaggaaaagggacaaagaaaaacgtcaaagttagataagttcttcttctttcctcccgcacacgcatcaaaaaagatcagtaagatacaactcacaaccccagacactgtaaaaggtttgagtgaagattcagggacccgtaagtcagcgcgagagatagaaaatatccagagagagaggaatcaagatatcacaacatactcgtagaccatgatcgaaatccaatcaagtacggcggcgaacgccttgacgtcactcaatgggttaccatctgtccccgtgaacggccagacctgagtggccgccgtgatttttgccgacgctgggagagcgtttctcagaagttgaaggaagattaagaagttgccggtatcggcagcggcgacgatgttaccagattgcccgggtgtcgaaggatactcccaatcgatatcgattccatctagattgtactggttgtacagtgtgaccatctttgcaacgagcgcggttcgagcgtcggcagtggcgacagatcgagagaaataggtcgaaccagaccaaccgccgatactgagcttaactttctttccagcggcatgaccagccttcactgctcgggttactaaatttctccaatagtggaatcccaagacgccgttagtggcgcgcatataagtcttagaccacgtgaaaaaaagacgcacatagaccggtagaactcgagtcggtgaagacaatgttcaagtctgagtcaacaacggcgaaagctgttcattttgagaatagtgtaagatgatatgttcctaaatggacaattccaaggaaatgccgttctcattagaatcaacaaacatgaaagcaacacttgccgaaatcaatccaatcaactttggtccagtcaatctgttcaggagtcatcgacacccagtctggataatatgctgctactatcggttttgaagatccagttccaaccgtcgatgtcgaagtagccgccgccgtcgcgctcgatgccttggctgtcgtcgtcgttgacgtcgtctttgccaacgccgttgcagctgcgttaagggagactttggtgccggtagaaatcgcagtggtggatgcagctgcttgccaatatacggtctgggtgacggtcgcctctacggtgattgtagtggtggccgctgccgctcggggatggactctacctagaacggaggaggccagcaggagggagggaacgagaacttgagtgaaggaaaacatgtttgttttggtatttattcttatatgtgtaactgtgggagcttgagaggaaattaagctttttcgtagggggtcggatagtaaggatggattataggatggaggagaggtatcgcacaaactaccagagtttgtttcgggagaaagagagaagaagggttgataaatgagagtgaacgctagcctgagcgatgttgagtaggttgtttataaggaatggaagccgtctgtcaaagactagctgttatgggaaatggatggagaaagagggggaagaggagggaggaggctagagtttaagtagtagagacggcatgttgaggtatcgatccattgtacaaaacgggtagaccgttgggaagcatcagacaaagacgggagtcagcttccaagactatcacgaaaacaatctacagctcatttcatccgcgcctcccgttgaatttgacactaaggcatagtagcggagaggcagtgatcttggacgtacctgtgagagattagccgaagtagaaagagaaaccctcagagaaaaggttagggactaatcaatctacacaaacatacacaaacaatagtaatctaacttacagatggaggtcgatggtagaaaagaaaaagacacgaaaaggaagagaacaaactgtaagactgagacccgagaataacaagaacgaagaaggtgagcacgacaaagtagaaagtcggccaacaagcggcgcaggatgacgtaaccacgttctcactcatcagcagctcagagctactttctccgttatgagctgcagatcaaatgagaacgaacgagaacagtctaatctggtggaagagttagtcgagaaccatatgtcgtagtataactcttcttacggctcttggctcggtgtctcttgctcgtctttcctatctcgaacgacgagaatacatcaatcccgtactatcttccctcgctcttctatcacatcgattagtgaatcgagtgaacagtactgcattggcgctagcacaacttccagaagagccgtctggtcttcttgtcttcgataagcttcatatcttacattttattatcatcagacctctgaagagactgacgagtacgaaaagactcttcgtctaggatgcaagaattagcggcgttttttcggctatcctaataaccctaacatcaaccattgccgttttgataaccttcactcggttccatctcatccacatccttggatgaatggatcgatggcttgacgatgaatccgtcaacagtacgaacatctcctgtacctatcggagatgtaactcctccagttgtgtcgtctccatcttcctggacacccccaaagaagatctctggtagatccgtcggattggatcgtatgcaactcctgtccctcacaacgcctttgaccgttctatcttaccgaaagatacatatccatctgacatctttcgtctccattcgccttgtctaattctgatctcttgcgtgtgaataggtcagactatacctagtcaattattgcaaacctctcaacatgccagattagcgacacccaacgagtgagtaggtgcttccgtcatctaggccgacttgggctcccatgctgctgtcaacgaatgatctatatcgaccggagggaatgagaaaaatgaatcaaattcgctaacagatcttgtgggtctccatctttgaatttgttctttacctcctacttagcactcagatctttatatgcattcatcgaggtatgttttgttcctcccctgacggcaagtttctcatcgtattgctcaacgattttcatcttcttcccatgcctatccatttgtaaaaacgaaatttattatggatcaggttgcaataagctctttccctcgctcccgaaacttcaagcgcaccagactcaagttcatcgtgagggagacgttcccagagacactctcacatggttcgaccctgaagcagacgcaaagctcgacgaacaggaccggttggcagaaatcgatcgaagagcagaggccgccaggagaagtttcttacctttgggcagcgggggtggatagataaccctttgttttgacgttcctttccgtacttctttctctcatatttctagattttggcttgcatctaaccattgtacatctacacatgaatacagttatgccccatctttcctcttcatgctttcaagctacataggcgacgcaaacaaaatctagaaagcacaggagacgaggaatgatcagaatctcaaacgtgaatcaagtaggagagagagaagcctcgaagaggaaaaaaggacaaacagcgctgggcgtcagatccaactctttcaacgtcttctcgaaatcacctggcccaaacgtcctgttgggaaatctggtcgagagcaaaatcgagcccacgttgaacgagagagactctgaggcgagccattcggacacctcagtcagttttgccgtggagggcaaggtctttgtcaatggaggacccccggtcgagagtcgagcctgggcaagcaaaagtaggaactcaattttccggacacgatatactagacgagggtggtcgaccgaaaagaggcctgttctcacctgaagtctcgtctctggataatcacgcccagcagccggcttaccggcagcgacagtggcggctgctggtgcccctcgactaacatcaacccctcctgcctgttgagccggtacctttccttccctcaacgccttctccctggctgttcgttccgcccgagctttcttatcctcttcaatctgcgctttaatggcggctcgtgctttggcatctgcatctttctctgtattcgatatcataggccgagaaagaggatggtccgtcagatcgactgtgatcgttcataagagttgacggttagacacaacagactgacctctttttcgctccagcgcttctttgttggcctgcttgagctgtaagttttctttgatgtccaaagactcctaggttgcagacaaatcgtccgatcggaaaaggtgagtaaaaaactaggttgacggatatagctaaaacagacacttgcctttccagctttgcgacgaagagcctcgttggcctgcggccattgaatgtaatcatagtccggtcaacagagtacgtttgttgagccacggaatgcaagacgtttgtacataccttgttatcaatcgcttcctgcttggccttaacagcctatgtgttcatagagaatttgagaagcgtaagtcttatgtggtttggatgcgcttggttgagagagcttgttgaacgacttacccgcttagcagccatcttttcacgaagttcctctaggcgagcctttttctcctcctcggtcaaaggcttgatttcttcagtactttcctcgactatcagacacaagacatttgggtgcatgcattcagtgacgtaagctaacgtttagatcaatatacacacaacccaaagggaacatacacgatgtgtgaccgctcttctctgcatgaaaattggcaagagcagtatttttgaagatcttatcacactattcttccaaagaaagaagctcaaaagagatcagtctcctaggtccgccgatacccagggcaacgttgagatagcagcaactgacctcggtgcatttgatgctctgatcaagttatgggcaggatcaatccgtcagatttataggattcctctgtaagatgtacaaaacaggcaaaccttagcgtcctgtccagcttctatagctttggcttcctcctcatcctcttcatctgcctcctctggtgccggaacggcattgtccatgttggccaaaatatggtccatcgcaggctgaatgataccggccagagtaagcaacgtatccttgttatcatcaaagcgacataagatggcatacctgtagaccggagttttgggttgctttcaaagcccctatagagaagacgtcatgtacaaggtgtttgagagatcagcgttcgtcacgccaactgccagtgtggccaggagataatcggatacggagaaacgagacatacaatcaatacgagtctcttcgaagcccatggaaagtagttgggatttatcagacattgttatagacagatagagcagtgagtcagagatctatacggatggtgttcgctggacgggatggatgaaggaacgatcgagatggaactgcagatattgatgatttcatcgtagtaattccattagaacggtttgtagtcgcttgagcgaaatttccctaatgttcttccatcacgcattcaagctcttacacaatgttcatctcatgtcatcaccacctcattcaaaccattgatggttctgttgatgaatcgaagattaaattatgtccctgcttcttgattggggcgcttattatcgtagagtgatattttgaatacatggcctgtaatcataacatggtttcttggtgtagtggctatcacacttgctttacatctgtaacacgcaattggtcgccagttcgatcctggcagagaccatttctttttgtgggtgaaacaagttttatgttcttgaatctttcctttgtgcagcttgctatgttgtctaccagttctgtggtgttgtctctgattccctatcagaattcagcatgaaagggagagtgaaaggcataaacgaatgagtgatgacaatcactttttgtgaatgacccaagaagagatctgggcatctgcatagtcagactcaatttccagagcgctctcctgctttgttgttcacagcaactgtccttcttgtgattgagaaacaaaagaagagagagaggaatgtagatcatccaaaggcgaaggagaaaacgcgctgaaacgacacgatttctttccagacgcgtcagctctgaaaagttcaatctcatctcttcatctcatcatccgaatcatatagcccatggctcctgtcggcctttctaatcctgcctcgaaacatgggaaggaggcaacactgagggaactagttggcttgattcgttcgattttgacagatccagcatgttattggtacctcgccggcttgctggctataggagaacttatcttgggaggactgatcatcagatttgttccctgtaagtcttagtcttatcttcaatcttgaatctgacctcgacaagaacagtactgatgtcgttttctctttcctttgaaccgtcttgtcggcaagcagatacagaaattgattacaaagcttacatggagcaggttggtggattcctgggtggagagcgagactactccaagttggaaggtgggaccggtcccttagtgtgcgttcagctttctcgccagttgctcttgacaacttatgcgtggcccttggtaggttgcttgtggaacgagtctgacaaggattcacgtatcaacatcaaaaccaactcaaccggacagttacccagctcttcacctgtacatctacactctcctctcccaccttccgtcgcatccacaagccctgctagcctctctctttccacctgaaatccatcctcacctccttcctcagttaatctttctcgcactctacctaggccaattcttgctcaccgcattggtatacaaaaaagctcgaatgccgcaatatgcacttattccgctcacgctcagcaaacgagcgcacagcatctacatgctcagactgtttggcgacccctgggccgtcggtctagtctgggcatctatctggctatttcagaagagccgatggaatctcggaactttagtcttcaggtctgtatattcttcgtgtatgcgaccgaggtcgaatcatcgagaaactcttgaaatactcatacatcactgcttccggaattctacttcagtctggcgctaggagtcaagatgaacattctgctgtatattcccggtcttttagttctctactggaaagctcttggtccgctcggaatgatctcaaatgccgtcaaaataggactcgtccaggttagtcctttcatctccaaatatcatttcggctaggtctgatactgacctgtgtcgcccttataccacaaccctttccgttatgatcagatccttcttcctctgcccttcttcctccgatcacaccctcgtcaatacctgacgtccgcctttgatttctctcgttcattcctctacaaatggacagtcaactggcggttcgttcctgaatcgaccttcctctccagagaattccatgtcgggctcatggctgtccagctggtcgtattggctggtttcggatggcgatggtgtaggtcagaacatggaggtgcgatcggtgtcttacggagagggttgagccggcggaaaggcaatactgtcggccgatcgatcgaaggcagaggtccgtctgttttccctcaagtcatcggtttatagtctgattgtcccaacttagatccatcttttctgacacgatgttgtatcgtctttatcggctttgcgccgtctctagagatcgtggcgatcatgtttacgtccaatctgatcggcatggtcttcgctcgttcacttcactatcaattccaatcctggtactttcaccaaatcccactcttgctcgcgttgacagcatatccgctgcctatcaagtatgcctcacctactctttcattccgcaacgttctttacctttgtatcaaagcatgttgactagatccgtgtttcttttgataaaaacgaatattaaagggccgtgctctttgccatgacagaatatggttggtcgctctatccatcaagtgacatctcttccgcaaccttgatcgctgcccatatcatggttctcctcggcatttggataaacgatgccgaaggtcgggctccttcgctcccaccgtcgttatctcagagtagagctccagcgattacagagataaaggggaagaaggaacgttgatgaactcttagttatataaaataaaataaaataatagacatatatctatatatgatatgtatcgtaaacattcaagcggcgcaaccgcgaagaggaatatggcatcatacttatggatgaatgttgatggttatctacaggtcaaaggattttaataaactgacatgtaagtatatgtttccttaagacacgaaattgccgaatttgcaaaatgtaggttttctctaaaacacttacgtctttctcgaatacctttaaaaccctagagacttccttccggcttaagtcttctctatagcacatctcttggacacttgtcctgccgttgaagtattgacatatcctataggcgcacaaaagtatcagaaccaaccggggcaagtcagattaatcgaccaggggattaaagaatgctcagaaccaatatcactaacttgaggaagattgcagcatcatctacatcatggtctttacaaatcgcttgaatccatgccttttcctatccgatccgaaagccaaaagaaagaaagaaagaaagaaggggaagagcgttccagacggataacgttcagtgaaacgtattcgagtaatggcagagacagaagatcgcgcaaaagttggttacacacctgaccgaaacactcggctggatttttgatgatcgtgtcctcgagatcatcgaacaatgttttcaacaactcgtgtcccagttctggatcttcatcatctgcatctgcattcgtattttcgtccgagcttgcatctgaatcattgttgttgtcgtgttgttcgtcgtcgtcgttgtcgttgcgttttctacgaggacgggatctgtcgatttgcattcgacgggctagtctaaagaattgatagacaaggagaaacgaatgataagaacgagaattctagtgaagagatacagatggtgaaaacatactctttgatttcccgccgagctatcaaccgaactctgacaggtgcacccacgaccatatctctccgtcctgtatacaaacaatagaacgaaccggtcagatgctatctatggtgagttgatcttgcaaaaagcaaacataagcttggggattgaatactgactgagccataagagcgcctcgtaatagattcttttcatggtactatctttcggaaaagggtttattgatgcatacgctacaggcgcggccgagatccgactgaggaatcccaagagaggagctagttgggggaaggttaaatcaaagtcttcttttatttgtttgaatctaaagacaaggagaaagagggcgcgacagatgagaatatgatgaaattcaacattggaagcgaaggacttgtcatagatgaaaccgactaactcttttccttgatctgagcacatcatcgcgaatcaggagaatgtattaatctttggctattcatgtccgatacggagtctcgatcgatatagaaactgattgaaacttacttgtgcaagggaaataaacgtttcgagttcctggcttgacagggtagatgattttcgccttccgctaaatgtacacacatacacacaccattagtctcataccagtcgagtgaattgtgaaaaaaaaatattaaaaaattcagcacttgccttccaaacgagaattttggccatgggatacagatctcgctcgagatcaacctgaaggtcaacaaactgcggaagtcgagcgatatcagccagacttgagattgcgaagaccgatgattgacaagcaacggaaaacgattagcgcccgttccgtttcgcgattgagagcagaacaagaggaaggttatattgttacctgagactaggcttgatagcatctaggaacattgaaaataagggaaaggcttcctcctctgagcccaaatctccatcccctatgtcttctttctgatctccggttctgatagaaggattccttgaaccgttcatcagatcattttggtccatcgccgtcatcgtcgaacctaaccctaatgtaggacctcctagtatcgttgaattctctgtgctacctgaccctcggtcgttccgacttccccttcggtctaaacaactccatcccatactactcgctgctctggatcttcctccagacgatgccttgtcccatcgatcaaagggctccgcttgatcttcccaggccaccttactattaaccctagacgaatgtccagagaatggaggagatgacgacccaggttcgtctaacaagaggagtcctttccaaggggcgaggttagacgagctagtgtttccggaagcgccgatggtaagatcgtaaccctggtcttgatcatctcgaatagaatcctcccaccagatccaatccatgtccaccgatggaagaggaagaggaagttgaacataaagtgggagagaggcaatcttgacagttgtggcaaaagggaagtactttatcgcttcgtagacttgtttgagcgctcgtgcgagtggagatatttggagagcttgttggagatacatttcgaaagggatttcttgagttatgtacatttcgaaacggaaataggtcaatttctgatatgtcgaacatgagtgataccaagtagatggacttcaacatttcaggaaacacagcgactcactatctacatgttcacatttttctttcaaaacccgaagatccctcgattgcttcgccacccagttatcactcacctgagcatcgtaaagcgccgccgttagtttgaagatgacctctttgtagagcgcgctcaatttggagtttggtaacgactgacgacctcttgctgatgtacttggcatatcaaccacgacgactacatggaagtgattaatatacggaggtccatcaacgtcgacatcagcgttaccactattcgaaatcaaaccagtaggaatgattgtattgtctgcgtgagatttgaattgacgaatggatgatcggacggcccacggatctgtcgaagtcgaggccgaggttgaactatttgtcggtcgcgtttcaagcagggaggtaggcgtaagggaagatccctcctggacatcttccaaggtggttgttgaaggtgcagtcccaatggagaaattcgccgaagaactcatcgatgctgggacagccgatgtttgctgctcactgggaacacctgggcccggagcagtcccgcttctggatcctttcgaccgtcccctcccgagctctgccacagagccaccacttgtacttggtttgatggaaccattcatatcctcctcattcattgcccagctcccttctgctccgtttcctctcctcatcggatgcccgatgaagcatagatcatcgacaactaactcgaacctttgttgacataactccaactttggggtgagcatgcttgcgagaaaatcaatcgggaaatccagataacgctcgtaatcttctttcttgtacgacgagcttggaagtgttgaggcagatggagggactgatggtcgtccggtaggaggaggcgaatttgtcaagtgggttgagtgcgtgtttggcgtgtcctgcttgaatgcatgtaggggatcatggggcggcagtgcccgaagagatatagctggtgacggacgaggcagagaagggtgaagaggcagatgcggaagcggatgataagggtgggcaggatgaacagatgacgagcgagagtttggcccagatgatgatcggggttggcgagaggatcgttctgcgagaaggggatcaagatcctcgtcgtcctcggaggaactcgcttcagaatccgtcgaaggtctgtacatcatctcagccgtccgagatcatacagcacaaagggtcatgttgagtatcaaagaccttgagccctatgcctttgaaggacggggttgatgagagtaaggcgtgagttctcaccgctgctttcctgtccattggcttccaccccttctatcatcgactccagcatgaaagctataagtgttgctcctcaaccgtcttaccggttttggaggccatcggaaataactgacgtctctgaaagatgatgaggtgatgaggataacagctatcggagtaagaatactgttgtccgacttgtcacgtttcttcatgttgaagaagattgcaatcgcagtgggcgatggtgatggtgatggtgatggtgatggtgatgggtttcgtgtacgaagaaaaagacgcgacatttcatctcaaattgatgattattaacattcttattgtttcactacttcttgcgttcgacatgctcaaagactagaatggggagagcatcatgggatacagtcttcgttgttgaaatgaaccctaaaacatctgtgtccgagccgaaaggtagaagcatatgagctcaagctcaatccaacctctcttccctcgagcttctcatctttcccactccgtccctcaatcgactctccaaactgagctcctttccaaaaaacacctgagactccatccccttgacgacgtccgccttaattccagacttcttctgtctttctctggcagcgagctcagcttcggccgccaaacgatcttgttctcgaatggaagcaactcgagaggtccgagacgattcttcgtaaattcgagccacaagaagtaaaggaatgatagtagtgagtacaacctgtcccaggccgtttccgaagataatatggagagaagaaaaagctcacccatctcttgagcgtttcccatcatggccgctaatctcgcggctcgatcctcatctggcttgctcttcacctcggctgtggatgatgctgccgatccatcagctggccttgctgtcctagacacttctccggtctcccgacgatcatggaatgatgctgctgaaggccttgaatggctttgcgacagatttggacgagagaaagacgaagaacgtccttggccgttggaaggcggaggaggatagggctgagatctgtgtgaagagggagggggagaccgtcgtgatgggggggatcttcgatcaattcttaaattgtctcgatcgtcacctctccttcgctcgtatcgaactggcgacctatcgtcccgtcttctaccatcgcttctgtttcgatcccgagactcgtacagcctgtctcgagagtctctttcggcatatgatgacggaggcgatagcggacgtgtatggtgacgcactgagtcccttcctccttttggacttctacttcgacttcggtctcgatctctcctttctccgcttccagagtatctgtcctctcgttctttatctctctccctgtcccttcgatctggcggcccacgaagatcactgcgaatatcatcacgatctcttgacctgtcccggtcatcgtgcctagatgaactggagttcttgtttgcccggcgttcctcctttttggcccgcttctcttccttctcccgtcgtttctcctcctttcgctcctccttcagtccagccttctctcgaagttgcttcaaacgaagcggatttgacatgagcgcctggtaggctgcctgttcctgttgtttgatggcgagaagaggatcctctcgaatcttggcggctgtgtctcgggcggtattggcattctgaatagctgtgaactgttccttctcagccgcgaccttagtagagaacagcatgttagtttacaagaagatactctgtttctaaaacaacaacaatctagacaaacacacctttttttcttcgtctcccttgagaatctgatcaactcgcttctttcccagcaagtagtcctctaattcctcccccttgatgcctccacctgaggcgggtgtggcgtacatccaatcgagtttatcaacctttttctttccggtctgcatctcctgcattcgctgaagctcctgaagctgtctttcctcgtcccgctccttcatgagctgcttgagctttctgtcctcatccgcctggtaaacatttaagatattgaacgcgtagagggatgtatgagtatacacgcgagccgatagccgaagaaacccaaacgaatcagaaagcgttgctctcgagaccaaccttctttttctcaaccttccagacccgctcctattgacgaaggatgcaaacacatatagtagcggatcagcaagtggatattgcgaatactactgagattacgagaagaaactccaagagaggcttacttgattcgagatcaagacctaagcggaggtaaccaggagaaggcgagcaccggtacaggccgatatagagcggtcagtatcgctcacacagactggaataaagacacgatcaccaaggagaacataccgggtgccaggactttttcctgtgatcatagacgagcggtgaacagacggtctgcaatcagctgaggtatcaccgacaacgcgaagaaaggccaaacaaaggcaaaaaaacagacacacatgtttagatctcctccacccatcttggatcaatatgctatgctgtttagaagtaaaagtacgggtgtatgcgaccagaagaacaggatggtggatggaagtgaccaggcaggatggagagtgatggtgaggaagcgtgcgaaagagaaagtcgcttagtcagcagaaaacaatcccaatctttccgttttcaccttctctgccttttcttcctttcgacttgaccttctacctttcccatcgaccgtcggcctcgttgtctctctgtgtcttgctccctgtttcttgttggaaaaaagggtcaaaggtgagtggagtcgagtttcgttttattgcttattcctttttggttcttcagagtcgactcgacaagaatgtttacttggatctctctcgccttttctttttttcccttgaaacgcgtccggttcgatcagcagcaatcttgtgttcttggtcggactacatcctcctctctctttctctctgccctttggcctatctgctccgtcttccattctcgttccttttcccttcctgtcacaccttcgcgttcgacttggacctggccttggtcaaaagcaatcaatatagaagatggacgacagtaggtttttctctgcttccatagacgtggcgaatggctttgagcatttcatcttgactgatgctacttctacaccctcttgcctcccgcttcagttgacgaaaaaccttacgcagactccccgcatggatccgatgacgcctatggccatccgaatcatccggacggggctgatgagtacggctacgacgaagaagaagaggatgaagactacatcacccaggaggatgcgtggacggtcatcacctcgttctttgacgataaaggacttgttacccaacaactcgagagtttcaatgagttcgtcgaaaattccatgcaggaattggtcgatgaggaaggaagcttgacgttggatcagtacgatcagcataccggattgggtggagacgaaacagttcgtcatatctttctttgtgtctcctccaccttctttcttcgcctactctttgtgtgtcttataaaggacaggagacaccataagtggcaaaagtttcatccatgcgatgcggtgatcttttgccactgtatgaaacgcgtcgttgttttcgttttgtgatctcgaacttctccttttccttagcttttcacttacaaacccgttttgctccgatcgaaacagcgtcgatatgagatttcgtttggtcagatctatctgtcgaagacaacgatgaccgagtcggacggaacggtcaatgcaatgttcccccaagaagctcgtcttcggaacttaacgtgagcttaccttctgtccccagctgacaaagcgaaaaccacgcaaatgagtacaaccaagacttacgtccaagacgggcggccatcaatgctctacaggtattcggctccgctatatgtagatatgaagaagtcggtgtacagagctccatcagacgaagacccgatcgaggctgtgtgggagcacgatgaggaggaggaggaggatagcaagattttgatcggcaaggtctgtgtcgaccaaatgatgatgcttcttcacgcatagacgaatgagtattgatcgaaattttctccctggtttcttagatcccgatcatgcttcgatcgaatttctgtctgctgcacgagttggaggccgagtttcagtatgagttgaacgagtgtcccctggatcaggtctgtgtctttttgaactaatatctatccccaaactctcgagtgtctgacgctttatcacattctgctccaaacaatttcaatgttaatgcatctctagggaggatacttcatcatcaatggttccgaaaaagtgcttatcgcacaggagcgaatggcggcgaaccacatctacgtgtttgccaaagcccagccctcgcctatcaacttcttggccgagatcaggagtatggtcgagaaaggtggcaaggccatctcgatgctccaagtcaagatgtaccatcgtggtcaggagaagacggtaaattccacttgcgttcttctccgttgctagactagtcttggagctgacaaccgagcgatgatcaccacagaacggaaacacgatcaaggcaacattaccctatatccgaacggatattcctgtcgtcatcgtcttccgagcgcttggaattgtgccggatcgagaagtactcgagcatatctgctacgatcaaaacgataccgccatgctcgacatgctcaagccctgtatcgaggaagctttcgttgttcaggatcgagaggtccgttcttttctctatctgcgtgtgctccttttcactcagagtcgaggctaacttgccacccgatcctcatcttcttgcttctctcatcaccacaggtcgcgcttgactttatcggtcgaagaggaacggccactatgttgactaaagataagcgtcttcggtacgcaaacgagatccttcagaaagagatgctccctcatatctcgaccgacgaaggtttcgaaaccaagaaggcatacttcttcggctacatgattcatcgactactattggctgcattggagaggagagagttggacgaccgagatcatttcggaaaaaagagattggatttggccggtccattgttggccgggttattcagaatgttgtttaaaaagttgacaaaagacgtatatagatatctgcaaaaggtttgttcgcttgtctttcttctcttttattttgcgtcgagtgccgattttctgggttcctaatgaacatccaatcctttctttgtttacagtgtgtcgagaccaggaaaccattcaagctagactcagctgttcgctcagccactatcaccaatggtctcaaatactcactcgctactggtaattggggagatcaaaagaaggccatgcaagctcgagcgggagtgtcccaggtgctcaaccgatacacctttgcctcgacattgtctcatcttcgacgatgtaacactcccatcggtcgagacggaaagatcgccaagcctcgacagcttcacaacacccattggggtatggtctgccctgcagaaacgccggaaggtcaggcttgtgggctggtcaagaatttggcactcatgtcatatatctctgtcgggtcttatgctgctcccattcaagagttcttggacgagtggggcctggaaacgctggaagaatacgcatccgctccctcggccacgaaagtgtttgtcaatggagtttgggtcggaatccatcgagacgcaaacgagctttcgaaacatttggtaaaacttcgacggtgtgcagatatcaagtcggaagtcagtatcgttcgagacataagagagaaggagttgcggttgtacaccgatgccggtcgggtttgtcgtccattgtttgtcgtccaagaggatgaccagaagttggcattgacgaaggacgatgtgaaccgattggcggcaacaaaagaagacgattcaatcacaccagagcacgaagacttctactcatggaaccatctgctcgaggagggaaagatcgagttactggatgctgaggaggaagaaacagtgatgatcgcgatgacgccggatgatctagcagccgctcggtcagcagctgacgcagaagatatgagaaacagagagttggagaggatccagaaggagaccggtggtttgtcgttcgatatggcaggcagagtcaagagttcatcgttctcgcatacgttcacgcattgtgagattcatccaagtatgatccttggaatctgtgccagtatcattcctttccccgatcacaaccaggtatgtttcgttctcttcccactcctcgccttgtgttttctttctcttcgtcgtcgtcgctaaagccaaacgactgctcttctcgtttgcgcgattagtcccctcgaaatacgtatcaatcggcaatgggaaagcaggcaatgggagtatacttgaccaactaccaaattcgaatggacaccatggccaacattttgtacgtctttcttgttggcaaagcaggtcattttcaactcatttctcataattgcgtcttttgctcggtgaaaccaaactcaacaggtactatcctcaaaagccgttggcaacgacccgatcgatggagtaccttaagttcagagaactgcctgccggtcaaaacgcgattgttgctattctttgttactctggttacaatcaggaagattccgtcatcatgaatcagagctctatcgatcgtgggttgttccgatcgatgtactaccgagcttaccaggtgggttgcttctcttcgtttctttccttcgttctttcttgcatcagcatttgcagaatacttgctgacaacgacaatatcgaattattgttgacttttggggagttcaggacgtagagaagagagtgggtatgcaagtccttgaagagttcgagaaacctactagagacaacactctcaagatgaagcacggcacgtacgagaagctcgacccggatggtctgatcagtccgggtgtgggtgtgaagggagaagatattgtgattggaaagaccgcgcccttgccccaggatagtgaagagcttggtcaacgattggaaacccatacggttcgttgattatcttctctattcactaagttcgtcgggtttctgttgaagagctaaccaagattgccctgggacgttctagaaacgagatgtatcgacacctctaaagtcgaccgagcagggaatcgtcgatcaggtgttggtcacaaccaacggagatggcgccaaatttgtcaagatcaggatcagatcaacccgagttccccagattggagacaagtttgcctctcgtcacggtcagaagggtacaatcggtatcacctaccgacaagaagacatgcctttcaccgcggagggtatcactcccgatatcatcattaacccgcatgctattccctctcgaatgacaatcggacatttggttgagtgtctgcttagtaagttggcgacgttgttgggtacagagggtgatgctacgcctttcaccgatttgacggtcgaagccgtgtcggcacggttacgaagcaaaggatatcagtccagagggtatgtctttttagttttgttatcatctctcgctatgaatatcttaatgttgcagtaactcatcgaacatatgcttggtgggtttcgtttgtagtttggaggtcatgtatcacggccataccggtcgaaagttgcaagcacaggtctatcttggaccgacatactaccaggtaaagtctgctgatcaggtttctttccaacatagataccgggcactgataattgtatcctctgtcttttgttttgcatacagcgtcttaagcacatggtgaacgataagatccatgctcgagcacgaggtccggttcagatcttgacgagacagcctgtggagggtaggagtcgagacggaggattgcgattcggagagatggaggtacgtctttgtcatcaattttgtagtaaagcttttcagccaataactctgtgtttctgtttgatcagcgtgattgcatgatcgcacatggaattgccaacttccttcgggagaggctctttgatgcatccgacgggtatgcctctttctcttccttctttgtctcgtttgctggcattctgattcattggttaatcttcatcatgatcgataattacagttaccgaattcatgtgtgcgacatctgtggaatggcagctaccgcccagctcaaaaagcagatgttcgagtgtgtacgtattaagatgtctttttctcatcaagatccgaaagctccaagtcctgacctattgttttgttctgggttggggttctctctgtgtaggctcactgtcggaacaagacagaagtgtctcaagttcatttgccttatgctgccaagttgcttttccaagaggttcgtttgtcatcttctttattgtattgaatcagtcgacccgatgactaaatttggtgtttaacttttcctcttgggggtgttttgatgatcaaatagcttcaagccatgaacatcgctactgtgagttatccgcctttacttttcctctcagatcgccaaatctatcgattccaaacacatactgactctaactattatttcttccttgtctacttttcttgatcgtagcgattggtcaccgcatgatggattgcgttcttctgtttcttattgatatacaacccattcatcctttccttcctcacgtccttgcgtctttcgttccattcttggttacacccgccttttctttgtataacatgatctttcatatatatatcgctctctctctctctctctctcgcatggccagattttaacgtggtgcatacactgcatcaagagactgtgaactgattggaagaagcgataggggttttatgtgtctgagttttcaggcgcttggggtgactaatttatattggcgaatgttccaaagtaaaggtatatgtacaatgtacgcatttctccgttctttcgttcatccgttcattcaatcgaccgagtctcttatctcctccatctgcatcacttcttagactcaactaattgaaagaagacggagagaaaaagggaaagaggaggaagaagatcctgatcatgttttcaaactgatttaagcagactgggtctcaccaccactcaaagcggcctgcaaagcctccaacatttgcttctcttcctcaccaccgacggtctctccagcttgagggatctcttcggccgctgcttcttcagcctcagccttgatctcggcctcggcctcgacctcagccacgagatcagccacagtctcgacggcgacgtcgcctccctcggtctccttaacgtcgacctcctcagcagaagcgttcacatcctcgtagtcctcatccttgtcctctgacgaagcggccggcgtggactcggtctcctcagaaaggttcaatccggaagctggagcgggggcggaaggcgcaggcgcagaggtcttttcctcggcggcagtggcagcggcgatagcggcagcgagagcatcaacggcagggttggaagtggacgattgggaaatgttggcggaggaaagggtgttggagatggcgatgagttcacgaagggtttcgaacactgggggaaggacggtcttggcctgcaaggaggataaggtgaaagaggaggaaagacaagtcagtttgagcgcgacggatcggatgaccaacgatcgctccttcagatcagtcacgagcacttacgtagactgtaaagatggagtgtggacaatatgattagcgatcagataactgagtgagaagagaatgaaggccagcatatcaacacgtactctgcataagctcagcaggggcagggtaaatcctcaaagccctgtagaacgagatggcagcaggaacgtaagcttcgggtcctgtaaaattcagacgacatgcacacattggagaaaaaaggtcaagaaaggttagaactagatgacgcctatgaagaaacgatcgaggaccttaggaagataaggaagaagaaagaatagacacggaccaagagcggaaagcctctctccgatcgagacgttctccataaagtatcgctcctgtaaagaaagcaaattacgggtttacagaaggaagaaagtgttaatgaaaggtgatcttgatattggtatcgtcatttcgatcagaccgataacaggaatgcacgagaccggagtgaaaggacgaacgctctcctcaggcgaccgaggtgtcggctcagcagaaatctcgatgacggcctgaacgaggtcctgcttgaccttggctccctgagcggacttgacggattcgacgtggttgttgattttcttgttgtcctttcctgcaagacgaggaagaatcacgaagatggacggatgaccggtcgagtaaggaaagagagaagagaaggaaaaaagcgtgatcagtgtcgtaagcggagacatgaagagtgttgagcaatgaaacaaagctcgacacgtctttcttacagcacaactaaaagtcatcttgacgagaacaacgcattattcaagcaagatgccgacgatgaaaaggagatactcactgagcttctttctgaactgcttgtcggtctgcctcttgtaatcgaaccaggcggcgtaaccggcggccagggtgagcacggtggctcctactccgatagcgatgttgacttgtcggctgggcatgactgctaggatgattgtgcgtgcgtgagtgtgtgttgtacgatctgtggagtacaaagacactgagagaacgtctggtatgtggagagtgttggatccaaggtcgaaaggtcgaaaagaaagatggaggagaaaagatcaaaatggaggcgtaaccggaatcgtaacctgattacgtacatcgtaaccatgagcctgggtatgttcgagcccaatgaatacacacttagaacagacacatcaggctaacaaagacaggaggcacgagagttcagacgaaccaacgaggagaacatatacgagcgcgaggagattcagtgcgaagaaagacagttgtgatggaaggaacgatttgacggaagcgcaacgcgccggtgtcgtatacggtcagaacggaggtagcagtgatgtgaagcagccaacgtcagacattcgatccatatgagagcgtacaaagacaccatgcagcgagagaacagtatggaagacagaacgacatacagaccacaccaaatgaggatgcaacgaggagaccgaacaaggaaccccaacatgcgcgctcactgggctcgcactctgaccggccaacttttctcttcccttttttttccaaatcatcctagtcattttttattttatttttatttctttatttttttctatttcactccgccttcctcttccagcccatcaaccatcatctccgacaactcaatccaatgtcttcttcagtcaagccctcattctggttgcgatgcgagaccaagcctcacgagcataggtctgctctcactcccactaccgccaaggccttgcttgacgctggctttgacatcaccgtggaaagagatccccagaggatctttgacgacgaggagttctccgcgttcgtcttatcattattctcttcttcctttctttctttcttttggcctttcttctgccgcacgcatttctttgttcgtccatgactgacgacaaacgctccaacctttgtacagtgtcggttgcaagcttgttgctactaactcgtggaagaccgactgcccgcttactactcccgtgcttggtttgaaggagctcgaagagtccactgatgcccttccccagacccacgtccagttcgctcactgctacaagcaccaggctggttggtccgatgtcttgaagcgattccgaatcggcggaggaactctctagtatggctccttcttcgatgacttgatttacatttttagagcaaacaactgacttccagctctttctcttccttactcttctcttccttactctttcctttctttcgcccggccttacctctttgttcgaattaatctcgttctactaccatccgttcgtagtgatcttgagttcttgaccgacgccaacggcaggcgagtggcagcctttggattccacgccggatttgccggagctgctgccggatgtctcgccgtgggcgcccagcagtctggaggacgactaggaggcctcaagccgttcaagcacgagggtgatatggtcgagcaggtcaagtctgagcttgccaagttgggacgacctgttcgagctttggtcatcggagctttgggccgatgtggatctggagctgtggacctcttccgaaaggttggactgaaggagtgcgtgcctttgtggtttttctttcatgttcccttccgatttatactgacggcaattttttctttgtatcatactttgttcttacagggatgatatcctcaagtgggacatgaaggagaccgctggtggaggaccctttgccgaattccttgatggttcgtctgttcacaatggctgcgttagatgaacacttctatagcttgtctgatttgtcgttcttttccatcttagttgacatcatcgtcaactgcatctacctaaccgagcccatccctcacttcttgaccgaggagtacctcaacaaggccggtcaggaccgaaagctggcttgcgttgtggacgtctcttgcgagtaagttgccttccttgttatctcttgagaattgagcgtcttgctttgtatgattaactaacagtcgtcatccatttttttgactttgtatttccagcactaccaaccccaacaacccccttcctatctacagcatcaacaccgtattccctgagcccacggttgatgtcaagctcgcgtatgtctcgatcgctttgcgttctggtctaattgaccttttctcttcttctgtttcttgacgactgactggttcgattcgacttggatttatctcctaaacagtgatggccttcctgcgttgactgtgatctcgatcgatcatcttcctactcttgtgagtatccaatcttctgctcataaagtttgcgcttgccctccaagatagtccggctgacgctttggttctcattctgttctcaagcttcctcgagagtcgtccgagtcattctcgaccgctttgttgccttcgttgctcgctttccctcaacgatcgaccgaaggcgtatggacccgagcggaggagctcttcaagaagcactctgccgaggctaaagaagttaacccttagagcattgtagtttttcttcctcgttcttttttcgaacagtttcgcgatgcgttttgttttatctatagagagaagggatccccagagaagtcgagatagagagaaaagttgtaaattgtttcgcgtataggaatcgataaaaacgcgttggtgcatcatgttttcgccagtactcgggtggtctctctgagattcatgatctgcagcagaaggcatatatcctgatatctatgagaacgacatccatagaaggacagcatgtgaagcgaaactaggtaaaagaagaaaaaaggtgaaagtcttgggaattcaaagaaccaggaatataatcacttgcagaggctcacttccaccaatggtttcttggtgtagtggctatcacacttgctttacatctgtaacacgcaattggtcgccagttcgatcctggcagagaccattccttttttgactctttttggtgtttccttctgcactacgttcatcgcaacagaaatttcgttgtgcaacaggcttgccttttaggtcttgattcttacttgatactgacagcgaatagcaaggtggaaatgactggcacttggatttagaaaagaaaaagaaaaaaaaaggctgaatgcaattaaccaccgactatagtcgtcatcttcctctgcggctcccaaacgggtttgacctcctcattggttcgataccggagatctcactctcatcattgttcttggctttttctcgtccttttcgatcgttcacatgggtgtatgagcctcgtagagaaagatcgtacacttacatgttcacttgtctgccctccgaagccgtattcgtactcgtactcgcttgtcgttttcttgatcaaccaacgcaccgctgacttctgctacactgctctctcttgtctctcttggagcaagctgatgaaaagaccgtataacgttattccatacatgtacattgaggaactaacatacatgaacacccccatgtctttttacccttaatctcggttttgttttgttcttgtttttattttattttttggatgggtcatcgtttctgaccaaccgagatgttgtttgaagacatgctttgttgccaagataaaccgtgaggtcgctccaatagcaatgaagtgctaagcaagcttagctttcctctctcatttcctgatccgaagcttctcatccgacaagtcacaacctgataatcttccatcgaatacctcgcctcttttctccatctatatggtatgaggggcaaatcttgtatcatttgatgcatccagaggtggatacatcttccgtgacctaaagcacccttcttttgatcgcctcttgacttttccgtcggtcctttcgttcacttgctcctgcaagtttgatatgagtctgacgatcttgaaccacatgaacagggaaggttctctgggtaatgtcattgactgatatgctgattcgttgactcagaagcacggttcttctccttcctccctcatgcctttcactctatcccgtccaaaagactgatacaaagctttacggctttcttatatcttcttcctggctgtaaacggggtagatacctgagattgttccgaagcgcttattctcgctcgacctgataggatcaggcgagaaagtgtctctccctctctctccctctctctctctcttccttctttggacgaatcaagatccttttcgatcttccagactctttctctctctctcttccgtatactcttatcgatggggcgaaaaagacataaaaggccaaagcaatgtccgacggaatcttcttctctctattctctcatctaaacagcttcttcttaccagtctcctttctccttctcctctctcctcccctttacctcatttagttcttctgctcatatcgcaataatgcttgcctctactctgctcgctcttctccccatcggtgcttcattggtcaacgctgctgccttgctggatatccgggctgctcctactgttcccatcggtatgtatccttgccccttctatccgctttctcttctctaccttcttgcgcccttcacatcagttgatccctcatctttgtggcttcatacagttgccctcgcctaccctgtaagcttgtagtttgtcgacagattcatatgtttcttcgatattgatttcgcctttttccttggcagccttcacgtggattgtctttggatacaaacaagatcgctccgtaggttcattttattcatattgaagtacctgcgcgctcttagctgactcctcctatgtcacagctgtggaggatatgctatcggaggtcgaatcaactatcctttgagtaagcataatgttcaaccatcttccaaaactgtctttgaataaaggttgctcaacacctctttcgtttttcgttcattctttctttctttctttctttcagccggtggagatctgtctttgacccagtccagagacgcaaaggacctccagttctcgtactctacctctgctaacccccagtccgtttcggacttcaagcctttgctagccgaaaacatcactcagctttataaaggaaccacctgtgtttcttctcctgtttgtcttcgtctatctttatcacgatctctattgtcacaggtgctaatccaccgatcgatcgatgtggggccggttttgtagaatctcactacgctgggtcttagtgccggtgatcaaatcaccatcaaagtggagtatcagtctggaccttctgtacgtttgtttcatgttcgtcaccctaatctttgtgaggtcgcgatactgaagtgggttatcgcatcaaccatgtccttggatgatcgataggcaactcggttctacgaggtgcgtccaaatatatatcctcttcccctcttctctgtcgcctgggtcaacaaagatgatattaacgcttccctgtttcgtttcttgcttgtggatgaacgacctcagtgtgcagatcttaacctcgtagctgcctcttctttcaccaagccgacgtacaactgtacaaacatcattgaatccacccagaccagaggaaacgccgctcagtccgctcagtctgtcgtttcgagcgctgctgctaccgctcaagcctcttcctcttccgttgccgccgctgctgccacttcgacttcggctatcagcggagcgtctaatctcaagatcgggggaatgggaacactcggtttcctcgctgttcttgccgcctttgtcgctctctaattttgttaactcttcctctctctctttctctctatctacgaacgtgatatcatctgttctgatcgcgcctgtccttatctgaatcttgatctatcgctgtgtatacaaatgtttcagttcctttttttcttgtcttgatggaatctctttatgttctagttcaattttgttcgtctggtaagatgaacaaagattaactaagacaaaatagacctctccttgaccctttgctgtgaaatctcctgtcgacacttatatatattaaagttgtgctgttttcatgatgacacgcgtccttcttactctgcgatatctggagaggaagacatttaagagagaaataactcatgaggcataagagagcaaatggatctgtaaatggtgtagaatcactacaagggggaaaacgtcgatgaagaaatttgagaaaagatcatcacaaaacggagtgacaggctggtagattgatagaatcagaggggaaaggaggaaactagactttacagtaaatgtagaaattggccagaagaacgcttcaatgattcaactttggcacaaaaggatagatagacgaggagagaataggcgaagtgtatgcgaagagtaagaatcaaagaaccaaacgagtgtccaacaatgagctcatccgactattcttcgtcggcgttgatcttgggcttctctttaagcacaagaggttctgttatcaacgtcaatacaacacggcttttagtactcttcaccgatgaactgagaagtcaaataaataaaacggaaggagggaaagaaagactacgaacctcccatgactcgctcccaaacatctttgacgtcatccaccacggtctcgaaatgagaagtagcgtcgtaagacttggtgatgaagatgttatcctcctttccagaggtcgtgggggtgtactgaggagtgattgaaacaaacctgcaattgagaataacgcctgttagcaagttgagcgtagggtaaaaaggaaaggacaagtacacttacttctcaaggattggacccaacagctgaagtcctggcgcaatctctcgctcaggggtcgaggtctcaatgatggttgaaacgatagcgacagtgtagcctttggcagcgacattatgcgatgaagatacagaggcgatgtagatgtctagccatcaaaatgaatcaagaaacgagaagaacaagagttagctcagaggggaaaaaaggtcaatacgtgaaagcagacaggacgaaccattacgcctgttgacctggttctggggaataacaatctgaacagagtcactttcttctgtgccaggaatgttgtgcttcaataagcagatcgctcggatgaccttgccctcttccaagaccctgatctttccgccctctccgtcctccttgccagctccgaagtaatccggggatccaatgaccaacttggccttgacggtctcgcccccactcttcacaccaacaaacttgccatcggcgtcggttacgatctcctcgatctgcttatcgagcatgtacgttcctccgtggatagcagaaagtcgggcgaacgcctggggcagctcacccaatccgtacaaagggtagatgtagggcgatttaccgtatcgggccatcgaagaagtgtacaaaatgatcctctcgtacgtcggtcgagcaggcttggtcttgtagcttcatacgtcggagaggcaaaagaagagtcaggactgggcgtgttttaaaaataaaagtggaaggaacatactcgtcatccaggtagagggccatggcatgcccgatgaaatcctgagtacccgcttccaatccaaacttttcgtagatcttcttcatagagtccttgtccagatcgatacctgattaccccatacccatcaccaaaacggaatgaagaaacgagcgctttatgagtttacgaatatgtctgaacaccatagataattcagaggccgctactgatctcaagcttaccttggtgtgtggcaggatcctcgtctctccagttctgcaagaactcgaagaacttcttggcccgtcgcttctcaaagattcccatcaagctacttcgtagggcctccatctcggtcgaaggcactttagaaattcggccatctctgtagacgaatgagccggcaacctgccggaactcaaggtatcgaagaacatcggttcgtaccaagatcttgacaagctctcccgaagcgatgatgaactgaatatatcggacagcagatcgagggatagcaaggtcaaccatggaagcgtgtatgcacataagctgacttgatcgaacgcaccttagggaccaggtccagagcccagtctcgatctttgccatactcggtaggagggttagtcccaggtcggaagtgagcaaaagtctgcgagcatatgataggcaacaaactgatcgagcgttagataagatgcacaccagcaatctctctgattgatctgagatggctttgtaagaaaagacttgcctgggtcaagttcaaggaggcactctctcctccatagtactggtttctgtccatgtgaagaaccttctttccggcgacggaaagtagaccggagaggatacactcggtcaagccggtgccgagaacgataacctgttttacagaacaagcatataagcataaacatacgtgtttgtgtgtgtgtgtgcatgtgtgtagatggatgtatcagtgatctttggactatcaatcccatcttgacacaacgaacgagaaaaaaggaggaagaaatcccctgaaccggataaaacacagacacaatactgacatcatattcttcatccatgttgggctgtcaagcgatcgatgtatgcttgttcgggcaagagttgaatggatcgaacggatggggtgctgtgtgtgatggtgtctaacgaggtagaaggctggctgggtgtaacagagcctacatcagacgattgacgtaaccctagagatgtcgttcacctaacttttgggttccctagaccgttgggttcatccagaccatcagcaagcaatgtcctccagatcgtttcctcataacaaggcattctctaatccaaagtttgagtcttacaagctatccagatcagagtttacttcaacctcttttgccgtaccgggagcatcaatctctcagcggggtgtccagcatggcaagacgcctctgtccgttcgagaaattcagagtaggatacatcatgaccatctcgctgtaggctacggaggatggatgtgttgggtggacgagacatggaacatatgggccatgaagattggtgaggtcagtctcgtttgtttctctctgtgtgatccagttggatgcttttgtctggacgctcacacttcttgtgatttctttgtcgacgtttgtgtacccggtgtttcttgtagacctttgaaccagtattctcacccgtttgctcactaccagtgcccgtcgagaacgacgggtcccagccatcagaatatccttccatcacttctgtctctccaacaacatatctcgcctcggatggtcgcggccggctgtatcctgtccatgttactccttctgcaacctctctatctgggactttgggaccaagctacgaacttcttgacccttcaagccgagaactccgaccgttcaaggtcgagtgggtcgcaggagatcaaaagatcttgatttcatcggccaagcggaccaagctagatgatgacaaaggatggtccagagaggccggtttcgatatcatgctcgtcaatttcgatcatgatgacagtgatgagatggagacggattcgacttctatcaaagagctaaatattatgtgggagctacatggaaaagacgctccgatatatgtctccttcaaatccgagcacttcctgataggatcatccgaacactattcgaatctgcactcgccttcgtcctcctctgacgatactctgttaggctctaccgattcacaaccacgctcagaagattcccaaacatccttcagttggacccagacgtcgaactcgatcacaatctccgttccgcttccccaagatactcccaaatcgcatatccatatttctatctccccgaaacatcttacaatatcactcaactccagttcatcctccatgaacgtctttcccccgcttccaggattcgatcgtcgagcgtggtgggatatcgttcggcctgatgagagcttctggcagtgggaaccctccgagggactcctaacgatcgaactggaaaaaacgaatacccagaccagatggccacacttgttcctacccaactcgaccgccggagttggagacatggctgatgtcgaagagaccctttctgacgaaacaaggtcggcaattgctgccaatctcgccaagtttacgggaccaggtccatcaaacgaggaacttccatcagagttgccgggcggcctgtcgagtttgttgagggacgacatggatttggacgatgatgagcgggaggacggttccggagaggcagcaggcgaggacggagaaagaggcggagtgggtaaattggttaaatggtcattcatagggggccgtgaagagaaaaatgatgtgttagaagcaacaaaggaggaggtcaaggtcgacaaattgattggcgcagaacatgtgatcggtagcgagctggaatgggtccgaactggtttcagaagaaatgacaaccaaggagaggagatcttggttaagtactctgtatgtcccatctactttgctacagatttaccaaggtatcgtgtttctctccgccagtgattctgaaaacgaaccgtctgctcttacatccaatccagctggacgccctgcttttcaagcccccttcagactttaactctccattcacccatctcaagacattccctgcactttcctttgtgctttcttctaaacgagaaaccaaatatatcctacacactcccttggttgatcatttatcgcccgctaaagttcttgccttcacttcgcctacaacggaaggcgcgcagggtgatttgttcatctaccaagaggccgaaggtcagatgactgctccttcgggtgtcttcaagatgggaggaggagaggaaggcgctctggttggggtcaaagcggtcaaaatttcaggagaagatgtgttaatcgggctgtgtgagcaaaccattgtgttgctgagaggggtattgtgatctagcgcaactagctgccttgcttgaagtcaatcaagataatgataatatggatccttgcatcgtctggaatatgtacttagttctgggcaagccatcaacactctgcactaccagcctatctgagaaacagatcgtagaatgaatgcgagcatctcatcagcccgtcggatattgctgctcagttcgcacgcgaaagagatcgatgacgtaaacattacactccatcttgattattctccgttgtttccccccgccttctatcttcactacatccatccgccgatcaaccaagatacaaactttgtcctcatagatcttgctgtatctcgttgagcctcgctagacatatatcggacgtcttcaatgtccgtctcgcttcgtctcgcatctcgaaggctacctgttggcctccgaacgacccaatcgtgtaccagtccattcatccgacaagccctctccccctatcggcgatcgacctactctagcctagcttctcccacatccacccttgaaggctctagatcgacctttagaaaacagcatttgttccgtttcaacaagtatctttattatgtcgttcccacagcaggtctattgcttgcgtttggtggcccgaacatacagttctctgccgagacaaatcatctagcgccaaccgagcaggaacctattccttcagacgctctgtccactatcgaggatcggccacggaggacagtgttgtctctcctgaacgactacatcctcgaaccgttcttgacaggtcttaggtttcttcacctagcgggactcttcttacccgtcatctttttggtcccggtcaccttcttcggacagcgagaaaggttgaagaatggggagaagggcgatcgatctggtgcaatctggtggtataaagtcctggtcaagcaaatggagagagctgggccaagtttcatcaaggtttgtaagagatctgagcgacaataatagcgtcttgcatgccctcaaactgattgctgttgtatatctgactcaatgtagctcgctcaatgggctggctcccgatcggacttattcccagctcacctttgcgaagctctcggtcagcttcattcgaacggaaagcctcattcattcagacacacccgacgagtgatcgagcatgtcttccagaaaccgttcgaagaggtgtttgaacactttgatgatcaaccaatcggttgcggtgcgatcgctcaagtctataaggccactctccgaccggagatcgtgccaccgtcatatagagaacccaaaaagcgtgtaccaagcactccatctccggtgattcctacgacgacggtcgggatcgatttagcatctgttccacattctgcagtagctatcaagattcttcatcctagagtacaccagacgatcgctcgggatcttcgaatcatgggtttctttgcctcggttctcaatgcattcccggggatggagtggctttcattcccggatgaggtcaaagtatttggagaaatgatgaaccaacagttagatctcactgtcgaggcgagtaatctgagtcggttcgaggaaaacttccagctgagacggaccgccatcagtttccctagaccggtcagagattttagcacaaaggatgtactagtggaagagtttgagaacgcattaccgctcaaatacttcttgagaaacggaggagcccagtatgacgaccagctggccaatatgggattagatgcgtttttggtaagctttatctgaatctttctcagctactaaaacccccctctaatattcttgtggacgtatgtctaaatctcaactcggttgtaatgtttgtctgaatctggtagaacatgctcttgttggacaactggactcgtatgtaaccaccctgtttggtcaacggttttatcgacatacgttatctgacttgcttatgccgatcttatgtactgaatcagatggcgatctacatcctggaaacatcatggtccgcctattttattttgaacaacctgatctccattcgtctttctcatacacttcctctttggactttactctcaatgtgctaaccgcccgcaggtcaaatttttccgacctacgacttcgaccatgttcagtagtctctggaaatcgataataggttcctcacaaccagcctcgccttcagccaactcgactcaagccgcgaatgagtctgatgagattgtagctcgactgtctcgattatctcatgataaagaggcctggctagctgaactcgataggctttacatgggtggttggcaaccagagttggtattcatcgatgcgggcctggtcacacatttggacgatttgaataggcgaaacttcttagatttgtaagtttcaagacttctcgctgtgatagtcacacgatttggtagaatctgattgtttggttctatcgcatattcaggttccaagcggttgccgagtttgatggatacaagggtgagtaacgcatttgtgtgcgaggttttgtattcttactgatgacagtccatcgaatctccttctcgatccgattttcaagccggcaaattgatggtcgagcgttgccgaacgccccatcttgtgattgacgaagaaaactttgctctcaaaattcaacacctcgtactctccgtcaagtccaagacgttctccctcgcccaaatcaagatttctgatatcttgactgaagtcctttcagccgtcaggcgatcgcacgtcaagatggaaggtgactttgtaaacacggtgatctcgatccttctcttggaagggattggtagacagctggatccgaacatggatcttttcaagagcgctttgccgattctgagacagctgggtcggcaaatgggtacgagggaggcgatcgggcaagtacctggtaaagatctcggcgcgatgatcaaggtctgtccttttttcttcattcagtccgatccatattgatcaatacgtcgaaacttggaggcctggtattgattcttctcttgtattttgtataatgaaacgatatcatcagatctgggtttggttagaagccagagatctcatctctgcctcaatcgttgataccgatacgttcattaaatacgatagattaatgcctaatatttaagaacctcttgttcatgtttctttcctcttagataggaaagtcttctctcttcttctcctctctgctctttctggatcatgtctggctcatctatcccattctcttcctcgtgcactgttatcttgagtcatctctcgttcggcattcgtccgacaatattgtaacctttctctctttctcttcctttgtctatcgtctatatgtccgtctgagttatgatgtatctgtttttgcttggaaacattctgcattttcaatgaatcacacaatctcaatccattgtcgactaaatagcgcaagatccacgacagcgagaagattctgag

SEQ ID NO: 620 - DNA, 6455 bp, Xanthophyllomyces dendrorhous
aaagaaagaaagaaaatagacaaaagtgtaagaaaggggagggggattgaaacgacaataatgagagagtatcatatgtatgcgaagatgttgcatatgcgaagcagtctaggcatagatcttagatacagagtcagttcatgtacaaggagctatagaaggcattcagtctatagacaaggtcgtaggttaagagatcagcttatacacaagggtcccacaaaagatgatctatgtacatgattcaggtatgagacactctgaatataaaagacatctatggtgtgaaatataaacatcatgtggaacgtctatttccttcagatcttatcatgagtgaagccgttaatgtgaaagtcatcgggtgtacctccattgagataactccagagtcttgaaggttgtccgtcagtcgatttgagccaaaaagaggaagggttccagttggactatacaaccgataaagaaagacaaacaatttgagtcgatgaatatgggatgtgttagatttcgacggtttctaacttacttcaaagtaattctaaaaagaagttgacataatgaggtaagccaaattcgagaggacggcgagtcaggagcctagtatttgagctgacgtcaaacatagtaatagaataaagaagattctcacttcgactaggagatggccagatttatcgggtcggctgaatactgtacacatttgttctcgacatcagtattcagttttgttcgtccgagaggacaatctccaagctaacggaacatatcaaatcacgcacgccttccatagaatcgagtatctacacggtcacttgcgggaacatcccaattcagcacgccaattctggcaacgaaatcatgaccgtttgcgtaatgctcgatatgtttaactaaattccgtcatttgacgcggagaggagggcgtcgaacggaggagatgacacaatacgaaggttgcatcaggggacgtgaataagtatgtttacctcgaacgtgctgacttaccaacaggcgacccttcatgatctcgagaaggtgtcgtgactggagaattaaagtgattggctacgacgtaaaccaacccaaggatggtgaatcagtgttgttttaccgagtggactaaacgctttgggatattaaagtcctacctgcgtttccgaacgtgtaggtttccaactgcgcagatcagatccattggagaaaaagtccgcaaatatataagttctctgtcctgtagcagtagtcccattcgaaactgaccttctgcaaaaaaacctgaataatgtggtgtgaattaatctcaactcgttcattcttgaaatagagagcggcatcaaatgatagaatttactcacttgagggatatctgacaggagatagtcaaggatgagagaagatatgatgccaccctgatgagaatattaaagcctgaagagtcagtcatgctcgcatatgaagcgataaaagtagctgcagtacatacctgggagtgtgcaagaagcaccactcttttcgtgttcgcatccaagagagcccgtttgagtcgatcatagagctccaatgttccgtcttgagtggtatatgcaaactaaggcatcagggacgagaaccgcatcaggaatggtgttactgtattatgtttataacaatggtttccttacgtctctttggataatgcattcaataatgtcaaggatgaaccctgtgtggtttccaataaacatttcacggaaatgtcagacgcgttgagtaatctcgataagtaatgatgtaaaggctaccatttgtctaaaagtgcatgtgaaggagccgatgatgattgaatttcagtattcgcttggagtgacgatgtttcactcgggtcgttgctcagacctactttgttatgaactccagtgataggccggtcaaacctgtgcatgcaatccaacaattgttcatggacacatccttggaagagggagaagaacatggcagatgacaaagatgctacttgcatttgagccatgaagtcaatatccctttgaagaccttcgttcccggtgcactacaaacagaagaactttcagtttggttactatccgtcgagtgaaaggcgagtgactttcaagataacatgggccttacaattccattgatgaagaactgggataaggtaagagaagaataattggataagaaaacacaatgctgagtattctctaaaagagaaaagctcacccattcctcatcgtcacggttcgacgtaggttgatatttcgatgtgataacaacaccaggttgacatttgcttaaataaagcatgaatagcccaacggaggacgcaagggttagaagtcctaaaacgcccgacacaactgaactccagaagactgcacagatggcaatcaaggatcctacagtcagtaggaactgctcgcctatggtcgttggggtgatggcgcgcacttttgaaaactctcgggacgaaagggtgctttcagtagtgatcgagggcttgagagagattagttgccagaagaggtttttgtatttccagataaggagcagatcagatttcatcaaactgaacgggtaatccctgaaagttggttcctagattcgatgccattgttgtaaaagtatcagttcatgggtaagaaaacaacgcaatgcacttgcgttgagcacgaactggtgtaatcttttcagccttcaattgagtcaagcaggatatggtattgaaatgaacaaaatcctcccgataatcatttgcagaggacgccatgatggagattggtattgatccaagggagaacaagattcagggtgagagttacaaggagatgagacgagatggtagtatcaagtccaaaagagaaggaaacagatgggatgaatcaatgagtgaattagtttcccgtgaacgtgcgagagagaatgatgttcaagagatatgagagatcctggctcgaggatccgttagctggtcgtcgggtacagagttagtctccatagcggcttgatctctttcttgacgagattgatgagattgttgtccatccatcgggtcttcggggttacacttacgtaatcactaattgatcgttagaaggattattgcctttttttcttctctctgctctgcctttctttggaaccatcgttcgttcattaatcagagggcttcttctttgtttatcagttatgatcccatctaggacgatgcttccactatcctcagtctgtggctctacgtcgacttctagcttgaccaagtcattaacggtcaggttaggttccctctccctctcgcgaaaaatatcctcttcctcctcttcgtcttccaacacttctaccagcccacaatcgccgatcccgtccgcttctaacaatggtggctcgttttccgccggctacctcggacgtcctatcaagccgattgtcttgtctagaatgccaggggggttctactccaagagcaacagatcgacagtcaagatgtcggaggcaactgctagagaggagttccagaagtggtgtcagacgacaggagcagagttcaagtggccgaagcctaggacccgaaattggctcggagggaccagagtgagtgtggcttctttctcactttgtctgaacagcctcttggtcgtctgtccaagatgccgtgtccgtcttttcttttgtacatcatgactgatgaaaatgatgaacttcccttcttcctacagccttatccggcaaacccctacttcaagcccacccctcctctatcgtgcgatctgcaggaagaaatctatcaactctacaaaagcttcccgggagaagtcggagcagttgaacgaatgaaccttctttcagaaaagtactcgatttccaaggagcgcgtcacaggagccattaagaccggccaggtcggcgaagcttgggctaaggtggtgagtgtcgattttgtttttcttccttttcttatgttgtcatgttcttcttgatacgagaatgccccataaacatgctttctcattggcaagtcgctgacaagactgaatgtaatcctggttttctactgtgctctccctcacgacaaacagggccaacctccgcaacgtcctttcgttcgagggatggagtcttacctctgcgttcctgaacacaacgtctcgaccactcacgagagccaaccgaggtcaaacgctgctgtccaattcacccaatatcttggttctcgaatcgacatcgagcgagatctcgagacagaaaagctcgaaactggagaacgatcacatcggttcgaagattctggattcgatcctgccaccgtcaagtcgcttggtcagatgtcatgggagatggtcagggatggagaacaggctttgacatcaaagattgcgttggagaagccactccgaccgccacctgctttcccggtcttccccaacaaggtcgtcaaggaggccactcgatcacctgtttggaactttgttgacgtcggtggtaaattcaacggactcgcctgggacggtgcattgggacgtaaaggacactgcccaccttcaccgatgaaagccattaaacagttcattcctcttgtcaagactcggtctggaccttacgatccgtttgccaaacagaaggctgacagggtgaaacgagcagctagggcggccagaaaggaagctttgaacgccgctggtgaattaacgcctcatcagaagattgttgcaaagatgacgccggcagatggtggtctgccagttcatttggttcaccaagatatcatggtcaggaaggctaagtacagggaagaaaagaaggcgaacaagtaccagcttcgggttcaacaagaagcggacaagagagcagaattcaagagaatggtcaaggcgaagatcgagggattggattgaggtactcttcagaggttcatccgcgggatgtgtatgcatgtttatttcctatcttgattctcatttctttcttcttgatacacacacgtacatgtcttgaagcacaacacaacagtgaccaaacacactctcactctttagctagaaggaatgtatcgatagacactcctgagcgaagaactggtatttaagggcatgttatttttgtcatctccctttccctccgggcttctcgtttcctttctcttcgaaagtatctcaaccgaattctctacttggtcttgggctttttagctatgcgagagaagagatacaacaaaaatgtagtgcagagggccgattcaatgatgtgtccacaactgcacagagtgcatctatcacgatcaaaagaaacaagagattcaacttacttccatactttgaacgagacctcactcgaccgaccacaccagcacaatccagcgcgcctcggataatcttgtacctgtcgggttgtcaagttcgttcaagacatacaatagagcagatatgatcaacatgactgtcctctttccgtatttctttcgatccggaaatgacgaagccgcttgggaagatacaaagaagcacgcaaagggacggcaaaatcaacggactgactttactccgggcaaatcttgtgttcgacctcctctgatcaagaccacactgtgttcttgaaggttatgtccctctccgggaatatacccgtaggtgaatttaccggtcgacaacttgatacgagccacttttcggacctatctcgatgcagagcagaaggacgagagttaagtcgattagccaggttcgcctcaagacgatttagtttcagaacgagatgattcaacactctcttgactgaaccaagaggtctcaaagacagctctctagacaagaaaggcaagaggaattcgaattgagaaaatgatcataagaacaaaagacgaacggccgagttgggcttcttaggctttgcggtgaacaccctaacgcaaacacctctcttttgcgggcacttttccaatagtggagacttgagctttcgcttcgtccttctccatgggtcggtacgagcccctcggatgacctgattaagtgtcgccggccggaatagggtggttgagagtgttcgacggaaagcaggtgaagaaggaccgatcggggctggtcgagcagcaagccgaacgagggaagagataggagaaaaagcagaagccagtcgggaagacgatgatgaagccagaagcctatagggtagccgaagagaaagagccatgttggagtgagagagtaagcagagcagagcagctgcctgatgatctgtcgatggataccttcctttcgttttccttcccctcaaaggttaccgggaagcaaggctcgtctgatcggttagttaagccgataatacttgaatactcaaatataaacgactatatgtctatccgctaaataagctaaaatcatctggtaattcaaatatcaaacctgacgatgtcagggaggtgacctgagtgttacgccccggtaaccttctcctatctc

SEQ ID NO: 621 - DNA, 338 bp, Xanthophyllomyces dendrorhous
ctatagtatagtctaccaagcccgatgtctctgtcatccttgggtcattccttgatttctccatattcttgttgtatcaatcttgttccccaatctccttgctctgcgctctagtcacaatcactgagccagagagtctgaactgtcttcctgttagccacattgcgtcgggttacaccctccgtaaccgcccattaccttagggttcaaagggggaattcaggccctcaggactggaaaataggatgaatggattacgaaggataaggataaggacaagagcaaaggacaaggatcaagattaacaaaagatccagacttggtagactatactatag

SEQ ID NO: 622 - DNA, 7122 bp, Xanthophyllomyces dendrorhous
agcgaagcaagaggaatgacagagataggagaaggttaccggggcgtaacactcaggtcacctccctgacataacatgtgtgagtcacaggccacgtgacccatagaagtttctatgaccatctcgaattatctcgaccgccggagaacgactcttccacgtccacacgatacacgattactgatcgcttttctagctgaccgagctgactgatccgttgaaccgagaactcgtcgacgtggaagcttacaccggagacatataagaacccttcgtgttgagtctgtggctaacctttttatcatttccattcacattcccattctcgttcattctcttgccaccactcatattcatatttcttaactcactacccttaccacctattcactacatcacaatacatcacacccaccacaccacacaacacttcaggtcgaacttgcacgctatgcctttcgtatacatccctgactcgatcgagcccacattggtgaacgccgatgccgctgattacaaagtgtaccctagagagcacgcctacctgtacgatgaaccaaggtttgacggatctcggcatcgagccccttatcctcatacgtacgcgccacctaacccatactctggatcgtaccgagatctatcgccacaccctgatccgtacgctcgtgctcatgtccatcctcatagtggtcgacaccacactcgtccccacacacctactcgaccttatctcgcttatccttacgaacctttccaagaatacgaacgaccttataccgaggtagatcaatacgctccttcggcttatcacaacgccatcaaggcggctcgacgacgagccgagtatgaggccgaagcgctggctgctgctcgagccgagctcgcagcggagaaagtcttgagagagcgagctagagctgagcaacttgcgaaagctaaacgagccgctgctatcgaggcctatctggtccaagaggccgctcgtaaggaagaaaaggaacggcagagaatgattgagaaggagagaaagcgatatgaggcggcgaaagccgctgccagagaaatggttatccgagaagaaaaagagagagcaatagcggaggctagaaacgtaagtgcatgttttttgttatttgtttcatctttttcgtgtcaagtattgtctggtcggtgaccgttgctaacgataccccatcttgtaaatctctgtttcggtttttcaaatctattctacagcgacagccagcaaagtcttttcagcaggcactccagtcggctagtcagaaacgttcagcgttctttcacgatcgagcggtttcgaagcaagccgagtccgacctagttcgacatctgcttcagataactggcctcaaccaatctcagcttcagtctcgatctagcgctgatctccgtgccaaatgtcaatccgagttcgaagccggtcaatccgcgtgtcgtcgaaagcaggcgaacgacgataaggaatacgaggccgaaatgttggcgcgtttgatgtgtcctcgacacgtgagtgagagttttgtttgtattgtctgctatcttgttttacgtttctgactttgctttacgtctttgttcaattcagcagtctgcttgttcagccgccaaccaagaagcaactccgccagctcaatcccgtccaactaccgctcaaccagctgcacctattcagcctgctgctcaacacaaagctcttgaacaggctgagattgatccacttcagtttttgcttcacctagtcgaagctgcgtcaggaaagaaggatgagtctgccccggacgcttctttccagcctaaagcctccacagcaacgtcaaccgtgcctgtatggcactgggtccctcatccatctgttcagaatcctcctgctgtttcgacttctgagcctaagcctaggatcaacccttcctctgttctgacggctacccataaggctaattctgaaacccccgttacacctgcttctacgtcttcggctccctctccgtccctctcgcaatcttcatcctctcggttacgtctatcaaccctggacaaccgactttcatctttggtcgatcgaccaagtgacaaagcgctcagtcggagcgagcttgagcatgaattaactaggctcttgcttgaggctgatgaaattgaaagcgatggagacgagaatcttaggggagaccgaaagcagtttgtcgttcgagtcgagcgtgtccttgatacgttggatgtcgaacaaaagcagccccagtcccagcctcaggagaaggctgaggaggacaaacatgacgagatcacggataaggacgaggagagcttggaacctacttcggcgcccaacactaccttggtgtctgagcctcttttggatcctacgcccacaactcaatctacggacgatgcggtggagccgtctgaggtgccctctggacctgaaaaagaggttgatcacgatttagccgatgattcatccattcaaccacagacgtctgacgaggtgaaacccgacgattttgctgaggagactccggctgtgatctcttccacggacgccacttccattacctcgttgcttgggtccactgccgctttgccttccaatcctgttgccgcaacagaggatgtaaagagcaccaatgatgctgtatcagacgtgtcaagtgaagcttcctccccgccctcttcgcctgttgtgactgcgagtcaaggggtgcaaagacgtcattctgcgggaagcaactcgagcagctccagcagcattcgacgtggtcgaaaggcttacgtagaggatgctgttgaggatggagaggatgagtttcagctcgtctaggatcacctctcctatctatccaaccataattttcttcatataacttacaaaaattaattattacatagataccagtatatccatatgtgtcattttttctttcaatcgtgttttcccgagcgaaccgttgtgtgataataatgatttttttctcgaagcctgttttccatttcatttatttgagtggtttctacgaatcaaaacttaaaactcttgttgatggcccatatttataaggtttgtaaggcccaccgaagcaaataggtgtgacctcatcggtggccggccgttagggttaaattgaaattgtgaatcttcccaatggacatcatctcttcatctccaaacgtcttgtgcgaacagcatactccttttgaccaattgctccgcacctttccacctttcatctcatctacagcatcagcccttgtgctgacaactacagttgctttctgctagagactgttgacattctggatatcttatcatcttgacaattgaacatgacaagcagatcaatcaagtgtacgtcgcaggattccatgttcctcattgttcctagaacgtgccaacgtacatgaggaatcaagataagagtgggggtcaacacaacgtctgattatactgcttcgtttcaaccctgactcattcctgttacctggtttcaggtgtcgttggtgagtctctctttccacaccgttccagatcgttctagagttgaatcagtagccttatgaaagtttggcattgacctttctgatgtgatgacggatacagtgggcgatggagctgtaggaaaggtagacatgaaccttttctcatcctaccccttttcaagagatatactgatatatgctagctttcttcatgctgttagacctgcctgctcatatcgtatactacaaatgtacgtctaatcaatcatagagtgagagactcgttgtacgatcttgacaaactgacaaagattcttgcatcatcacttaaggcctttccggttagatttatttataacaggaacctatcgcatcgattgacatagtaaaagcgctcatatgattaagtttctccttgtatggtcagggcgagtatattccgacagtatttgacaactacagcgctcaagttcactgcgaaggaacgaccatctcgcttggattatgggatactgctggtcaggaagattacgatagactgaggccgttgagttatcctcaaacggatatctttcttgtctgttttagtttggtctcggtacgtcatgctcagtttctatcgatatccaaggatcatcggattaaatgattcgtatattttattgaacgattggttgtccagcctccgagttttgaaaacatcaggacaaaggtgcgcccgagtgtgcttaagccttccggcaaacatgttgccgtgtgtgtatggagctgatgtttgagttgcgcatttttcaacccactcacctcagtggattccggagatcaatcatcattgtccagggtgagtttattagtttatctccatcgtctcgggtggtcaaaatcttgtctaactgaaaccatccctatcgttgtatagaactgcaatcatactagtcggcacgaaacttggtaaggggggtttccttcccgcagagtttcagctcagattgcagcgacacatgacatagcgctgactattcaataccgaattttgacagacttgagagaagatcccataacggttcaaaggttggcagagagacgccaatttcctattcagtacaccgctgtaagtttcttatgttctgtaatatctctaggcatttgttgacggtgcggtttacgataatcaattaggctgccgcagctgcgcgagaaataggcgctatcaaatacttggaatgctcagccctgactcagacggggctaaagacagtgttgtgcgttgcaaccatatctttctcttggcttttgcttgaatttgacgtcttggtacgccatttctaaacaaccctcaatatgttaaattttgcactttgcctaactagcgatgaggccatccgtgctgtcatcagaccatcacctaaggcgtccagaaagaagggggcttgtgtgatgatgtgagatttggactattgcgcacatagacttagtcctcacggcacgttccttctctcgcttcctatacttgtcacctttccaactgcatgttctcagctttctacattatcatcgactctacatcctttcgttgatattcttctactcgttctgaacatcataccgttcatatatcctcatatacaattattgcatcagctctcaatcttacgattctttcaacgtacgcctatccacagcacatgctccataccttctgtctctacgtatatagcctctcgtatcttacaagatctatacagttcatattgtaggtcgctctgcataccgagtttcacaatcttttgtcgtcatccttctttcccgcacccactcttcatgatatattcggctgaagacgaagagtgaacgttgatctgtgtaagaaatgatatctgtagatcagcgttagagcacttccgatacgctgatttcaagaaaagatatgcatcactataagaagttttggccttactgatatcgtgggttctccttgttccacatatgagcaagatgtacaatataaatagtggtactcgggaccacaactcatctgaacacagacattcgataattcattcgaatgtcttcgttggattcgatctgcgtgaatagacaacatatgcgtgcaaccttgaatgcattagcttgagatgatacacatagaaatgggctccaaggacgatccctgagaagggcgattagtagagacgacgcgcgaacgatacgggaacagaatagataagataagatgctggccgaaccttgggagaaatcaagtcccgctgtcttctcttcccttattcctttttgtatgcacttgatcaacatggcaaactgttccgttgagcatagcatatcctctttcgtcttcgttgcatcacattctagatggtaaaacagggacgggaaaagacagacaatgaaaaactaaaggatttggcaacgatcaacgtggggattacctaatgtttttcgtggttacggcccaagacggagtttcaaatgtaatcatccacattttgggcaagattttttgattgacaaacgaagagagaaagaaatccttcgccccaatcctcttcccggtgtcctaatcttccctcctctcccccccttgtctccttccctaacaatccaaccgtagacgagctgtgatgttagttctgagcgaatcttccatcggtttcgcccttttctcggttaccgacgagggcaaaatcggaaaggacgacctttacaaggactttgagtcccctgagagtgccaacaacctgtgaggtcctttcttttcttctcatattcttctcttccattctgagtgggaatggtcatctagatgatctgacacgtaaaaaggactataactgatatctcgtcatcttcactcttctcgcctaatgaactttttagtctcaagctcaaggctatccaccgattctcttccaccgctgatgctgttgaggacttgactcagctccaggatggaaagctttccaaggttctctccaagttccttgtggatgagatcactggttccaagtctaagaagggaaaggctgtcgaggagactttggtggtcagtgatactaagcttggaggagctatctccaagaagcttggtatcaaggtcgtttcggattctaccactatggacctctaccgaggcattcgagagcagcttactagcttgctcaaagggttggaccccaaggatttggctaccatgaaccttggtctttcccactccctttcccggtaagtcgagtctctttctcagacttttccgttctgtgtgaaagggtctggtgcagaattttcttctcagccaacgcgtgcaaaaagtgagcgaaattgactgactggacttcctccccatatcaatctgacaacagattcaagctcaagttctcccctgataaggtcgacactatgatcatccaggctattgctttgctcgacgacttggacaaggagatcaacatctactccatgcgaaccaaggtaagatctatgtgaattgacaaatttgcgtatcaagggataattctgatcatggtccatctcgaatcattttcaggaatggtacggatggcatttcccggagatgggtaagatcatcgtcgacaaccttgcttacgc

SEQ ID NO: 623 - DNA, 44976 bp, Xanthophyllomyces dendrorhous
ccttgcttacgctaaggtcgtccgagctatgggtatgtcgaaactttttttttttcaaagtttacttcaggaatgtcagatggtaaagttttcgtgctcatgcctgctttatcttctaggtttccgaaccaacgcttccaccacttctttcgagactatccttcctgaggatcttgaggctaccctcaagcaggccgccgagctctccatgggaaccgagatttctgagagtgatatcaaccacatccactctctatgcgatcaggtgattgctatcaccgagtaccgagctcagctttacgaatacttgaagaaccgaatggctgccattgctcctaacttgactgctttggtcggtgagctcgtcggtgccaggttgatctcccacgccggatccctcctcaacttggccaagcacccagcatcgactatccagatccttggtgcagagaaggctcttttccgagccttaaagaccaagcacgatacccctaagtacggtttgatttaccacgtaagtgatttttcttgcttatctctgattgcccttataccggaaagagagaatactgaacctcatcgtgttttactctccacaggcttctctcatcggtcaggctccccagaagctcaaaggaaagatggctcgaatggtcgccaccaagaccgcgctttccatcagagtggacgctttgatggacaacgattcgaagtctgacgacaacgccccgacgatcggtgtggagaaccgagccaagcttgagtctcgacttcgagctctcgagcaccgacttggcattgtctctgttcgatcctctgctgctgatggtcgaaagcagaacaagttcgagatgactggtaacggagcgaaatacaacgatgtggccgatgcgaccgagttgattgccactcagcccgctgccactcccgccgaagagggcgccgagaagaaggagaagaaagacaagaagaagaggaagagcgaggctggcgatggcatggatgttgatgaggccaccaacggcgagctcagcaaagaggagaagaagaggctgaagaaggaggccaaggaggccgccaaggctgctgccaacggtggttagtcttcatcttttcttacttttgatgtttctgtttatgcatgctaaccatcgctcatcattatcgtgtcgacccattgacagatgcctctgaggattcctctcccaagaaggagaagaagtccaagaagcgaagccgtgaggagaacggagacgaggccgccgcaccggaagacggagagaagaagaagaagaagaagtcgaagaagtctgatgcctaagtcaatttaggtccttcttcttagattcttttctttctctgctcttttcacaactctctagcttccatgatctggctttacgtcccctcctatccggtttctctaccttgacttcgcatcctgtcttttgttcaatcctcttcgtttttctttccctttgttatttgtatcacagcccctcctcaccttctcccatcctctgcctcatcctcacccatcctctgtttcgcatcatctcttgatactttggtttcgtttttatcttttcgttcactttttccaattttcttccgcacgcttattcttttcgtacttgatgcatctaaaagggctctttatccaatgctcatatatggttcggattctcatcccctgcgagacggagtaagcatataatatggcataaatttggtacataggaactcctgagctatttgaactagtcgtccagtcttgattgaaaggaaacatcgaaacacatcaaaaatggctttacaacgtcggtaaagggactgattcgaggccaagcgaggccgaaggttgtataaattgaccggtggagccgttctgttctcgatttcggtcggatatacggacaaaggccgaagagggagaggaaggagatacttcaaagacctcttctttccgagtattcctcgcaatttctgttttctgatattctttttatctagatcgttcaatagcggctcgttgatcaagagcctggcgaaaagatcacgcgttgacacctcattcttgtcagtctgagtatgatctgaggggtttacagatgagataaaaggaaccgaacctgctggcaagtgaggctgcttccagagaacaacctgtcggcgtcttgaacttcatgaccgacctctcttccgaacgccccatcgctatcttttgtcgatgctctcggtcgaccatgatatccctatattcaatataagcccgaatggcatcatccttaagctgagcataaattcttggctgcgaggatgaactcctcagaaagagagcattaccttgacgatgtttcctcctgtaagcgtcgattcttcaaggtatgacccttcgtacgcgtgtatatgagcttcatgagcagcctgtccgagaatgcgggtagtgagcgtaggtccacagtgaagaaaaacgctccacaaggccagagacatacgagttgcttatcaatttgtctcttcttttctaaggcagcctgtcgagcgtttttgtcaaatggatacgattagcctggatgatacatcttgatgtctcaaggccaggaaatgtgtaccgacttgaaggacatgttgaattcgaccgaccatcggcgatgcagtcgtcattgctgctcgtagccacacatcccgtacagcgaacaaaacaaatttgcagtcagaaacatcatcaaaaagacacctcgtgaaagaccaacatactttgagaagtatcagcgctcgccatccttgtgcataatgtttgattgtagagtggaagcgaagcacaaatccggacgagatcatagaggatgcatgaggacgtgacgcgacttgatccgacgattacgtaactcactctttattctttacctgagatgagggatcgtgttcctgacccaaaacctcatcgcgttgctaactgtagttctcatgatacatctggtaatgaccatgtacaggtcgtccatattggatcctgtgcgcgtgtcggtggaaatgtacaagtgtgaatactgacaaacctgtgaggtgaattgagggtttgactacccagatgatttcagctgatcagctgcaccgcattccttgcgggacctgacatatcggctgtactttgcctcagaacatagaaaaggggaacgaggtgacgttagtgagagcagaagaagggggtgacagaactgtgggacaccgcctttttcgtagcattgtgccgttgtgactgatggctcttagcccctctgcctgtttcgtacagcctgtgctgaattcgagtatactgttcaactgattgacgtggccgttggtctctgcctcgtcgcgctatataaagagggttctttgaaacgacccacttttcatgttcacgactcgctgatccttcgtttggtaacttgctcctatctacaagaagaataaacactcacacttgactcttacttgactctcaacatgaagttctcctatattattgcccccaccgctctcctcgcttcagctgtgtctgcctttacggtcatcacgcctaacggatggacgacgacgggtaagcataacacaaccgctgttttctgcttgtgtctttcactaagtattgtctctctgctatatcacttttcaaaacaggtccaaaccagatcagttacacgtcagtcctttgatataatttgacgaagaatgatgatttctaatcttacttttatccttcctttatgttttaaacagttcggttgacacagaccagacctcgtttgctgcggtattgaaggcctcgagcgggactactacaatactgtctgaaagtcataacacgagcgatggaaacttcactgtctcggccacatggtaaggcttgttcttttctttcccagagagggcccttgggtcatgctgacgatctgtgtcccgatgctgcagctcggacctgtactctaccggagaaggctttgtgattagtatgtgatcttttccttgatcttccataaacacaggccgactgatgacctgttaattatttttaacaatagacttcatcatgaactcaacttcgttgaattcgatccttgcccaatcgcaaacattcaacattactgaaagtacgacgtcgtgctcagactcaacttctgcttctgcttcagccacaacatcttctacgtccaccacaacctccagttctgcctctgacaagtcatcatcggcgtccacgaagtcatccgccacgtcatctgcgactgcatcatcgagctcatctggagcgttaagcggtgcaggcgtgccatcgatgtttgttggtttggtggctttggctctagttggctcggtctttgtttgatatgtcaagctttctccttctctctcttttaattgtctttttttaaaatatttttttagatcttgttcttattcaattcttcttcttcttctttccacgttctcaattcttggacataagactttgtttttttatactcttccctctttactttccttacatgttagtttgactcgactagactaaaacatgctaggactctttagagatacgatacagatcggacgatagatgtctttcatattgtcaccatgcagccgatggctagatttcttgttgctattcttgctatcggtattattatcgttcttttcattgacatccgcttgctgcataaggttttcatagagagagtgagtcgcagaacaaacatcagaacgaccgaggatcgtatgaatatggttggaaaataaatagctagctagctagctaactggcggttttttgtcccggggggagccgttccgtaagctctacagagagggcctagaatctgtgcgcagcaggcctatcggtcggttgccctccgtagagcaccccagtcgtccggagcgaaaaacaaatgagctgaccgcaaagatagaaaatgtcaaccaaatcgaattgacgtggcggaaaaaaaccgagggtatgcgatgaagaacgaaaagacagcgagacagagaggcgcaaacagggttggatgctagacacaatgaactttcgtttgggttgagcagatggctgaatcgggtgaaagattcttcggaagaaagaaatgcattctttactctacagaatagaataagcctgatcagtctgataactcaagacgctttaactttgtgttttcctcttgtctatttctttcttctgaaccatgttcggatagaaagaacatatgtctattatgcagtcagctatcagatcatgtgttccagtaattggcagaagaacatcaatagttagagaatgctgaagaaaacaggggtgggacaaaggcccatggaaacacgagggagccccgatgatagttgaatgttgatcacctttttttcttctttattgatattctcgccttgcgtttgctatccctttctttcttccatcctccattcggtcccatcagcaagctctcacggccacaggttctaagctctgtgttctgtccaaacctcctttctctcgttcgttcgttcttttagctttcttccatactagacgtatctctgggcaatagatacatcgatcgaccgaccgaccatcactcagtctcgctttcgtccgcacccggagttggacctaccttttcttccttctttctttctcttgttgccttctcttctccagcgtttgtttgccatttggaccaacaaactgacagcacgcaatacttataatataatcgcctgtccttccgagacctcattgaacaagctcggaacctgctgggagtagcattcatcttggttcgcttgctcattcgatcgctcgctcgtctttgtacggtctagtagttcgaccaggccccgaacgctggccgtccggtgtttattctctgtcatccatcattgccaccccaatctattcggctcgtctggtttagtcttttgccaggacaatccctttctcgacattatttacacgttggtcctgcttttctatccatactttacctcaaactgtcctattgctgggcttcgggctgcactatcttagcttactgttcaccggctttaacgatgccctcgctttgtatacatagttcatcgtcttcatcttttcccgagatataatcccttcagttcgataaactaagaaccaacacagtccacactactttcccatcaagtcaaacgatcaaaaccatggagtttcctgatactcaatccttagccaacaaccttccctctgccgggtcttcctacggtcgaaacagaggtgtcccgtcgtcacagacctatcaccgcccaccggcaatgtcttccatgtttgctttcaacgaaccatccgctccacctatcactgatgatcatcaattcaatgtagcgctcggtcctactccccatcctcaccctgatccgacgatggcaagcagtgctattcgagcagaaggggcagcaggagcagtaggagcaggtgcagaacaaattaaaacctatggcgattctcggagagagagttcaacatacttacccgcacgaagaccatctcagcaagcccagtggcatgctcgtcattccggtcatgcctcttcatctcaaccccaacctcacttccaatcgcatccgcatccgcaaccgcaaccgcatttccaaccccaatcttcggcccgttcaatctcaaactcattcttgccctcacaatcagcatattcacgcacagaagtcggcactggtagctcgtcctatactactacgaccgcggagaccacccctcggctttcatccgcccctgatccgtctcgtccagaagatcacagctcgactgaacaaccctggtcgatgggataccatacctcgagaggattcccggaatctgaccaaaaccaagccactgggtctgagattgctaaccacactcgcaagagttctgattcagaagggcatgagcatgagagggaagtggtggaggaggatcagaatgaaggagacgaggaggacggaagtgaagacgggtctagcgacgatctttatggctgggttcaagaaagtgcagcagtgatgatgatagaagatggcagaggaaaggtcgtcaccggagacgcactagatatgaatcgaagtgaacagctcgctctggatctcatcggtcagtattggtcctctcaatcaaactaaacggttgaactactagctggcaatgctcatttcttctagcttcactttcaattcaggtataacacatttgattttgccgacaacaccgacacctgctctagttgttcccttccttgaggctgtaattccttccctgtgcgcttcactcgtagtgctagatatctcatcttgcaacttgtcgcacttaccggccgagctggctacgctattttcgcttgaggagcttgatgtgtcaaacaatcctcttcggtcgcttcctccatctctatccgaacttcggtcgctccgtgtgctatctgcaaacgggatcggatgctcaaaccttccttcgtcgttcgccaaccttcagaaacttcatacactttgtttacgaagaaacagattgctatctcttccttcctggttaggactcttaccgaacattgagacgcttctggtagaggacaatccgttccatgggacgtggagaccgttggttgagcagatgttgattcgttggtcgcccggtaaattagaggaccttcttttggagtccttcagaaagtcctcgaaatcagaaaatggacaaggctataactcagactctcatcagatacagtccaccgcgtcttcatctataggaatttcgtcacccttatctctgtcaccgaagaacgtaagctttctggaggaggactttgagacaatgatcattccttcggatcacacaaactctcaaccagacacccttcaaaactcctcgtttcacaattcatccgctgcctcttctccttccagctctatccctcggttacggtcaaatactgtattccagagtacctttagttctccagtcagccaaccaaccagtcttgatccccgacagtcagcgccacccgacacgcgtcgttccccgaaccatgaagaacaggaggatgatcacaattttatgcatggagactcgacaggacgattgatcccaagatatcatacttctctaggtagagaaggaggcaaactcgttagtgcggcctatagagccaggaagccgaacgatcacgatgttctggaagagtcaccgatggaggatcagagagcgagcctccgatggtctcctggagacctggccggaagtggaaaggaaaaagatggaaaagagaaagataagagtaaatggggtttcctgaagaagatgaatataggaaagacgaagaacgtgggcagtggtggtggagcgttaggctcgatagaccgccgaccatcaggacccgttcattctaatacggcgtctttattagaaggtaacactcggttccgaaggccgacgatcgcacgaactgctacatccgtcagtcaatccacttcagctggcaccagaggaggtcctctagatgtcagctcctcatccaacggctcgtcctccaaggaagggttcctctctccaggaggcttgacgtccgaggctgctctccttgccagacagaataaaagacgaagctatctatcgttggacggaccaccatctttgaacatctcaatccctaaaacttcgcctttcttatcaaccactacgttcagcaccgtccaaccgataccgtcgccttcctcgatgactgctacagaaggtaggaacaggcgattggaagatggaagctcggtgatcgatagctatattcagtcgtctgaaaactcgagtacgtctgatcacgaccatgatctccggcattcagacttgcacccactcgacttgtcttcagctgaagactacagacagagtcaatatgccgccggactccactctcttatgggctacctccgggatttaaatgatttgtgtttaccacccatcgttcattcaccagagtcatctatggctacaggatttgatatgtccgttcaaatgtcatctcccgtagccacttcagtcctcagcgggcaaacatcctcctcaactaggggaagcatcagacggccaacgttgggctcagttgatatgaaacgagaattttcagagtcttccttcaatttttcacacaacggctcgagcccaagattctcgggtatagagacgacccatagcgacgagtcgaaaggcgagagagatgggccgagaggtttcaaagatgatagagtcaagcgcagtcgggtcgttcaggaaatctatgagtgagttttatggttcctcattgcctttttccggcgtgaatggccttcacgaatagcgactgactatggtttcccgtgcgcccttattttcaaacagaactgaactcacatacgttcgtggcttgagggatctcgtcgaaatatatgtgaaaccgtctgaagcccctgcagtcggaaactccaaggacacagtgatcccacttcaggagcgtaagatcgctttcggtggcctctctggattacttcagttccacgaacagacctttttacccaaactagaggcagcggctacgccagtattgaaaggaggagatgatctggatggatcagcttcggtcaaggcggctctgggagtggcagatgtgtttaggacgtacaatccgttcatgaggatgtatagtacatacatcaagtgcgttctgctccaccttttcttgttggcctgcaattttgtttcaaattttcatgtgctcactctgtgtacgcttgtatcatctctgatagcaatttccccaatgctctccaacgctcaagcatgtggatgctatctagctcagcacccatgccttcatcttccccgggctcacccaacgctagtagcgttcatgtagtcaatatgggcctcaccatgtctgctgtcacaccacccattcccgcagagtctcaaccgctcgcttcgtctctttcattgactactactcaacggaagcggatcaaggccttcatcaaagtaggtcttcctttcacatagttcaagtaagaagagttggacgtatgtgttgatcgaccaacttccgacttttattttcggcactccagagagctaaacagcatccgaggcatacccaaatcagtctcgatgcgtatctcttgctccctgtacagcgtattccccgttacagaatgctggttagttttttctctttcttattttctactccactgattggaataaagtgcctgacttcttcgcgacggaacgcatctgacctggatctccttcagttgagcgacctgatgaagtgcacgcctccacaaacgactcaggcgtacgacgttctagaagatgcgttcaaggagatggcttcccttgcttcttgcatgaacgaggaaaaacgggatgcagaatctcgacaacgcttggtaaattggcagtcccgaattcgaggtcgatttccatctccactcgtccagccccaccgaaagcttctccttgacggcccactcacgctcatccgactcgtgaagaagaactctgaactggcagaagtcgttcatcctatcattcacgatgatggaggggatcaaacgattacccctagcaagagcttgatcaaagttgaatgcctaggcgatccagacacgacagtattccatcttgttggtgtgttgacgagtgatctgtttgtgttgtgcaagaaggataattcgaccgatagctcgttcgagttgtttgcagtcttgagaatgcagacgaaagcccagcctgccagcgtcatcagcgggtccagtcagtttgccttacctgaatattctctctccagggagatggctttgctcatcgatgtttttttttgcgtactttatcacagcaatacgagtagtggacaaccgagccattctgtactttgaagccaagagcccaagtgacgcattgaattgggtgaacagtacgtgacctccgtgtacaaaacctgatctttagagtccatcaatctcagactaattctccattttcttgataaattctgtagtgctcaatgtttctttccagatcacacgataagcctgatgcttagaccttggtcaagatatatgttcaaaacgtttccaaaattcactttctttcccccttctgccatctatgagttgttcttctgcattctttcattccatttgcctctcgaatgcattgttcttaaattttctccttctcacttttcttggtcttttcaactctgcacactctttgatcatgccgttctttcttcttctcactcccttcacctgtttcttggattgccgcctgtcttcttttcacgattttctatatcttttgtttccttttcttctttcttgatctctgaacgggggttccttcccgatggtacactctcagctttcattacaagaattgttaaattgatgaaatgcaatgtttttcaccgacggaagactattgttacgatcattcatctttggtataaatctcgatactacgaactccccaccaaacatgttccagatcgtgtccgctgctcacacttctctcgcatgtcagcgctttgagctgacaacctgaagtcgcccaaatcgaaggttgacctgcccaatctccacaactgaaaagagtaaaggtcagtgtggattcctcttcttctatgatcacttgacaagatttttgtggttgcttacaaggcaatattgagaatcagatgttgagatcggaagtgttgtgatataggacagagaggacttgcgggaaagttcgcgtccggctaggaagagagaaaagaatgttcgatcagcgacaaggcaagagaacatgtcgtctatcttaggatagaagaactacttacaatgccccactcgcctacgttgacttttcctgtatttcttcgtggctcgtttcctctcttccacatccacatcgcgattccttccgtcctggtccatctcatgccaaatacgcctccgccctgactgttgaaagcctctccccaagaggcatatctgtcggacgaagagacgctgcagccttcgtttggccattgcccatgcgcattaacgtcacagttggtcgttttagacgacccaagctggtatcgacgggatggcatgttgcagcctggggtggtgtgaagagtatatgcattttgagtctggcgatgcaccccctcctgttatgatcatacgtgaatcgacttaaagtcagaccttagacaccacaatcatagaaggtccctctggacgcacgattatatctatttctcccaatgacggccaattggttaatccagtggtccagaatgctggctgttttcagagcgcagtgtcagctcaagacaagggtacgtggatgtttaaaacaagcatattaacccaagcaccacatccatatggcatatgatctatgtttatcgatagattgcatcaaatctcaaatcagcagggcagttcagtatgaataatagttagatagaaaacctacccagatcaataagcacaacaacgttctcttccagagcttgcctgctcctcagtcgaacagatccccttcctctatgcccagagccgacgacaccttctctatcagccataatataactaacaccatcccatgctcccacaaaggtcaaatttctctttcttgactgttctttcgaaagataatctgtgaatccgtgtgttggatcggcctctgtctcgaaaacaaagtttgaaaagaaagaagaaccagaataattgtttgcaagtgagaaagtagaagtcaaagggaggtctggtatggttattgattgagtgataacatttgaaaagagatataaggctgtaaagaagaaacaagcacaaaggcaaaccaggtagggtaatctgagaaggtgtggcatgttgacaataactagctattggtcgtccaaggtcaacttcaaaggtgagttggaaagtgcacagaccgagaatgtagcttgtcgacgaggcgcccaaatgactcaacgtcttgcaaacacagatgcgcaacgtgttttccgtgtcccattgctctctcttccaatcggaatcatgtttacatcattgtagaaaatgcttaccgaatcgatccagaccaaatgtaccaaaaaggaatggtctctgccaggatcgaactggcgaccaattgcgtgttacagatgtaaagcaagtgtgatagccactacaccaagaaaccatgttatattgagtaaaggttgtaaataatatgaacaacattgactactccaactggcttcaatttgtaagtgttggagtttcagcagtcttgacataatttcatctgtaatttgtaatctcttcttgagacatcatctgcctgcctctatttgcgcggagtcccaaggctctctctccgaagagctataaatattctagcaggttccctttctgttatcctggtttctcaatccattttactgaaacacctgggtggtgtgtatatggtttgggaaaccagtgaggacttgattgggaacaagtgccagaacgaaaagtccattttcacccttttatttcagtaatattcttcagtaagtgcggtcagagaacaagaggctaatggtagtgtttcttgtaggaatgttctcgctccatattgaaggagactgagcaggacctcacagaatgtatcttgtatgaatgtactcatccgtcagaattcattggcttgaatgccattgttttcatatatgacaaaccttcatagtcaagtatacaaaactactttgttgggagattctaaacaagtggggatacacatgagatatagaagatcataagacaattaggattatcagtcacgtgacgtataaaaggttacacttccggctgctgccgcctgtcccgtttcttgcgttccccagacatcttccaaaccccaatccttctttcttcgtcttccttttggtcgttcgctcatcacgaacaaaaagcagctttgagtacaggcaagttcaaggattgtgctttttgtaaaattgtgttcgatctcctcaaggtcgcgcactgtctctcaaacaaagacttacagtacaccttcggctttttcccatctataattcgcttgaccggctcccattcgtaccgttctctccatctacagcattctctatcacgaagaaaggaagagcaacagcatcgggattcttggattcaacactttggacctctatcgttccaacctagttccaagatttcgaacataataagcctccacgtaagtttcgacttcgtcgcttcgcttgcctcatgacctgtttttcttattcagctgctgacatcacgattggtaagatatacagcaaaatattaacttatattcactaccgaactcagtttgatagctcaaaatgcccaaaggctctgcagatgtcgaaattcctcctccgagaagtatatccgtcgatacaagggttcgtatcagtgtgtttcaggtcgtatatgtactcgccttcggcttattcatcacttcttgcatttgaattcagggcgcccaaatcttgatggaagactcgcctgctgttagtttgatctaccgttctcgttggcttccaaaagtttgactcgaactgacacgtacttccattgcccatataatgatagacaagagattcgagaggaatatatctcccacatcatattgaaccggtgtcacatatcgcagttgatgtaagttaaaaccttgtcattctagagcatatttgggccaagaagttgtcagttatctcatgtcttcgcaagatcacttttcttttgttcctgatatgatatagattggaggatctctggcaaaaatagtgtatttcactcgttcacccgttccgccgaacgggtttgatcattccgcgcccggctctcctacatttcctgtacaaccttcgagtcctctttcaacttctaattcctcttcaattgtggaatccaataagccgacaaagccaaacccaaacggagcactcacacctcgcatcctttctagcgttaagggtgccgacgataccttttcttcatccttttcggcatctttgaatttgttagactcctcttctggttcttcctccactgtccctgtcgatctgtcagccttatcatcatcaaaaaaggaacaaaattctcctattttcaatgggaatagtcagagacggccaaagtcctcggtatgccgaaaccggtctaggcaaccaaagattcgacgagctactcttcccaatcttcctggagggctattgaatttcacccgattcgaaacctctcaaatccatgaatgcatcgagtttatctcatcattaatttctcaatcagccactcgcaataaggtctcaatcgaatcgatgaaaagtggagtcaaaatcatggctacggggggaggagctcataagttctacgacctattccgagacgagttgggagtcgaagtcatacaggaggaagagatggaatgtctgatcatagggttagggtttatcacggggattcctagagaagtgttttggtactcggatgaattggtctatgagatatctcatctaagcttgccaacatcgcctccagtcctttcgtccacagtacttccgaactcttcttttccagaaactgcatccccgtatccaaatgcctctacatcgcctgatccaccaacgctaccgacaccgtcatcgacaagcattaagactcccagacctgaagatcttcctcgtccatcggccgatccaccaaaattctcggtatcttttgagaatgatccgaagcctgggatgcaatttccatgtttgttggtcaatattggttcgggtgtatcaatcgtaaagattgacaaagacggttcatttgaaagagttagcggaacatcattaggcggaggtactctttggggtctgctcagtctcttgacagacgccgagagtttcgatggtacgttcaatttctttcttgttcaattacttccatcgctgccgtcgatttgtttgtatattgacttcagaagtctatattccccgggacgaacagagatgttgaccttgtcggaaaaaggtgacaacgcggcggtcgatatgctcgtcggagatatctacggacaagattattcaaaggtcggtcttaaatcatcaaccatcgcgtcttccttcggcaaagtcttccaaaaaggaccgagaacggcagatggaaaacagggagaaggcgttaagaaggggaaaagcagctggaagcaggaagatctggcgaagagtttgctgtatgctgtcagtaacaatatcggacaaatcgcgtaggttcacttttttacatatgttatacgttcatgtaagatatgtactgaacttgtgagaacggttcttgtcaaccgctcacgcccaccgttatagccacatgaacgcggagaaatacgatcttgatagaatctactttggagggtgtttcatcagaggttcgtcaatcatccacctctatacgtcgcgttcattgcttggtcagggctaacacgacatctctgttgctacaggacacccggctacaatctctaccctgtcctacgccattagattctggtcgaaggggacaaaacgagctatgttccttcgtcacgagggtttcctaggcagtatcggagcctggatcaagaacgtagaattggggccagacagtcgagggtcgccatcgccggagaggagcgagcaagatgcatgatgttacattcgattcctataaactgtcttctgatacatagttcattcataaattgaaaacagcattgagaatgtctatcaaatttagtcaaagaaagaatgacgattgtcaagtagcacggaaaaatgcggcgatctccacttatttgactcacagggtcaccactgggcggtgcgagcatgagagtatttcaagtgtctgggcaacttttatctgattgacaaaccggagaatgcccgacaaactcatcactcatatctgattctccaaagtaggcaaaatttataggaatcaccttgttctaacaactgcatcagtcgtaaaaagacttctgattctttcactatatcgacatttatcaagttttgtagagacaaggtcattcttcttcatttctgtcatcgatgtcggtcaagaaggcatcggttcgaaatgcttcattcgacgcggaagacgcagaagcgggcaaatcttcagatcagcttccagctccaacgttcatgggattcaagatcagacctcgtccagcaggatacggaggtggcaaggagattccagaagaaagagtgaactttgtgtcatacctcctgttctcttggatctccccgatgctgagagttagtcgcgtggtattttacaacggcatgaatacccatcgctgaaactattgtgttgtttgaccttattgataggttggctattctagacctgtgagttgcaaagagtttctgttgatttcaaaagcaatggtccatcccttacttgacctatgatttgtcaacatgatggcagcttgagctcgacgatttctggtatgtcaatcaaactgattgtatctgattgtccatcagaccagtgaaatgacgcgttcgataaataaattggttttcagggagctcactgatgagtacaaggccactcgactagcgattgcgctcgagaaaaatttctacgaccgtgttcctccaagtcggcgacctatgcatctacggcccaaactctccggcttagctcaaggatctgagggtgacgagaagctttctggtatagagcttgaaaatcttgaggctcaagatcatgagcccactcaggaaatcatcaagaacaaggcaactaagacgaaacaggacgcaaaggatgagaagagaagcaaagaaccaatgcatcccccaaaggtcaccgaagatgaaattgtgtacgaccagagcctgttgttagccttgcagaaaacggtcttttggaggtacgtatatctcgattatcgtcggcatgtttgggatatattgcactactaatgactccttgttcatatttctcgacttggagagcagattctggatcggaggaatgatcggagtctgtgcagttgctttgctaacgactggtcctttggtgtcacaattaattttgaattatataactacctcttacaactacgcgcatcgagaacccggtcaggatctgcctacgccaagatctgttggctacgggattggactgggtattggtctttgggctatgcagcagggtgcgagtatatttgtcaatttgtttttgcaaagaggtctgatcaccgggtaagctctcatattctataccaaatccaggctcaaagcatctttctgagcggtgactctttttcaggttcatgctccgtgccgcattgatctctgtcatctcgaagaaatccatccgactttctggtgaagcgaggatcatccatacaaacggaaagctaactacacatatctcggccgacgcatccttcatggattatgcagctctgctttctcatgatttgtaccttcaacctgcccaaatcttgattgggtgtgtttgtcttttctcacgtcttcctttcttctatattagacattgctattgtctaaattcgcgaaaatatatgttgtgttacagggttggtattttgattcacctcataggatactctgctttggttgggctcgccgtccttgtcatcggtgtccctttccaaacttggttgttcgcccgactaattgggacccgacaaacacaaatgaaaaccgtagacaagcgagtgagattgctccaagaaattcttaatggtatccgggtcataaaatttatggcgtacgaagagtactttggcagtcgagtctcaagttatcgtagggaagagttgaaagagctaaggaaaaactctgtgatgcgaggtacgtttagatttacaagatcaagcgaaaaatacgcttgacctgataaaaatgggtccaactcgattgattttgctcaatgtgtatcgctagctttgatgacctctgtgatggcatttatccccgttttcgcggctgtcatgtcctttgtaagtgacaagctgaaacagacaattcatcaaatttatcactgacagatgaaaaccatatcattcggcttgacacagatcacctattcgctttccggccatgagctcaatgctgcagtcatcttttccgcccttcaagcgtttaataacatccgagcaccgcttctgattttgccccttgctatccaggcgatgtcagatgcatatgtgggtctcggtcgtatatcaaagtgtcttctagggggagagatcgataatccggttcctgtcatcttaaatgcggaatatgtgagtaattatttttaatatgacggagggccggttggaattggtggtcgcgcaaattctatatctcgtcctatgcagcataaactcatcaccgctgacccatatcttgtcataataaaaaatcaatttttccaggctatctcttctcatgggaactattcttgggagaccgtcgagaactcaggtgccggaagagagagtgacgtagtcagtaaagaccaaagcagcaacaaaaaccaagacaaagagaagctagcagtcacagatgggcaggattcgaagggtcaagagtctgccacgccatttgcgctgaaggatattgacctagatattcctagaggcagctttgtcgtcgtctgtggtaggattggatcaggaaaatccagcctgatacaagctttgcttggcgaaatgaaaatggtatccggaacagcggtgagtgggggtgtgattgtcttcttgtgtgcttgtgtgctcgtataaggtattgttggatacgttatgactaacgcatgctgtttcatatctcctgtgaatctatttgtctatttttgtgccgatttgtggattttctcgtctgtctgcatgaaaatagtatctgggaggatcatctgcatattgtaggtttactgtttccaaatttttcttaacacgcacattcggaggtgagtgacgtcgactgattaggtgcgcttcttcttcttgtttctttgtggcttttcgcaaacaaaaaaacgatgttcagtcccacaaaccccatggattatgtaagtgcttggttagatatatcattcatcttgagagtttttgggtctctgtgtttttcagctgcacgtagaattgcaaacaaatcatcattagatttgtctgctttccggtatgacctaccaatgcaacttgaaccttgggtgtggcccgcaaagacatgcatatgagcatgctgggggcaaaagtgctcgaaatttgatcagttgttaactatatcattgtatctgacactctcctgctctgatctgccatatcttttcaggaacgcaacgctaaaggagaacatcctcttcggctccgaaatggacgatgaacggtttactgctaccatcaaagcatgtgcatgtaagtgccacttcttatagcctgcatgagcttgtgaacatgctgggtaaattgactggcatggtcgatcgggcatcacctcatcgtttatccgcgactcttatgtttgtgacactgaatggctatatagtggagagtgacatcgctatgctgacccatgggatatataccgagatcggaggtgagagcgctatatgatatctgatatcgcgacggctgtgtagttgatatatagggcagcatagcaagttatagcgagctgacgcatgtcatgagtcgggcatatgctgttttatctcaaatagaaaaaggaatcaacttatcaggtggtcagaaggtaagacgcagttgatcatatgctatagctaagacccataaagtatgagtgatatcggcttgtttcgtctaatgcacgtcatcgcttctactttcaacactactattgctactatctcgtaggctcgagtgtgtttggcgcgcgcagtttactgtggtaatgagatcaatttgtttgacgatccagtaagcacctaatccttctctttcataatggtcgtctcacaacagaggataatgcgtgtgagctcacgactgagctcgcttggatctgctatgtttttccggtcatcactctggtgatgtagctctcagccggtatgtgtatcaacaggattgtgcttgttccttggtcggaagtcgtgtcagtcatagatgccacgtactgtctagcgttctcattcgccttttcaaccttgcattggtattccatatgatcgtactctgcagttgacgcacatgtgagcaagacgctcgtcgaaggtctggtcagcggaccgctccggaataaaactcgggttttgatcacgcaccatcttgaggttctgccgaaggcggatctgatcattacagtgagtgcgatgagtgcactgcgtaggccatgtataatattgcatattatagggaattactgatgccataaacatttacttcatattctgatatgtttttaatcgatgtattcatcaaatatttgtgtcaatacgtcaatatgatagatggtggatggaaaaattgcagaaaagggcacgtatgaagagcttctcgctgccaatggtgtactagcaaagctattggccgagcatgtgtctcagtcgagtcacgatggcgcggatgctgagtacgacgcaattgagactcgggaggatgtcgagctcaagacagtcggcattgaagtcgagcaggcggccgagcgagagcagctggctgagcaggcaaacaagctaggatctgataggacgaacgaaggcacagctgccgagcagacaaaggcgcaagatccgggggcgttgctgactatgaaggaggagcgagaagttggagcagtatctttgtctgtctatgctcgatacgttcgaagcatgggatcatatcggctcgcgcccatctgtgagtcgcttctgccaatctagttcgatcgagttctcgacagtaagcattgagaaggcttatatcccatatgtcggtctgttgtttcaaatgtcaacttagtcttaggatgctttgttcttgctcaagtaaatttgaatctctgtatgttctaaaaacttccatgaatgttctctcctcaatgcacatcactttatatcatcaggctgccaacgttggtaataccattttcttgggcaaatggtctgaaaactctatagatgggtggacccaaagtcaatgtgcgtcgaacttcgttgtttggtatagtttgctcatttgcacttaccttcactctggacaatctgtcccttctctcaatttcttccaatgcctcttttcttttattagacatgggactttatgctggggtgtgtcctgttctttctatcaatctgacatatttggatacctcgtcatggaagatatttctagagctaatatactgtatcgctcttgtcctctcagctcggtttagcctactctgtgttgacctgtaagttctgcaataccttcttcattcgtattgataccaaaactaatcttgactcaatttaatctaagttatcggatcgctcatggtgttagtatttcagttgaagtattgatttaattctacaactaattgttttccaactgatttgcatcatttctgaaaactcaaggtatctttcaacaatcaatgcgagctacaacttgttcaatgctgcctacgcgggtgtcatgggtaccccagtctcatggtttgacgcgactccggtacgtgatgcagaatgaatctgataccataaacccagtttgtttcgattgatgatattgataatggtcaacatctgttaggtcgggcggattatcagtaggctgtctaaagatatcaccacgttagatgatcagttgcctatgcagtggtaggtacaagatttggattgaaattgaacgaagatatatcaggagttcgataacagttccaggggttgagttaccgctggttgtcttactctattctcatcgatttattgtttggtaggaacacatttttgactatgagtctgaacgtcttcggaactgttgctcttgtcttttacggtacgcaaccttcttctaattttgagacgcgatggttttggacgatcaccgatatcttttgatgctgtcgttgggtctttggatagcttttccttatctgggacttatattcatcccgttgttcttgatgtactacttcgtggccacattctaccgagcgtcatctcgagaggcaaagcgtattgattccatcatgcgatccaccatatatgctcagtttggcggtaggttttcgtgatatttcgaaaagcaatagcagagagattgtactgatccgaggctttcaaaaaattttaacaacatgcgcaccgaacgctgttattttctgttcacagaaagtctcggagggtttgtttaccttgtattgacttgtgtacatagataacagagttctgattatctatcttgcccaacacgaacagaatgtcttccattcgagcttatggcgcagaacaacgattcattactcgaaccgagaacgcggttgacgtccaaaacaaatgctacttcatcatgatttcacttcagaggtacgcaatatatcgtaactcattccgggaatagtagaacatccttaacgatctcttggctgttcctgttttattctcgacagatggcttggtatccgactagaggcgcttggaaacttgctggttcttgctatctcattcttcggagtcggattcagaaatactgtggtacgacatcacactaattgattatagacatcatattgtgaaccccaagaagattgaagcgtccattgtatctttgcccccaatcgacaacagtctcctgccaaacttggcgtcgttcttacatatgctcttgctcttacgcagatctttgctcagattatcaagtcagtcctatctcctcctaacttgagctgtttgagggaatcagtggttgcatgttccttactcccaaacatttgtggtttttatttcaaatagcatctttgctcaaggtgttatgtcttccttatctatgtcgtgaccatctaactgactttgcttggctgtgtttggctattgcgttcggaaaacgttgttcagtcgaacaggacatgaacacagctgagcgagttgcgtattacgctgaactaccatctgaggcggccaagtcgacggctgacgatcctgcacaagattggccatctgcaggagaaattatgcttcgaaatgtagtgctgaagtatcgagaggatcttcctgccgtgcttaaaggcttgtcattcagcatcggtgctggtgaaaagatagggtaagtgtgagtgttatgcaagtggcatcggaagcaggcagaagtgacggatgacggccaatgaataaggcactgggactaacacactgacaagtcatttattctctggtgtgatcattgtcgttcgttacagtgttgttggtcggaccggggcaggaaaagtaagctatgatcaagcaaagcgatcttatgatctaacgcaactacacataccgaccatctaccaattctttttcatttcatctatcagtcgagtctccttcaagcgcttttccgaattgttgagctgactgagggatcaatcgaggtggatggcgtgaacttgcgatcaattggactggacccgatccggcggaagttaggaattgtgccgcaagtgagtttggtcaggtgtatgtaagtgaatgaagtgctggactaaccaatgtgtgcggctgctggttgtgaacaggatccactcctgtggaacgggactatcgcgtcgaatttggatcctgacggaacatgtactcctgagcagctgctttctgcgctgtaggtctgaactggcttgtgtaggtttgtctctgttgtcgtaacggcctaagctaattgtcttgtgcgtcatcttgtatctgtacttgcagcaagcgtacccatctgctggccgatccagacgcttcgccagaggtacaggcgcgactggagaaattcaagctgggtgcgatggttcaggtgagttttcacttgatatttgttgtctatatgttttggcggtatagcattagcctattgttcaatcgatatgtgcgctcatcttcatcgccgctgccatcgccaatggctgtaggatgatggggcaaatttcagtgcaggtgaacgacagctcgtagcgcttgcccgggtggtcgtccgagacccaaggtagatgttgttttgggtaatctgttgatcttattgtggaattccgagctgaccgactattgtaacagaatcgtgatccttgatgaggccacttcctccgtcgatatggagactggtatgttccctccattgtcttttcgacgaatgactgataaatgacgttttcatctgctttgctgtccggtcctgttcatcagacgccagtattcaggacaccatcagggttggtccatctctccattttcttctttcgtcgagtcgagccatcttgtgaacgcaataattcgactgacaccaaatctaaaacatacactaccgaaagaatgaattcaagaataagacaatcatctcaattgctcatcggtaggtactcctcgtcttactttgttcgtccctggagcttctcaccgacgttttgacctgtctcatcccccttgtagattggcgacagtcgcgttctagtaagtttggttcagtagctgaataaggaatttgaagaacatcaagcacaggccagttgcttactggccgctctatattatttccacaattttgtttgacgttgataaccgcgaacagtgaccgaatccttagtaagactgttatcttcctatttattcattttggaaatacagaaacaaaagtaggaaacttattttacgtcatctcgctgtgcgctttcgaccgacgatgctgttcatccgttcagtaatggatgctggaaaagtcgcagagttcgcatcgcccattgagttgtttgatcgggagaattccatcttcagaagcagtatgttcttcccttgttactcggttctgaggcgacggacgaaaaggtgacctgaccgatatgtgttttttttttcctgttactgatgataatgctgaaacagtgtgcgatcaagcccagctcacccggtcagacatccttcgaatcagaggagaactcgcgtagcgttctatttcatcctctctttcttcgtgaaatcttctaaattcgagatcattgttgatgtgttcactatcatcatcatcattatcactactgctcatctaatttcgtttttcactttgaaatcttcttcgttctttgctttgtggatggttctataaacagctgtttttggtgctgcttacggcgtctgatttgcttgtttatgtctttagacctctaatcaaacatcggtaatataaactctttagatacgcctagaatgtggaatgtgcaattcatgtaaagtgctctatcaaggggaatataaggttgaaactcgattgggcgaaacaatgtgaccggaaagatgccagacgaaagatactcgcagagcgggagggacaaagatttgggggattgtttttgacatatatgatagtggtgtagataatgttgtcaaggtccaaggaagaaagggaagaggggaaaagatgatctttctctgttcaggaaggctccctttttttattattgatccctcatgaactctagacgaaaacagcaaacttggcagcagcctcatcgaaagcaagatccttggcggccaggtcgagcacaagaggatgtgatggatagactgatttgagctggctacgaggaaggaaattttgatttattgaaaatggggttagttgtctatcagtgatgtcaaaggaggggatgagaaaacttactcaagtacagcctgggtgcctagtacaccagcagcagtagcgattgctcctgcttctccagtttgttcgtttgcgacctcgagcgctgcattaacgtcaccctctgcttcttctttgtgtccaagtagatgatgggccgctccatgggcagcaagaatgggagcggttcggccggtgggcgcaagaagagtctcgtcgtagaagtaataggcttgttggagagttgggccttgctattatgtgtaaggagacgaaaatgaaatggtgtaaaaatgaagatcaatgagcaatagaatgtcgaacatgacactcgagtctagactgaccgaacgaagagtgatccaggaatccatcagctgaacaagctgggagtcctcaccaaaggccttggcgtgctcgtacgctcgctttgcgagatcgagcctgtcgattgagaggtagatctgaaccaaaagtgcggagctgtattgataatttcgtcagatttcaaatagacgagaaaggaaccgatacaaacaaactcaccactccaaagagtccttgtgagcgttgagagcgtcgacggcctcttccttctcagccgctctgaaaaaggcagtaccggcagcaactcggacggcgttatcggtcgactcttcctgttcgccatcctctagctcgattaggaggtctcgaagtccgtcaagaggttcttcttggggatcttgaatgtatgatgccaggaaagagaatgccttgatttccggggcctcagggtctggtgatcgagacaggatgtcgatcgcagcatccgttgcgggagggagaagggctaggtgtgaacgggcgacatagagagctacagaagtagagtcgggaccggactcgatgagaggcgtgccggtagtgatgcctatgaattgaccgaggagcgtctgtgagcccgagatgaggagaaaagagagatggcatgactgcatgacggcctggaccacggaacaaagaacgtacactggttaaagttaccctggtggaagagatgcttgatgtgaaagagttgatcgctgtccatgttggctgatgagacgtggatgagagatgagtgtagacgggtgtgtttgctgatggagatgtgagcaaaacagaaggaaacgggtcgacagcaaaagccctgggcgggggggttgattacgtaagccaggttgtcggggatctactatacagatcactacaccacggtgtagtacattgtctatagatcgactacaaaacgggcctcgaacgtgttcaggcaaatgactacaagcctctctaatggctcgactagaacggtgattacagaaaacattacaaaacgaaccacacgttttgtagtaggctctctatagactcaatagagtaaagtgtagtgttgaacagttacccgcgtgatcataccagatgactaagcaaactatcacttgacgcgtaaccatcgacgcgtgccacgcgaccctcgacgcgtaatcagacgcgtcgggcgatcggtccccacgccttctcgcgctctcggttgatttcgctagcgccgaggatttcattcaactctttctcaccttttctctttacacgctcgctatcatcggttcatctcgggtagagcatacgtaaggcatagcacgcatcgcacccacattcgttctctcaatatctggacccatggcttcgacatctcagtcaggcccgaacagagagctttctccgaacagaccttccgccatagcatcaggctcggcatcagcgccggctcttgttaaacaggtagcgaacgagccggtcgatgccgctcatgactggcagactgggtgagcttccactttgtgtctggtctcgatcatatcagttcccccagaacctctcgaaaaagactcatggctggtctgatttggatttttctctcaaaacgttcttactttgctaaccttcgcttctactgaattgtttcctgtcgcgtgtctatatgcgttcgatcgtatcctcctggataactcctttgtttgactatgtccttttgtcgaatttctttcctgatctccatatgtctatcggtcgaacttgatggcgccctcagcttcatttgggcctttatagcaaagttccacccaaacatgatcggtaaaaacggtttggggaccgcgatggagtttgtcttcgccattgcttcttcatcgtcagacgtatatcccaagctgacctcgtgtgtggtccccacttaacgactttcatctactcgttttatctctttcgcttcctcttcttacttttccgttccagccttgaacaagcccttcataacgatggccaatccgactcactctcgtatgctttccagaagtttcttcagtgcttgaacccaacggtaaccgaccgaaatataaagtctgtcctcgtcttcctgatcatatatatcattccatactttctcttatctctgactttcgacccgttggctggtcatcggcgttccgactcaactagctttcagaccgttccccgatatcttgttcggagtaagtaatcatcctctttgttgattttgtctcgaatgtatgcctctactttaactgacgttatcttgatcacacattcaatctctccttgtcatctttcatcccacctatacttctatctatttttctatccaactcttcgctccttttctcttttacagcaatcgataactacctaaaactggatcgacaatccctctaccaccccgcctacctgtctcaccacgatccaccacgtgctccgcttcctacacaagcggaagaagacgaatggcgcaaagggctgaacccgctcagggctctctttaggctgaaccgagcagaaggcgaagtctcagaaggtgctaaaggaggagaggatgcggtcggttctagagtctggtctctgggttggaaaggaaaggtccgtatccttctttcgtgatactcactctctggaagcatacaaagcgcggtgaaacatgctaggatgtacgagagtacccagaactgaccgcaaacgatgagtctcgtcgtaccgcacttccccacctcgcagttaaaattgttaagacaactggtagattggcagctatacctggcgccttcggtcagggacaccatcaacctgcactacaaagttgtcagccagagacaaacggactttcacaaggacaccaatcctctcagtttcgttcatcttccttctttccccctttttcattcttcttcttctcgcagtaactcatcatccgttgtgctctcatcaaaacaatctggggttgcttaaattctggctttcagttgtcgaaccgttaggaatagatagatccaaaaaacgatactggttgttcgacgattcacctcgggtatatacctcgtccaacccgttcaaaaaatcttgtcctcttgttccaatctcgtccactcaaatcgagctcgaaagcgtgataaatcaactacgagccgaaccttcagctgataaatcggcacaaacaggtaacgcaaagacaaaagcggtcagaaaaaaggcggaggaacaggcaagggagaaggaactttggatggctacgttcttggaacaagagcatatgccaaagattgagaaagaacgcgctgtgagtcctttgctgctttctcttctgcttcttcttttttttttttgctactccgtatgctgtccctatagtttcttttcttctcctttctctctccgcttttttattctccgtgttctctgttttctacatttctctcctccccttacctccgtcatgattcccgccaatcagttggcttacaaattacatacattcttttcctttctaaaactgacaaaagcgccaagaaaaagcacgacgaaaactagagacccaagcgatcatgcaagcccaagcagctaaccggacgaccagaactcggaccagacaacaagctcatcgacctagttatgccgagtttgatagaaagtgcgtcctgttctcctcttccttttttctcttcttccccgtctcacttctcgagaggaaacttctgacaggttcatattaccaacctattggttctccgtccggttttttttttcttccttagtgatgtcgacgatgcaagtcccccttacccctgtctggaaacactcatcgctgacagtcctttctccaaacaatctacagtttatcgacgatcgctcatcggacgatcagtctcgtacatctaccgatcaattcgctcaatctccctcccgcgccgcgaacgattccgacgccgacccagacgcagacggaaggtactctgactccaactctgacggtgaaagccggccgtacactccagaccaggatcagaacaggaatctccgtcggtcaggaagaagctctcgactgttaccccactctctcgatccttcaagaccagggagcagtaccagtgggagtgggagcagtaccggtagacgatcagcccgttcttcccacaatcatattcaaactcacactcagccaaatggacacagcaacgggaacggcaatgggaagaaaagagggttcgtgttggatgacgaggaagacgagcagttggctatggcacttgcagagagtaaagctctagccgaatcacaagcacgagctcgagcgggagcggatgcagaaggaggagaggaggatgacaaagatatcgaattctcaaatgggaggaagaaaggtcggtacattgatccggatggagaagacaaagatgaagaagggcggacggacgttatcttagttgaggatgatgataatagggatggggatgagaagaagccgagagtgcataatcggatgggtggggtgatcgagattatagattgatgtgaatcattccctcttttcactctcttcatcctcttgatcctgacgccgcagaaagaacgtttgaagggaggcctaggactaattacacatcggttcgaacagcattcacaatcaaaaaagagagaaggaaagaatatagacatgcacatgtagagaaatataaaatgtacaaagatcaaacgtcacaaaggtttgctatacaactgtcataacaactgcaatccaaacacaatgaaagcaaacgataagagtatgatggaacaagtcaaaggacatacagattgagacggaagctgataatctatgaaaatggcgccccactacaggtgtgcattacagtccagtagatcccttgggcgccgtgagtggcgtagggctacctgagacatcaaaccccttgaggtcttcgtttctatacttctcatccttgtctgagtgatcggcgctctcagtgtcaccttctgaggagggttgttaagaaagaaggcagccaaattcagcgcaaaattcagggagtataaatcaaagatagccgagagaagagaaggattcgcaccttcattttcaatgttcactccatcgataagagctggattgagagctaaagctcctttggggatcaacgtcgcgatgagcacgacgacacagataaccgtgaattgaacgcctccgacatatttgaggatctccctagcagaaactctcgcagcgagttgccgatcgacccatttaccgagcaccgaactgagcacggcataaagcacgatgtaactcacatagaggaaagccataacggcacccagagcggaaacatctggatcgacgttctcgagctttgcaagggaactctggatgtaagctgctaatgagacatcgccggcagcccaaccgtaagaaatcgggatgaaacacgcggccaccttccatgcgtcaccaacccgacctcgagtcactgcgatgaatggcaagatccaaacaatgttcaaagccagcgcgtccaatctcaagaatggaatgggcgtttggatgacattcgctgtaagaagaacggacagcgctcccaagagttcaccaaagttggatcctccgacgatgatctgggaccaagaggacgttccgaggacctgcttggcaaagatcggcgcaagcccgttctcgaggtatcgatgaccgtagagagctatcgagtaaccagggatgagccatatgtactttcggtctcgggtaacgagtagcgcgccaaagtagatagcttttccgaaacttcgaattccgacccaggcagaatgcatgtaagtctgcttggccttcaactcgtcccgctccaattgttcgagttgagtagctgtccttttgccttcctctaagctggctacatcagacacagtcctccagactatcgcagcacaagcgaagaagatgggcgacaggaaggcagagtagttgtaaccaaacttggtgataagagagggagaggtgaacgctccggtcgtcccggcgacttcataaaggacatgaatgacggcgtccattcgcttgagctgaatacaggagagaagaaactattcatcttctagggcgcatacagtttgagcgacaagaaacaagaactcaccttctgcacatctcctccaacaatgtctcgaggaatgactcgccggatgagctcaaccatgccgtaagcgacaccactgatgatatagattgggaaaagtccatttgggttccatgtcccatattttgtcttattgttagaggttcggaacttgagctgtccgccagtggcagcgtcgcagatgaggggcaatgtagaaatcagactgaaagtcaacacggctgatgccaggacggatctagtagggaaccgtttgatgagaggggcgataaggatcgacccgatacactgcatagcagagttaatacctgaacaatatcgaaccggtgttgaggtatcagattcaatggccaggtgaaatagaagaggaatagatgaattgaactaaccagtcaagatggcaatcttggtgtacttgttcacgacaaatcgctcgttggcgatagtgatgaaagatccatctttcagtaatataagggaagagtgttaagcgcaaattcatccttcagcaacaaacttcctgtgaacctactgaagtattccaatgcaaacttgtactacaagccagcagagatgagaatttgggatgtcagtatagaatttcgtaagcctaacaacaaagtagtatcctcgcttacaaacatgattccagctgcatacttcaagatgttcaccctctcggttcgggtgaagtttgaaaataggttgaacggccacatcgtagtataaagaatttgacggagaggatcaggacagttcaagagatggagagaagaatcactcgaaaggtacgagtccaggaaagttcctttagtgagtactctgctctttagaagaatcagcgaggaagaagaaggggactgaagtatgagagagtagagctctcgaatttatgtctaagacttatgattgtgatcggtgtcactagctcaggagaggccttcggaagaccaccaagtggaaacatgatttggcgaacgttctcaacttgtaggcttctcagagaggaaagaactatccgttacatccggatgtatagtaagtacacaaaaggactgggtaggcatagccgtgaccgtgagtagaaatcaagaggtccaagaattttggactctgcgaccgcaactgagcgcgataaccgagaggaggtgagtaaaactggatcatgaggtcagtcagtcattcaagccggcttgaatgagcaagtttgttttcattctcgcttagccctgctacttgtcaaacagagattaggcgctttttgatcaggcatccaagcctatctctcgcaaaagcaagttgggaacatgatggctgtgatgggagacaactgagggggcacgttctttcgagaaggcatatctttcgtgttttggttctaatctctatcaggacgaaagaacattcgagagagggtttgtagatcagatcatcttggcgacggaagagcggtggcttggcagactgtcgcttaaagcatggtgtcttggcgagggaatgtggaaggcatgtgtacacatgaataccgtcaacgctcaacgctcaacgctcaatactcaataagtaaatgatgagcatgaaaagaaacgtttgatcaaacgtttccgccaagtgattgcaacagagatgtatcgagagtggtcagttagcgagcggtcagtcgatacagatggcgtggtgggagtaatgtagacaacgggcttagaagagattctgtagggtttttcttctagcacacatgctcttggacaaggtcaattgtagcgaacaaccaacattatctaaggacctacgacgccttcatcttgatgagaactagaaggcttacctgagagaaatctgttcctccatcaacatcctagtggaaagagagatctgcgttaataggaaaaatcaagaccatatacatatatacctgtgaattcctattgctatcaaatttctattctgtgtctctctgacatacgccttgttcagtcttgccatattgtttaacgcaagatagagcaaccaatcgataacgcaagcatgctaagttatagacctagcaacgtagatataaatgtacattccatatcaaggtacatctgccaactcatccactaatctacacatcgcttcttttcctagaggaatccaaagccatctcgcattcgccttgcctcttcccgtccctcttcctgctgtgtgttctgtcccatcttcgtacccctcctctgcctcttcctcttcttctctctcggtcacgttgtgtccgttgacctttttggaagcctccccattccctaaagcggcgggagattccccagattctaaaatcaaccgatggtctttgaattcagccaacagtgccttaaatctagtttcttcccttgcgatccatttctcctgacaggacctgaagaacaattcggtctcaattgcccaactaggtgttgtcaacatgctccctccacccgtgctctcaagcccaccggtctcaagcgaacgaagaatggcaagacagagtgacttgaacaaccgcctagctggatctgtcacagagatcaggatgaatcttgctccttcctcagtcgcggtgagcgcagcggtacttgaggctgaagttggtagatgagctgaagacgttcggaacgatatttcatggtcgtaatcttggagagtcgtgagatcatgccagaggaagttgaaactgcctttaccaagagacaacggagcgatcatgtcttcttcagggaaggtggtgctgcgatccgaggatttgtcgctttcatgttcgcgatggacagtcggaggccgagagtatagatcggtcgacgaaaaaagcaagggtgaatgaatatgttcgagcgaaagcaagaggtggatccgcggagaggaggccaggatcccaagtatagatttagacgaagcagagcgcagaagaaccgaaagatcgaatgaatgtatgatgatgaagagggaaaattcagctctctccggctgtatcacagaaggagggtgatagtaatagtgaatcttccaggccagaagctcgattcccgccattatcgaggttccagaagccgttgccgaggaggttggcaagataacagacttgacctcaggcatcaagtcctcaatacggttcaataaatctcgaataccaatcttagggaacaaaccgttcagtacgatcacatccccatcttcgctcagcttagtttctgcgaattcgttcaacgtttgacgtttgctgccaaacccataaaagagcaggttgaagccctcataaagctcgagaagccaagtatcgaatcgggcagtatgttgatcgtccgctaaggtggcgatctcagttgcgttcttatgataaccgggagatgaaaccagaagagttgaatactccttttgagtgagagagggaagcaaggaagaaaacacattggatgaagtctttgtcgttcgggcgactgagttgaagtaagcgtctgaggggatctgtcgaacgaatggcccggttgaaaccagcggtttcatctttgtcggcgtcttttggctaggggtccgtctcggagttgaagagggtgtattgacacgtgagcttggtgtactcggtgttgtgctaggctgtctcgaaggcatctttcgactgatgcggttgctgggggcagcggtgtccgaggaactctcgtcagagtcatcgccgtcctcatcagaatcttcgtcagactcgcctgcttcttgtgtcgcatccgagaaattaagatcatatgttctaagaggaatttttctggaagaaggagaatctgccgtcaaagagtcccctagctttgcgcgtttcggactgggtaacattgtcgagggcaaggcacaaggtgaagttgacaaataggttgaatgatcttgtgtaccaaagatgatagatgactttgattgatgacacggaatctgcgacgcagctcctttacctattggtatagagaagcaaacggaactttagagaacaagaccttcaaagaggagcagctcaatggagagtgtgtgtgatgatgatgatgtagatcagacaaacatcaaggtgcggatgttgttgaccaaggcgtgctgtgctcttgaagtaaatcacgtgagtggcaaacaacaaccctaaccacttgagcatcagtagcctcgcttctagatgccgctcaatctttgaatcttaatgaatatttcattatgtatacaaaactgaattcacacatgcgtgctcccaacctcctcaatgatatacatccggccttcatatgtatcagtagggcacgatcgagccatcatagctcaagaattttcctccatgagattccctagtagcctcgctgacaaccttgaggaccgcttgcgcactttcgtcggggctgatagctgtacccacgaacggattctcgtcatcgttgggattttttttttgaaggccgcatgagtcatatcagttttgacggctcctgatgaagaaaaaagaaagaagaaaacccttccaaggttaatcatgttctcctgttccatcaagttagagaagcgcgcgcgcatataaagaaaccgacctggatgcacagggaacgcaatgagtccggagtcttcgttctctagatggatcttgatagccgcatagttgaccgccgcttgagatgcgctgtaggcttcgaagggaaggttgaactgagaagccagtgccaaagatcccgcgattgaagagacgacgacgaatttgggtgcaacggctgaggctcggagaagggagtggaactccttgaaaagcacgacaggtccgatcaaattgacttcgtagtggacgacccactgtgcaggatccgactcgtgcaaaggcactacaccttccggtgaaccaagacctggaaatgttcggtatgttaacacaatattgtttgagttaccaggtccaatcgaagtagctgtttcaaaatatgataccgtcgactagacaacgccatggactcacccgcattggcgatgatgacatcgactctgccggcggccttcttgatctcttcagccgccttcttgttgctctccgtgtcggcagacacgaggccgataacgttgatcttggcctggctggtcttcgcgagctcgtggagggcagtcgaattggcaggagtccgagcaccggcaaagatgactttggcagggttgctggcgagtgctttgacgatactgagacccatccctcggttggcgccggtgactggagaggcggggcgtcgaagatagtgtaagcacgtggcggaaagagaagcaaacaaggagcacaagactgactgagatatacggtggtgtcggacactatcgtagagatatagttagttagtatgatgtgaggcttgacggctgatgagtgaaggatcaagatgagtgatggaagataaaatgagctgaacaatatgtgacggtcagatgtacaatctttttatatggatgagcgttttggaacgatggcccaacagccaacccagttgctgattcaacggtcgctatcccgggctagcatcgttcatccagtgctgtgttagtaagtgatcggtaatataatgcgatggagatatgatcaaaatcgaacgatgtccggacattgctcacaaattaaacgatgtgatccggagatcagtgtgggactcacaccgggctacgaggccgaagggcttctgatgttctgtgttgacatacttcaggtaagtaaatcaggatttgctcttgataatacactgtaagttctgtcctctccggcaggtcagcatgatttgtacatatcgatctcaattcgggtgagtcaatctgagggtaaaggtcgagatgtttgctaaaaatcagttggtcaggattgaataaaatagtttgtcgatcaaggtcttaaccaaaaagacaggcgtaactatggttacagtcataatttgactcttacttacccccgcttggacaaccccgctttatttgccaatctgttctcttctcaatcactttcagtcttatcatgtcttctctcttcttaccatccattctcattcgacagactattcttgttagaaagatctccagtggtacagggttacactcccgcaatttttatagaaacatgtctaataagattctagtcactcgaaagctttcggatgaagcgatgggcatcctccaagcgcgcaccaaagcggatattgtcgcttggcctcatgactcaacggcagacagaagctgggtgctggagaacgtgaagggagccaaaggcgttctctgtatgctaagcgacaagatcgatgacgagtttttggatgccggtcagtttttatcatgccagaggaatattctctccttcctgttctcgttgaacgttgattaattgcttgctttctcggatgtcttactaaatgtggatactgtagccggatccgaattgaaagcactttcaacatagtaagtgcacttcctctctgcgcccgtctttaaggctctctgtctttgtatgtcataaaccaagacttatcttgttgcgccgtttatcagctcggttggctacgatcacatcgctgttcaatctgccaagtccaaaggaatcaaaatcggctacactccggatgtgttaactgatgctggtcggtttctatctcccgtcctgtagtctctttgcaatatacttttgaagcaaacgacctgactctagaagggtttcttgtgtgttgccagtggccgacttgacggtgatgctagcgctgatggctctgcgccgaggaggggaggctactcgaatcgttcaagaaggcaaggtatatatattcaatccttgtcttggtttactggaaatctatgacggatcaaagactgactttgtgcctcgttctagtggccttcaatgggatgggcaccgtaagatttcctctgctcattgttcaccgagactccaacgttatgagctgatctctgcgtcatctcgaactggtagatacatgctctgtggttcccatcccgctcaaaaaactttggccttccttggtctgggtagaatttctcttggtgttctcaaaagaatgcttccttttggagtaagcacccatgtgctctactcaaactctggcagacatgatcgaaccgaagaggacaagaagatcgaaaaggaactaggtatcacacttgaatgggtctccaaggaagatctagccaagcggggtgacgttctctttgttctctgcgctggagtaggtccgccaggattgtctcgaatgaagagaaagatacacgtactgaacccgactgtttgtctcacgcctttcgtctcttttgaaagggtcccgccacggccaatttggtcgatgaaaagttcctctctttgatgaagccgacctcggttatcgtaaatgccgctcgagttcgtataccttttttctgttattatctatcctacgctccatcttgtattccaaacttcaatagggagctgattcattctctttctatacgtacagggctcggtggtagactcggatgctctggctaaagcgctcggggaaggtcgaatcctcggtgcaggtctcgatgtcgtcgctggtgagcccaacattgggttatatcatccgctagtcaaagagccccggtctgtcttctttttctaccttgttgagaccataaaacatccatcttgtctcggaacactcactctttctgtttgtgaacttggataagggcagatgtgtgattctgccccatattggatcagctacgacggagacgaggagggaaatgtctcttctaggtacgttgaaacgaagtctaatatatacttgtgatttctctcaaacctgttgcgattgcttactatatcccgggatatctctttttttgctttatacagcggtggaaaatctgattcaaggatttaacggagaacaacttcctgtagagctcaaatagactcgataaatttcggaaactgatagaccttctgctcttgcatcatgtgaaattttgaacttttgatctgcaaatgattcaatggcttgacagcatcctctgtggctgaggcgcgagtcgaaatcattgaagataatttgaatcaggtatatatgattgtcattgagattgtctactgtacagatagaattcttcaatgatcaagtaatcacatcaaaaagaaaaatagtccatgaagaacgtgaagcgttcgtgacaaatgaaaatatatacatacaaacacgaacgtatacatccggtcaagagaaagttgaaagatgatgagagcgacatcgatcataatgtccaattaatcattgagtaagaataagacacaactggataactgcagatacaaagaaaagaggaagcaaagagaaaggctccatttggatcccatcttggatgatattttacggagtcgtcgaaagtctactttcgtgatcctttatcccagaaatcaacgatcgctccaacttttgctcgtttcccattactcgccagaatcacctctttttggtccgcttggctttgttctggccccgtcccttgcgttgatttgactcctgagtgagatccagttttcgattttccctcagctttcgctccccctaacgcagcgcgcgggccgaggattcctacagatgacgacgaggccagagtagatgtcgagtttgaagaagactctctggatgctgataaatcgtctgccagattttcgagaccggagtaagtatcttcagatactgtatgatttccttgagctgaagggggtcgactcgacagagcggatgtatacctcttccgaggagggactattggggatcttggtcgatcagacggaggagagggtgagggtgtaggtgttggaagatgctgagaggccgagacatgctcctcggcatcgatcgtgttggaggattgctggtcgttgtgatgtggtagaggagagggagaatgattgtatgcggaggcaaagtcgtgagtgtcgaatgaagagaattcgtcagcaaatggagcagattgaattccctgttgaacactatccgattgagattggaatggttgttgatattgctgctggtgctgttggaaaaactgttcaggcggaggacaaggcgatgggggtaacggtcttgaacgtgccgacgcggtcgatcccgttcgacgcagcgagccggtcgaacttgtatagtaaggagaatgagatgcagcaagttctacatcaaaactggaacgaggagctggttgagtctcttgagatcttgtgaaccggcgttccgtttctcccaacctgttttccagttcattcctcaatccactaaaatcattccgcaatctccttacttcatcagcctctcttcctactttaccttccagagcgccgagccgatgatcaaatcttcccactcgatcttccaatgctttgacatgtccgacgctccaggtttccagtttttcaaaacgcttggccagcagcgcaagggttcccggaatatctagcgttgaggggttcgaagagtcgggaaccaagtaggccgatgttgtactcggcatgggaaagacagtggagggtgctgagggtaatgggttcgtcgattgatgctgagataaattccgcatacttctagaggactttagtatcagaagttaatacaaagttgcttgatctaagagtcaacgactggtccggagatgatctttgaaagaagaaagaggcagatggtcaagtacgaacggtcaatctccttggtcccttgccctctgcagtaggttctctcttaggggggctgttgtcatccttcttgtccgttctcatcagtttctcggcctcccttctgctccagtctctctcctcctttgctaatctttcaatttcttctcctgaaagtccaggtccaacgtcgagatcaggcaaagcatacgctcccacgatcttcgaacttgcatttgctgttgatccagctccaactgtttcttgatctggttgaatggaggctccaaagaaatatcccaacgattgagatcgaccatgtgctctggctcgtgggccgctctgaggaagggttgtgctggtctgaccttccgcagaagatccaaatatgggaactgctgtattgaggttgatcatgtttgcaaacttgttagccaaattccgaagagggggaggaggagtttccgagcgctcaataggtgataagggagcagcaggttggttgaagctggatgaaagcacagcggaggatgactcggtcggaatcgagtcgagagaattgctcggagggtgaaacggagggtcgactctagaatgaggccgatatagcgatctttgttcaaacgaggatggttccgggaggtcgagtggtgcaggcggaggtggaggaggagaaaccatgttgatatatctaaagcaagtccagtatggttgatcttctagacggtcgcaagtgaaagtacggagggagaaggaacaacgacaagaggctgagaacaaggcaatgtagaaaatcagcaaacacgcgttaatgacggtaacgcgacggagtttacgcgtcttgggcacgtgacgcacaagaaagctgtgcaacctgggaaacccaaattgtaaccattatctactaaggctctttcgccttcttacttggtcgtaactatcactcacctcaccatgtctttcctactcccctccgctggatcgtcctctagagcgatcttctcccgctccgtcccgctaacggcagttggaagtcagcgattcaaggccgacaagaagaagagcgccgcgccggtcaagaccggaggcaagaagccaccgccggtcgatacatcgggagattcggctacagacctactgaaaaaggttcgtcttttacctttggctttgatcagatgcacaaacatcatgtcctctgttgttttggcggatatagcgatggagagctggaagacatcgaacaccaacgtctgagcttgatcaaatcagagaacttgtccatgcctaaagaagttcaagaacaaagaaaaaaaagctgacttgtctttgggtttctcacctattcgtcctacgtatcctttcgcaaatgatacccattcttctgtcgaatataggacctatacccccctggctcggtgtctgagagtccctcctcaattcctcggttggaccgaattcaaaacatccttcacctctctccgactcctgaagttcacgacacgatcacccgagcggctcttctcgatcggctgaccaacactgaacgtcaggttcagtctcttcgagctaaacacgccgcaatgttcaacgcttgcgaagagttaagggtgtcgtacccttcgttttatgagttagcctcggaggaaaacaagcccagtggacaggctggaccggcggagaacaaggatatcaagaacttgctgaatggggttgagcaggggaaagggaaagttgaaggcttgttcccgcgagaaatgagggtgttcactgagacgcctgggaaggatgggtgggactacgagtggaagtgggtaccggaggaaaaggcaaaggaaaaggttcagttcgagcccactcagtagtcgaccgaggcacgagttgaagaatag

SEQ ID NO: 624 - DNA, 23398 bp, Xanthophyllomyces dendrorhous
agaatagatcgtgtatgaaaaatggaaattatgaatgccatgatcaaaaggatcaagctcgtttttggaaggtcgtcttcccttgttgtgtctctcttactcaatttggtttaggattctcctactgtgatttgtttgtagcattctgtttcctatagcgatatgctctgctcactgacagaatctgctttgccaaataaatctgaacattttcgtggcatctttacacatcgtatcaatctcctctcaatgtgatctcacctctcgcactctccgtttctcctcttcttaatttgctccaaacccacatagctccatcccaccacccgaatgccagacctcctaacagtttcgccagcatcttctctgatgatcgtccccagctgtctaatacaggccgcactcgagtttgctgcgaagcactgataaaacagaaggcagaaaggaagaaggaggggatattgtagaggatgaagaagatgacattgaaaggagacgggaacctgatctttaggacgccttgtctttgcgtttcttccagcggtgctgctcgttcgtcatcctcctcctcaaagcttgaccgggattcaaaaagaagtgacggctcagatcgtgaagaaggtgaccagtcttgaaccgttcgctttcgaatccttctggcctccagtccgatcccttttccccattctttgacccattgatcttcttccgcttcctgtccctctacgtgcccgtttccattcgcagcgaaggacgttgacgatgcagatgatcgattgccggactggccggcagtcattcctctagcgcatccgacgactaacatcacccacaaaatcgccactaacgtgattgaaagccacagtcggacagcaaacggtgctatccctggatcagccggggtcggagtcgagcctggttcttcacctgcgggggtttcaccaggtccgaatccagatgaagatatggaaacgatgaagaaaccaaaggcaagacctattcgccagagatctccattgagtcccaatgcgagcgcaaagaatacgagcagccccagtggagcaagcaggatcattgggccgaatgatcgacggatcactgaggaggcgtaggtcgtgaatggtaagtatgtgtctgggaacacatgagcgaacgaaggcgatgaaggcgtaaggagagaaaagaagaggaagggaagagagattgtgagtaccgggtaggcgtatatacgaagacttgcgaagggcataagaaagagagaaagtgttggaagcagcagagaacgtgagcgggggtgtttgggtgaaggaaagaggagctgaaggatggatcgatcagaggaggctatcagcgcgaatggttgggaattgcttgcaaaagaaagactgtcatcatacctcaacaaggtttccaatcgaaagacaaagccaaagtatctcttcgaatctcagacccgatcgatattccagactctctgactctggtatcaacctgcctggtctgagcaagatttccgtggtaagcatcgagaaaactaatctggacacgacggttgttgtatgtaaccggctgtatttaacggaaaagaagaatagtcgcgttctgtcagactaaatttcatgacaatgaaagaaacaagatcatacgaaccaaggtgagatgtttcgttccaagatccaactgatcctgtccagtacacgacctataaaactaacatccggacctctgaagctctcaaccgaatttggattttcgctggaagaactttcaagaatgtcgacactttttgtccagagatactcgagtcgacccacagaggagatgtataaagatgtcggagagacagtggctgaatgatcgtctaattgcggcggattgaccattgcgggtaggaggaagtccttgaaccaaaccaaaccaaataacaccagatgagagaaacagaaaccatcagaggaaggctatcatcagatagaggaatttgatgagatgggcatagagaaggcctgaagcgcactgtgtgcttgtctcactggatgaatcaaaacaggatggttgtccacactacaagccgttcatcttataggagagatcgtagggtgaacgtcggctgttctcccggcttatgtaatcgtttcgcccaaagccgactctgttgacattttgacatcgtattcaacatcgcctatcctgctctgatagacctcgaaagaatacgtagccatgcagtttatcgctcaaagtgatgattatggagtcctgtgcctagttggagatttatacagagagaaagaggaagagaacatatagagacgagcccaactaagcaaccgcggcgccagccttcttgctcttccgacttcccaccttcactttcttctccgccgaccttttcggcacatcagccacatcagcaacctcgatcggctcaccatttccttcctcgaccaccttcgcccttttggccgctctaccctcctcagtagcttcctcctccttctcctgagtagctgccaactttgcggcctgcttcgctcgcttcctctcggctcgagccattcggaaagcttgatcttcagcatcagccttagcggcttgttccttccacgtcaacttcttctccaatccatcttctccaacggcagcaacctgttcttcagattcgagcgcggcagggtcgttggcatagacggaggcagagggaagagggaagaggtcatcgtcgttgtcgtactctgcagaatcaaggttgccattggtaagatgagaaggcgaatccgcacggtcggttgaggaaggcttgattgggatggagaatggttctgggaggagggagccggtgagagacaggatttgagacgacacgttcaagctgaaaaaatcaagtggaaccacacaaagtcagctgagtatagaacgatgaatataaagcaaatagtgttctttttgggggacataagactaactcgatgacagtgaatttgactttttcatcatcttcacccagaatcttaccagtcacccgacttctccatcgacctgtcgagaactggatgacctcctttgcctttcctttcgcctgcgctacatcttcttcgacctgcgtctgtccatcctgctcaccctcagccatagtctcatcagtctcttctaggatcggttcaggctcaggagtgggcggcgtgtcggctaacgatgggtcgaaatagtattcatccgaggggatgtgatgcatcgggattgatacgttgaaggtcttgtgaatcaggagcgaaatatgcgacggcgacgaaatagagtgagtgccctctttgaaaaagcaaaaaagacaatacaacatgagatcaaggagaacgaatgagtatggagaaatccaaagccagctttgaaaatcagaacataccaagagtctgtccggttttgggagcccaaatgatagctccgaattgtacatcactgatagcgaatggacagtcgtttaacacgttcgacacgggagacatgaattgaagatttgaatgtgagagaaggacaccttgaagcttgggaacatatctaaggaaaagagccaattgaggctaaattatcagtacagagcctaggaaaacgcgcactgaatggccaacctgagagccgttcccatgtaagaaaaaaggaagaaagatccaaaacaaaagactgacttcatgaccaaagaatccaacatctcggcgacacctcctctcaaattgccaacgaaggccggagggacggaaagcttcatttgggtggcctggtaggtgaatggagagtgaatggtgacatcctcactatccgagccagaggacgaggaggatgccttggcgtttgcgggctttttggaggatttcttttgcgtgctgcttggatgagtcatggtcaagacggttgttctttccgtatagaactgataccgagcaagggagagtggtcttgaggattgatctggtcgaccttttgcttggttcgagtatctttctttggagaggatcttcaaaaaattagtttactgacaaaagacttaattaaatatttgaaaatcaaaaaatcatctatatgtcatgtgtgtcgaaatataccgcccacatcaccacaccatgggaacttgtccattcattcgttgtaccaacgcgcacatgccattgggttattcgccatttgatatgcacactgggttgagctgtgaagtagaatgaaaggagtctttgatggtacaaagactgatgaacagatcagaggaaggagtcagaaatttgttggactaaagaccattaattagggtaaagtctcaggaaacacaagaaaatcatgctcaaaagggagaaaagcacgtcgagcataactagaacaagaatcaaaggtgatgacttcgaaagagtatcaggaagaaaagaagaagaacagtcaggaatggatgcaagacggtgtagccgttaagacgggggatcactatgatagactataaaaaactaggagagaatagacaaagactacatagatcaagaaagattacagaatcgatcaatccattaatcattcaactagatcacaatccgatcccttgatctccatctccactctacacacactcacatatcatctgctcaacctaccgatctctggactcagtctcacaatggtcagtaaggaatacataggacaagtcgtatcagccatgagctgacactattcttctctttcaatcgacccatccaatcgggcagtcggacgatgatttcatgatggacgtcagtagtttcatcgttccttggacctgatttagagtaatgtttgtatcgcctaaccatacctatctcgttcggtgtttcacgaccatcaggatgctgctgatgaggtcagtagagtcatatgggacaactcttcttgttcccttctcctaaacttatactgagtcttgacctctggtaatctttccgtcctatctacaaggattatgaccttgactatgacgacgacgatgatgatgtcgaggacgaggaggatattgatgtggaaaacatgtattaccaggccaaaggtacgttgttgttcaaaaagtgaaagggaacacccattctaacaaacgatcaaggcgatatcgcttggttcacccttctcttgaacccctcctccaggtcaggttgaggatgacccagaagaggcattatcaacttttagagagatcgtcgagcaagaagaagagaaaggagattggtgagtcatgatattctgatcaccgtaaagagataaacaaaagtgactgaagacagaacactcattcacggccatgtactcttctaaatcgtctgggcttggcggattataggggattcaaagcgcttaagcagatgacaaagttgttgtactgcactctcgatcgcccagaagacgcgctggagacttacactgagcttttagcatacacaaagtcggctgttaccagaaactgtacgcgtcgctttgttatgttttgtccgtcttccgaaaaggaatgctaatcagtggacgtctgagcagattctgaaaaatcgatcaataatattttagagtatgttggtggtgagggaaaaggacaaggtgtccagactaatcttcagacactcgagaagttttatgaagtcacaaaaaagagtcttgaggagagcaagaatgaggtgggagtcgatcattccttatctttatattctgttgatccatgttgtcattcgggagctgaccgactggatgggtaaatatattttcaaagaggctttctgtcaaggcgaacctgaagctggcaaagctttggctcgagcggaaagaatgggaccggatgaagctggtgcgcaaaatgacctttcctgtggtttgttcatcgtatcagttaatcgaaacatcaacgctcatatgtttgaacttctcctttcgcttaaaaaactctcccctaacaggtccttacagacctccatgcattctgtgtcccgtcatcctcttcctcgggcacatcgagcgaagatcagagcaagggcacgatttgtacgtccttccttacataaatcgcacggctaatatatctagattgtgtgattggaaggattaatatgattgtgtttgcgacgctttttttgctcacagtactcgaagtatatgcacttgaaattcaaatgtattcagaattgaaggattatcgaaaactcaaggtaggtccatttcacctatgctttttggtcttacttctttcctgatcaatggacgttgaccccgatcaatcgcaggaaatctaccgagcttgcctgcaggtcaggagtgcaattcctcatccgagaattatgggtgtcattagagaatgcggtgggaagatgtggatgggagagagtatgttcaaaaatcttaatttgcatatcagccgaacatttatcaaacttctttctgccgggaaaacaaagaaaattgggcccaggcatctacagatttctttgaatcattcaagcaattcgacgaatcgggatctcctcaaagaattcaagtattgaaatatctagtgttggcgtacatgctgatggggagtgagatcaacccttttgattcccaagagacgaagccgtgagtttcttcgtcagttcttgagacgatggtagcaacagatagatgctgactttgatcttctggtccacatttcagatacaagaacgatccggagattgtggcaatgacgaatcttgtggccgcttatcaaagaagagacatccatgatgctcaaaagattttgcgcggtacgttgttttgtatccttctccatcgctatcttttcttcttcctctttattcgcgatctaatcaggtctgaattcgatttctcttttattcatcttcgggtgataattgattagaaaacaaggcaacaattttggatgatccatttatcaaggcatatattgatgatgtgctgcgttcactaaggacccagtacttgttagatcttataaagccttacacaaggatggagctcagatggcttggtagagttcgtacatcagtcatttagtttttgtttctcattcttatgtttgtgagctgaccgggatacgtgtgtgcttgttttactcctcatccagcaattaaacgtatcgagtgaagaagtcgaagatctcctagttggattaatcttggatggaaaagttaagggaaccatcgatcaagttttaggtcgactagagttggacagagggtcagttttctcttttcgtactcttcacgtgaccatcctctgacatattcttctttcctctggcctttttgacaactcgtaaacatcatgacgatggttgggaaatcttatcctcagacatgcggttgaaaaagcattatataagaacctctcgagttggtcatcgaatattcaagacattcagacgaccgtccttggaaagcatgcgctcggaggaccgccgacagaaggatcaggactgaacagggcgaacgtgccgttcttcatgagtagctgagaatctgatcatagaagagacgaaacatagccttactttgttccccgatccttctcattatgtatatgtacttatcatgagcagcaaggctgaacaaaatactgagagaacaaggcaacagaccagacaagagtgtagcggagaccgagaaaagatgtatactcatgtcgattgaaagagaaagaccgtatgcagcaggatctgcactagaaagttcaacgcttgtacattttcctcctggcggaactgaaagagagaaaagtttcgcttacgtacttatacgatagtcgactgtcggtcagaacctccttcgacaacctttgcttcttcccatccatctctgcccataggacatccttcattgcttgcggtctcacccgtgacagatcgtaatggctcctaggaaacaatctggctctgtaggcccctcgaacgctcaacaacctggtctatctcaccatcagccgatagcgtcatccagctccaactcaaattccggcccaaacttgagtacgaacacgaatttgaagcgaaactcaaactcgaacacgggtgtcagtccaaactcgcttgctcttgcaaggctcggttctggttctggtcctggtcctcaatcgggaactccttcaacgccatccggctcgaattttctctcgacgtctggagggacgacggcagcaaccacagctgctggggagcactcaaaagatgataaagtgcccgcgtttcttcataagctttcgaggtgcgtatcttccggctctgattatctggattccgagcagttcagtgaagaggatgatcagtgaaggaagaccggtcggagaaaacacggaagaatctgatgacgcgtcaacctaaacggaaagaaacgtgctgaaagagacttaatcatgtcttcctctacctccctgttccaaacccgtgtgttccgtcgagcgaatgtaggatggtggatgatccagaactagatccatacattcattggagtgaggatggagaatcttttgtcggtgagttcctacacatcctgggcgcgtatggaccatccgatcaaatgacaatttactgattgacagtttgacaatgtctcattcttcgacgtctagtgcctaattcggaaacatttagtaaagaagtcttgcccaaattcttcaagcatcagaacttcaatagctttgtccggcagctcaatatgtgaatagcagggctttttttcacttctctttggtgaaggaaaacgatgccatgtactcatgcttgaacataactcatcatgcgctttacaaaggtatcgattcaacaaggtgatggatgaccgacaaggctcactcaagcccgaaacaccgactggataccttgtctacaagggacctaacttccgacgtggtcaagccgatttgctgggcgtgatctcacggaaaggcaaacaaaaagcatcctctgctgctgctgctactgggatgaatgggaacatcagcatgaaaggctctccaatcgttcctgtagagggagcgattgatgctactaccacgttcaacagtattgctcaacttcgagcccaacaaacgatcctctcggatgaactgaaagaactacagaactcgaaccagcatctctggcaagaggcgctagcttcaagaaagaggcataaacggcaccaggatactactgatcggatccttagatttcttgctggtgtatttggaccatcagcagcgagagatattgcttcggacggtggatcgagtgctggggtcggaccgcctagtcatgatccgacgtgtcatgacgaatcaggagacggaacaaacgcaggaaccaacaaggatagtgctgggaagagagaagttgcaatcataccgagaaataggggactcatgattggaaatggcgggcaggtatctaggagactggcaccgagtgaagtggaggaaattgagctgccatatgcggatggggagaacgagcttttagaagaaattgaggaaatttcatctagtgagttgatatcatcgttcctttatgtttgttgattgcgctcgagaaattcaatttaacggatcaatcattatcacgttaaaatgaataaaataaaaaggcaggttcacccaccctctctcacaagcgatgcaagacccctcacggactctcaatcggcctgcgcttcctactcgatcatctcgtttcaatcgccaacaattcagcccagaagataggtttactactctttcgcccaacgggccttcgatctcgtctccttccgaccctacgactatcagcgcgcctagtccacagcctttacctccatcagcgtcatcgtcgaccggaacaggacttgaagtttcttttccgaagtttagacggacagagagtgcacctatttcacaaacaatgactcggtcttcgtcctatatacctacattaccatcatcatcggcggcggcgatggcaggtgacagccatgctgcaaacaccttaccagcttcagaaatagatgctgcgccaagtccatcagcctctcaagcaccactttctccgtttagccaatggatgaatattgatccatccactgcctctggattttctccacggacaacacagagtatactatcttcgatcgggtcgttcggcttgccttctccttcagtctcccatactgtacctgtcggttcgaccaactcctttggatcagaatatcatcaaccccatcaactctcatcgacgacgactgcgagtgcagggcaactgccccatcagaattcacatatagcaggtctggtaactaaccaaccatatacgtctccaggggcgtcctcattccaatcatcatctggtggtacacctgcctcgatcacccctactcctaccccctctacggacgcaaattccgcgaaccatccaacactgcctcccttccctgttccatctgcactggaaaccaacggacagttctctccctcaatccttggtcaattatcgtcatcattttccggttcattggcgagaaactatgaatcagcagacgccatcgcagctgatgtggacgcccttcaggataacatcgacgccttggttgcctcgctcggtgtaggattcaacgttgataccacgcttgcgactcaaccaccatcgacatcttcaaactcgacgacaccgaacggacacaacggtgatcatctgacgagcgaaccctgggattctcctgaacttcccgctcctgtttcaccatcctcattggcaaaccagcaggtcgatccgtccaacccggtggcgtcttatcctcaacatccttcagatctgagcatgtactctcttttcaacgatctatcagattcctcccacccgtctccatctcagtcgacaaaggcgacgacaacgacgacgacaacggcacctgtacaatctgtgcctttgacgagagggctggttgactcttcgatggattcgccgataccagctcaacatgtatccgacgatgagtttgacaggttgatggctgcgaacgaacgggccggatcaatgcctgctgtcaaagaaccgagcgtcgcaacaggatcagaaccaagaactgaagaagcagacgtagaaggaggtggtggtccgaagaaccggaagagaaagtcaggggacttggaaaggccattggatggcacggacgggttgaccgaactttcgaccttatcgaaaaggggaagaacttgagagaaaaagagaattacctactgccatccttcatttgtctcatgatgcatctgaataatataaagatgtgatgtataaaatgtatttgtttcgcttggttctagatcgccacacaaagctgggctcggtttgtgcatcggacgttgtttgtttccacgtaatggtcacttcatcggcttagcttgtcataatcacttttctcgacgcctccatacccatagaacacacagagaagcaaatcgcgttgtgaaacacaagaaaatgaaacggcatccgagagggagcaacagaaagtaattcgagaagagaggagaaaagtcagatgaaacagagctagacagacaaacaaaaaagagagacgggaaaaacaacaagagattcagaggaaataaacaacaaaacaaagagtaagacaaagaaaaggaaaaaaaaagttgaaaaatgatcatatgaagtagattggttggaatatacagatgcggaaggagaacaagcgatgctcaatggcgggtaatctccgtttttctctcgtgtatatcaaaggagaaaaggaagcaaagagagtggttgcgtgtagattaagtaggctcaggtgagagtaacgaaaaaggtataccaagacgaaaacaagatagcgaggaaaaaaaagtaagggctcgtcctggattgaagacgaaagcaacggaaagcaaggtgaagccatcgaagcaggtatgctcatttggaaaggaatcgggttaagatgtcactgttctgttgttttaattgatctatgtttcgagccgagtctaagtttggttttttgaagagcaaaaaaaattatgatcagcgttcccgaaatcttattagacacgatatctggagccggtaaaaactcaccccaaacacggcctcgcgtcggttttgaaggagacgtctgagtaggttgactatgcgtttgcgccttagaaggagcgacaattccaaaaacatcaggctgagcttgaatgcctatatctcgatgaggaggtgaatcggtttgaacgcccgagacggcatattgagtggagagagaagagctgtgatgatgaccgtggtggtggtggtgatgatgattagaagttcgactgtaagaggcactccctgaggatcgatgtccaggacgtttggcacccccagtaggccgggaaaagtacccgccgtccttgacgttatcatcatcctcgtcgctatcctcttcctcgtcatctccatcgtcacctcgatctcggcttctctcttggcttctccaatcaatgtcgatatccttgcttccccggcgccctcggtcgttgtagacaatctcgcccttgatggcaggcgtgatcgctccggaaggtttcgagacctgttttgttccctggagcctattggcgtaatttttgattccaggcatgctgtcccaggcgtttcccttgtaggatcgcatggcctcctcgaacgacaagaccggtcgaggggtcgggaccggggtcggttcaggtgaaggcgtggcggcatgaaaggacagctgagggatgacaggagattcagacgaggaatttctagctgaaggctcagcaaaagtaatcaacgggtgttctgggataggaggagtatctcctcgggggaacacccgagaaggggtcttccgatggcctctgttccaaggaagagaagaatcggctttaacggggactgtagggtttgcaggggtgatatatctgttgaatttatcacaatacagacaatatcgacagttagacaggactgaggtgaattacaatagacagctgagaaaacataatggctgacctgccgtcgtcgaccactgctggcaacttccagctctctttgacttttccttggcctgccgcccaagctcgctcctgttctttggcctcctgtccagaaagatcccaagcgttcttgtagtgctggttgatgtcaacctgcatttgatagttgtctttaggaggggacgaccgagcaggatcccactgggcaaagtacgggattccagtctcgggctggattgtgtgaggagcaggagcatggacggtcggttgctgatcttgttgaggctctgtttgcgtaggaacagggaatgaggctgcaaagggcgggaaaggctcggcgataggagctggcggaacggattcctgccgtcgaagaagatcaactctaccttcgaggggaagagagacgtaaccttgatgttgcttatcggtccatcctcgggtagccacatctcttaattcatcgaggttcaatctttcgctcggtccttgttgataaggctggttccaggcagcctgtgtcttggggatttcccaggttccgatttcttccactcgcttgctttgacgaggtcgaacatacctgtcatagacagcgtctgaaaatgttttgaaacgaagctggctcatcagtgttgttttcgtaggtgatttgaaatgcaactgcaaacttacaccatcggtcgactaggccaccataatcataagcaccctcggtgtttgggaaagcgttgaacgaaggaagttggccgactcgatagtcaagtgtggaccaaggtttctgagcaccgatgaaatgtacacaatggatctgtcgcccatactgtgcgtaggctggagcgtaactgtacgaagcaagacatgatcaatcagcttgtccatagatgcttttccatagaagcgcatacactcacgtgtaagcggccgtaggcgtagtattgtaactatggggaagtgaggcagagtaagagtcagccacgtgatagaagctgaggagcgaaggaataaagacgcaagtatacatacgtgaaactgattctattccacattggccgaccttcttctccgttaaagtactgattgagaatgctgtggaaagagaatgggaaaccaggagaaattttacgatcgtcgcaaagatgagtggggtgtctttgtttggagggtcaaaaaaagaagaactacgagaggcttacccttggtcgcctccgtcgaatgagccctgtccgacggaagattcaccatctccattcatcatctccatcaaccccacaaacgtttttagggatggctgcaggatcaacactccagagttgaagcaatcaggccaccctgtatctggcgaggcgctgaaactgatgtcatagagggaaaaaggttcaaacaaaaaaggatgtggaaacgtcaaggtataaacttgggcgcatttgaaggcaatcaaaatagtacatacacatcaggaagggcaaagagatgggtgatcggtcgaagagggagaacatcggcatctaaaaagataactttggcgaagtttgtgagtcgaaagacgtgtagcttggtgagaacggtgttgagatcatggcgacctgtgagaaggtcaagaggaacaatagatcagcatggatcaattgtcggaatctgtacgctattattatctgtttttgtggttgcagaggcttcgggatcgaatagatagagcttacccaggagctctaaaccttttgattgatgaacatgctccagcacctccaccccgacaacactgtcccatacttcgcttaacgctttgatggaagctgcatcgaccgtttcgggagtgacgatgcataccagtttaaaatggacggagtggacggaggatggatggagagctcgtaaggcatgtccaaggacaaggacgcccggtctgaatagagagggtgacaaaaaaggctgattagttggagagccctctctagctgggatccgaggctgctcttgagtgagatgagtgaggaaacaagatcgggatgtgatattgggagaacaccatgcgtgcttcgagctgcctgcctggtcttgatgccactgagccatctttccaaggccgcgcaactctatctccccccccatcgaacttttctcgcttccaggctgggaaactctccttggacggacgcgtgctattgaaaaaaaaacacgactgctggacactcacagataccaatcagaggtgagaagagtaacaaaagcaaaactagttggctgagacatccctaggattccgttggaagagtttcaagaacaaggagaagagaacagctgtcagacgaagaagaaagataactgatatgccctgtatttgtctgacgcagaaaggagaagaaaaaaaaggagagaagaacaggatccactcactacgttctatcctgcttactttcctgcttcccacttggacgttccgagcgagacacagacacacaaagagatgtgtagagagagcaaacggctgtcgatgatacgaccaacgacgagcagagatgggagtaagagtctgaccgagagaaccaagccgatcgccgcgggtttcgtgcggtcccccaacaagacggaagcggtcagcttccccgcaacagcagctccggagaaaaaaccctgttcctatttttttattttattttcttttcttttctttctctgccttttgtctcgttagaccaatctcggtgggccagaactacaacatatatatattcccaaatacttatcgttcgccttcggcttccgacagttgctcatccaactctgtcaatttggccgtcgtctcgtttgcctgcaaagcctcatgtaacgtctcgaatccgcctttgccctgttcgacatctagaaacggaaacaccgtatacagatcccagacagatagatagaaagacatcggctctcgccagtgtcaaaatgagtgcattgaaaaaaaaagtaagaagacaaccccaagtcgtgacagaaagaaaagaacttaccatccaagcctatactcaaatgaatccgatggtccgtgactctagactgttggacattgtctgtttgacgatacgataacaacaacaacaaaaaagacccaaaaaaactctattcgtttcagtaccggcgaactaaataaacgagatatacgtcttccatccgacgcacatgttcgtatccgatcgcctttaccagtccctttgatctgggccctccgactctgttggatgtctgaagcgcgttcttgtcgtgcccggtccaacagacgcgaccgaaggactttgatggctttagctttattctgatgggtataatgaggggtttgttttatttttgaaatattaaattgcaactcgaagttcagtatgaaaacactataaacaaagaatcaaaccgtctgccgacgcatgaacagcatatacttacctctggttgagatctcgaatcttgcattgatactgtgataccagttggaagatggaccagccggacggctgaatcggtcgtgttgacatgctgttcaatgtagaatgagaatcttcaagcagttaacaccaagcgatgagatgttggcaaagaaagaaagaagctctgacctgaccacctgcacctcctgagcgcatagtgtctatccggacatccttcatgtcgagaatatcgacatcagcactgtctccttctgtcagtggccctgtaggaatgacctgtttttatcaatcacactgttagctttttatcttgacaaacgcaattcatacaatatttggccatgtgatggacttgcatagacaacggcggccgaggtcatgatccttccagctgtttagaaagagagcgcgatataaaccacatgttcatcaacgagaaccagggtttcacgtataccaagtcgatgataatggattgcaattcttcactaacccttgtcggcttcgctaatcatctgtagtcggtgcactccagtctcccatctgaatcggccgtacacaccgccctgccaacgattgtatgcctccgatacgctcattacttgcccttcttccgtcgcccaaccggcttcatctacagaactcggattccagacctcgataatcaacttggcatagccccatgccccgactttcgacccagtgattgcgatcgtccgactctccaagattcgatgtctccatccgaggcgggtaaattctcgttcgtaccacaaaaacaagtttaatatccaaagcgcgctgtctggtccaccctcaccttgggagaactcaatgatgatcggggcctggtccagttgaggttcatcagccgaggaagatgcaagagagaccaacgttttttcaagagcgagtcgagcgtttgatcgatcagtcgaaagagtagccagatcctctgaggctagatcttcgagctcgggtgtcgatcggagtagatcttgatattcgttccaaacctgtatacatcgtccgaatgtcatgagcccgagtgatactctttctcttctcatccgacaagagaaattcaaacatgataatgaagaaacatgattcattgaatatcgagaaaattcatccacaccttctctgcatcaagacagtcttgaaccgatttttccacttcgccagcctgtttcctaagctggagtacgtctatcggattggacgtgtcaggcgacttttcctccttttccaccgccaaacgtctctgttcagccagccgtttgcccagctggacgagattgcgcatgtttgtcggctccgagtttgtcgaatacaaacgacaagacgatggcgatgaccgccagcgagaatcttgtccggtaaacacgagtggaccgccgactcggcttcggagaccttcgtcagaacgctgtaaacgtcctggccgtaatggacggagagccagtcggttcaacgtcgacggtcggaaagatcccttcatgaaacccgatacgacgtccaggccgtattcttttttatctttctttggatcaacgagaaggcgacagaacgagaagaacaggaagtctctatctgatcttgtttctctcttcctctctgtcgactataggttgaaccagccaggtgagattcaagtctcgaaacgcaaactagacttctctcaaataatgtattacgtaatacgtgatcatcattctcgtcatgtctgtgcgacttgacttgtaggtgattcactagcatgatctgtttgtcagagtatcaagtttgtgtgtgtgtgtgtgtgttgatgtgatagtggaccgtcgaatgcagagacaaccattccgacaaattctttctcaagccatggtttcctcattcgaacatcatcagaagcttggtataatatttgtacatagatctttactctcgtcccgttcgccaactacatccgtccaaacaggtcctacgagttgaaaagaagctgagtatagtaacttttgaaccagacaatcggagaagaacgtcagatgagatggaaccgatcaaataatgcttgatatcacgaagaaaaggtgcaacgagaaagcgaagaatgatccgtacgttttggtgtcgttatcccaatgatcccacgtagcgttcagatcagcgatgtcctcggagtcttccgatacaatctctctggctgggatagcgaacgcaatggtttcatagggttctgctgcaatctgtcgcacggtggaacaattgcaggaacgaaatcgatcgtcccaaaaggaaacaccaaaagaataaagtcgagacaaaaaggaataaaacactcagttagatcactgcgttctctttcacaagaaaactaacactcaaacggaacgttgcatccatcatcgatcaaagaataaatcaatacgaacaagtaggtactgaatggctcgattgggaatctctctcctctgctcaaaggcagacataaatctacggataggtctgactccatccttgatctcgggcaagtttgcttggaagagcaatcccaacctgtgtggggcagtaggctcacgaatcttggtaactttgtaccctaccatatgcggccagaaaagagtgaaccgtgattagaagccgcgacgaggtggattgactcgctctcatcgaaggaaaagaatgtttgtaaacagcacgaaccaggccttccgattttgacaaagttctttttgagcacctcttgagttttcggtagagtaattaaaagctggttgtccttgttatctctggctgctcgtctagctaagttggtctgatgcttctttccctgggtatgggcgagataggacccttcatttgtgtgaagtgtcaaacaaagtcgacattcaatcgttcccagatgagttcggaggatatacgggtcctgttgataaggagaatgcgtgaagacacagcaatagattagtgtcaaccccgcaacagaatagagaacacaagaaggaagccttactttggccaaatcaatcgtctccatagcgagctttcggagacgctcccttcggtcgacattagcctccgagtttcctgccggtcctcctcctccaaacttggatccaactcggttttggtaatctgatcgggttcgagatagacatagcgtgatgatagagtacgtgaagaaaaagacgcgtttgtgttggagggtatatagaacggaagagatgcgtgagaaaccacgtatcaacgatcggatggcaggtctaaatgaacatgactaaaaactttgtaagactcggaagcagcttacccattatgcgttaacctcgaacgaaatatgaatgtatggtgatatagtagtagcaataacgattctgctggtggtggttgtcgacgatagaaggagaaggtgaagagtcggcaatctgaaattgattaggaaagtctttgaaattctgtattcgtttacttgcgagatttcctaattcgtcgttcactccatcggtcgacttcttctcaacattaacctctccgagtcgggtcattctcattcttacgtatagacatatgagccagggaagctcgttccgttatctgaacaggctttcagcacgttcgaactaccaaagtgagtcaggaatatgtacaatctagacttgtcgtccaaattagctgaacctccgatcttctcaatcgctttcagcattcagcttcggacggttcgaacggaatggccaatctccagttccggtcggatcctcatctcatcggtcaacgttctccacaagctcttgtgcaagaacagatgctcgaagaagcccgataaattctttggacaaagatcggtcttcgaatgcttcttcagttgacctcgaccagcttgagaacggctcacttgagattgatgaacccacaaacaactcgaccattcatccctctttcccttcaccatcttcacctccgccgtcttcacctccgccgtccgcacctccgccatcgtcttcatcacaaccgcattctctgtcatggccgtcagcacctcaacctgtgtcgtcttcacagccgataccactgtcgtttgcaccttcatcgccgcctccaccacgcgcctccctttctcgatcgaacttgaccccttcattcgattctttcagctcacactctcctcctcaatccaaagcgacttgccaccaagctagtgaaaaaagttcaacgtctagcgcacctctatttgttcaaactctactagtagccccaacaaatgcaaacccaccttctgcttctccctcagaggctgcaataccaaagagcatcggacagcaactcattgatcgtcaaaatgaccccgtcgctttgaggagacttgccaattggctcatgcaagaccgacaccgagagaaggattttaaagattgggggctgatatgtcgtatgtgttttcttttgataagctttggtgtgacctgagagttattttgccatacatgagctatcttctcactgccttgttgaacatttagggatgtgtccacccgacctagctattcggatgttgtcctcaccccatgcgtatggcttgaagcctatgcagaaatcacctatcatatctagccaggtgtatcatcttcgatccgtcatctctaagctagtcctctctcatcctcaatcctctgcatcctcgctctcgacatccaatgccgagaacacatcttacaacttgatgcataatcccagcaagttaatacctctgcttaaccagttgatcaagctttccgagctttatctacccggtgatccgtatatcttactcctagctcttcgcgcgtacgcatctttccctgggataggtgactcggggcgggcaagagtgatagaactcattcacacgaatcaagcttcctggtggcctgatccttctttcaatcccatggatagtgatcatgaaggatcccgcaccgctcgctcacccagtttgaactttaaggcattgtccatttcgctaaagaaccaacggtttgaggatgtgaaccgacatcgattgactgacctggatgcatggaccattctcaagcaagtcgacagactccggttactcgcggaccttagcttggaggtctgttcgagctgggaccgtcaacccgtcccggcgcctcttcaaaaacagcgactccggctccttcgaccgctacaacaactagagagactctcggatgctcctcctttgtcagaccacactccttcttccacatcgtcggaaacagagacagctcatcggccggcgatcgtaccctacgagcagatcgctaggttcgtcactcccgccctgtatcaagcgcccaccgacccgatcgtccttctcttttcgatgtatctccttcacttgacatctgtcccaggcgacgcgcctcttcgcactctctccgctcaagcgttgggtcccaacggcgtcgagcgggaagttcgaggagggttcgaaagtacgaaagagatgtcagagacgtatcggttgatgaagaaggctataagcgtgttgaagaatgtgtggggtcaggaaggcgaggtcttatgggaggtcatcaaggaggatctaagatctcaggtggttgaggctgagaaattgaggcatgatcgggcaaagggcaagacgggttcattgaaacggatgagttagcgtcatgaagttgtatatcaaataacgttcagaactatattcggcctcataagcgaactagccgacattcaaagaaagagaaatccctttagatgtttgcaagtcctcattcaaaacaagttcatattatcttctttttgatgttgcgacccgggttccaattaattatctacttcgaaggagaatgtcgttgatctcaatcccaggaccctgtgtcgagtgaaggtacattttcgtgaccaccgtcacttgatgaatgaaaattaaaatgaaaggagaaatgaaggagataatgtcagaacttgagccaacattgacggctttggcaaaatgaaaacggatggtatatgctacgaacgtttgggcgaagagatatcgaacgatgctcctccagacattcccgaccgccggacagcctcgaggaaggcgagaacgttggcttccacgtccgggtactgccagtccggctaagatgatggttgaagtccgcgtaaagagaagccatttgaattagcgttcgaattggacatattcctgatagagtataatgtatatatctttttcgagagaaagaatgaatggccttactcgggcaatagcagcggcaacatccccggtcttcgatactttccaatctagagcgcccaggttattgctgatggcggtggtcacatcgtttaccacagttcctctcttctcagctggaagaatccccttggtgccgaggaatcggaccagggtcttgtcggtcatgatgttgtggtggaatctagcagtggagaatgcttgactcggaatagggatctctccatccaaaagctttatgtggattcatgttgaaaaggaatacatcggccgggtttggaattttcgaatggggcatgattcgatgatgtgatttacaatcaagtacggaatcatgaagaggaaagtggaaagacgcatggttagagactttgttctcttgcagccaactccggtttctatacttgaaaaggagaactctctgacgggacggacgaaccttagagaacagctccactccaccagcataagttgctccggcatccaaggcctcttgaacttgatggggttcacagaacatcaacaaaacaggtggctttgtcgagggatcgcgaggaaagttcagtcgtcccctcatcgaaggcttcttcttgtccaactcgaccgaaagctgaacatctattcctgaccatgggcggccaacttcccaagactaacctcagtccgaaatgttgtttcaagtttcaggccatcaacacagagttcagcatgcaatatattatag

SEQ ID NO: 625 - DNA, 15767 bp, Xanthophyllomyces dendrorhous
atgcaatatattatagcaaagcaggtgatagttcttaccttgagcgtgttgaaggcttcctcaagactcatcgagtcttccgaaaacacgatcttcgcctttttctttgaagcatctcggacggaggacattgaaaagtttcgtacgatagacgagttgaccacattcatagagcttgcctaaaataaaagaagcatttgttttggacagaggagatcgactgattagttgaaagcattccgcaaaggaagagaaggagccgagagtgaccctccaagaaacaactcgaacgatttatctctgggaaaacaggactcactcggaaagagctcacgggcagtctcgcattggctgcacacctaaagatggccgacatgattattgttgatgatgacgatgaggcaagggatgttcaagttggtgaatggatggtgaaaaacgaaaaagagtgtgaaataaagactacgaaaaaacggagactgattacgaaatttcctaatccttttcgcatccccagatcctctcatctgcctacatccaccttgccatcaaccatgccttcgtttccggcgatacctgctctgcctagctcgctcacgtcgtccaagcaggctctcatcgctaccacggctgctgtctcggtagcaacgaccgcgctctcgatctataccgtccaagcccttcgaagatcaagcagacgggaagcccttaggaaagacgtcaagcgagctgtcggacagcaggacttgaataatctatgggatgaatcagacccagcggtcggcccaggagctggtcagctagatgagatggacaaagaagtcagacgtatcgtaaaggagagagaacgacaaggcgacaagtctggtgggaaaaagactcagttttcggaggaacttattagagagcaggttcggtcaatctcgctcaactatcacgtcctgtttcgacttcatggagactagcttccgtcctctttcaatagacaaggttcattcacttaacaccttctctttctcttcaaaattcagctcgcccggaactatgttttcttgggagacgaggctatggtcaaagtccgaaactcttatgtcgtcattgttggttgtgggggagtcggaagttgggcggcattgatgcttttgagatcgtgagtcctcctgtcgttgtactcaatatctcaagtctatcatatttctgcttcgtgaggaaaatgcggccaaatccttgagtctgacagtgcttcttttctgaattgatgggatctaatctgttgtgtcgaccgcaggggtgtttccaagatcatgctggtcgatgtaagccgcaagtcattgcgctgacagactttacagacaaacgactgatgttctttgacaaccattctgcactctcatagttcgatctgacgaccctgtcctctcttaaccgacatggtacgtgtttttttactgatctagaccaagataattcagtacaccatcgactcgagaggcaaacatgaatctgatattttctctttcagcctgcgctaccttggcggatgtcggaacaccgaaagttcagacaaccaagaagttcctggagaaggttgctccctgggccacgtaagttaatttctgatcgagagtccatcgtgaatgcttattctcaaacaagatttctaatccttttttatacctctttaatcgttgttctacctggctgattaatgatgtttaggatagaggctaaagtcgcgctttggcgtgatgggcctgaaggggctgctctcttagagggtgctgactgggttatagacgctatagacaacatcaccactaaggtttgacctttgcacatcccagtatccgtactcctaaagacccggtccactgaaattcctctctctcttttgaaaccaacgctcctctctcgatcttgttcatctccttagtctcaactgttggttcactgcaaaaccaatggtatcaaggtcttttcatctatgggcgccggtgccaaatccgacccgactcgggtccagatcgcggatatcagcaacaccactgaggaccctttagctagaagcatcaggcgaaacttgaggctcggtggtgtagctagtggaattccgttcgtcctcacaaatgcgttcttaactctttcatcttccggtaatagtatcaagactgcttattgaaaacgttttgcgcccggtggaatatcctctgtctacatggatcatctgtagtgtggtattcagcacagaggtcccggccgaggtgaagctgttaccgttgccagaagatgagttcaagaaaggcaacgtcaaagaacttggagcatttgatgatttccgagtaagtccgccatgcatgcttccatgacgtctggttgttcatcctgatcaaagtgtgtttgatccgcaggttcgaattttgcccgtgttgggccctctacctgctatctttggactgaccatagcgacatacgtccttcaagatcttgccggcaaacccattcttcaatctatggaaaataaaaatcggaaaaagatctactccaaactttacaacgacctgacgatccgagaatccaagttcttgggtatccccgaaggacaccggatcccacttgatttcacctcgatctcgttgatctacgaagaactccatcaatgcggtcgttctgtccttccaagccctatctcttctccgttcttaccgttgatcgctcatccggtctgtcagcggcctgctttggtcagatgggatctcggtcgacctctctcggtggataactgtgtgttgatggaggtcaaagaggccgatagacatcagcatgagtttacggctggcagaacgttggaggaggtctacggagaagacgtcgtcaaaggtgtggaagctctgaggaaggaatcaagaagaatcttgagttggatggagtctagggcagattgaatatcaaatgcatgttctgtcttcaaggttcctatctcgtcttcactctcaaatattttggtgcttctcccgacactcacgatcaacatgatgaatcaggtgtcttgattacaaatttatgcatgaaatacagagtccaagtgattccaaacgaagataaaaaattaataaaataaaataaaataaaagaagcaagtttttatggaactgaatgggagggaaggaataaccacgcaagaaacacaacaggcaagaataggatgagacaacacaaaactgaagagttcgtaggaaaggaggacttctcatataagcagacaaaggaccgggtttaagagctgataggctgatatgagatagagaaggcgcgttcaaactcacactcacactcacactcatgctcgtacataggactacacgactacaggaaaaaggagaaaggaacaaacacaatgcaaaagttgatacaacgcggagatatcaaggggtgagaggtacgagaagtgttcttttaaacaaatatgagcgagatggagaggtgaacggataggacaagaaatgacaagattcgaacaaggattgagaggcatgactagcaaacatcgttaggatgacacaacgctatatatgaatattgagtgggagcggaggagtggtgtctacaattacgtacaactgatagtcaaggtaagatttttaaaggacaggaaacaacaggattgactttttttttagcggtttcgcatatcaagaaggagcagggaagaactatcggcaagaatagcgatgggaacgatcaataattcaatgcgcttaaaccatagtcgatccattgaatgattcctcggactgttcatacccaggaggcagcctttcttccccctcatgatatcttctatcctcttccctctcttgagaaaaatttctcgagaatcctgctcttccgtggtcccaaacaggttctgcttcttgatctagatgagtggtggccacgctcgaccttgtcgacttgatcaaggactcccctaagagactgttcccagatagatgctcgatgggcctttcgtaaagatcgctaaagtagccatcggtgaagactctagagctggctgattcaaattccattgctttggtctgtcgcatgagtgctggaattgtgtttgagtttgcgcaatgaagggagggaggtagagggaagatcggtgatgacgaactccatgcaaagtgagacgctgtggtcataggaggagatgaagaaggggtaaagggaagagcatcgggcatggatattgaccgtcgatgtttcgatatcgtcggcctgtgataagagatggaaggagacgcaggtagaaaatcggatggagagtcttcggacgataccggcgatgtttggggaggagcggaagtaaaccgatagaaagaaggagtaccataagattgatgggaataagagtaggaatgattgggtgttggtcggggtcgggccgtgggttctccgtaggctccgaacgagacggatcgactaaacccaggttgaactgtatgacgatgaacttgatgtgctgagtcttccagttgtcgcgatgggtagtgcgcatagaacgaatcagacgacagcgacatcgttcgagatagattaggtctggtttccagtccgagcgcggaaggtacgtccattcctttctgggaattgaattcaaacgagctgaacctatgattgtcgggcgacaaagtcggcgacaagatttcgtagctttgaacctggctccaatcaccgacgccctcttcaagactaacatcgtcgctcaggatcgatcgagtccgatggtcctcggccgaaactccacagcatgcccctccacctcccccacccgcttcgaccaatccgattctgctgtggctcgagtgggctgcttgacaatcagtttcatgagaatgcccggtcgaggcgggaacgagttccattcggatgggtgaagacgtcgaggacggtggagagagaaaagtgatcttcatcgttggcatcgatgagtcgatcgagactggaacttgcgctcggtcctttcggcgacaccgatagtataatagtgagacgccgatgacggcggatacaccgataagtacgagacatacgaccaggcctatggtcgcagaggaagtagagctagatggatgaaccgtcatgcaaacggataggtgagtcagcgggttcgtactagtggacatgtgcatgagtaattatgaaaaaagaaaatcgatgtctggaagagatgcacaagtgcaagtagccgggagtctattctatatgatagaaccagatggaagacgtaaactcaccttgagaacaagccgtctgactgtcgtgggtggatgtacattgcaagggactcttgttgttgccaagagtgagaagaaaaggtttccaagaagatgtcgaaaagtagatgaatttaaaaaagcgaaagtcaaggcgtaaggaaagtttgaaaagaaggcgatcgggtttgatcgatgaatagtttaatgaaggatagagggtgagcagttgagttgatcaactgggtgcaagaatcgaacagcgacagcaaagggaatgacaaaactcgatggagaacttggcgaagggaaaggaaagcaaagcaagaacgagcgtcgccaagtgaaagaaaccactctcttgggaagaaagataggaaaggagaaagatgaaagaaggagacgattgaagagatcgaaaaccgacgagcggcaggacgcttttggggaaacccgacgaacgacaactcgaaggacagaggagagcaagaggatttgataagacgacgaaggaccccgacagctctaatctccgctcgtgcactagtcagccctactagtctcagttagcgagtacaaggtagagttcaaaagacggagacaagaggagacacttggcatgcacttctcgtcctttgctctcttctcgggcagtcgtcttcaatgcccatgtacacccaaagacttactcggaagtaagcacatataatcttactcgcacgtttacatatagttcattggacacggctcatgcaggtggcttgtcaaatcgtctactactgaccaacgattgaagactttacttgtctcatcgacaagccggatgagaaagtgagatcagaagcagatgaaccatgaatatggagctgaccgtcttgcaaatatacaattggtactcatagagaaggatgaacggaaactcaacatccccaatgcatgtcggcagccgggtacgtcacgtcactagcggatagtggccttacacatgagtgcatctctaaggacgatgtcctgttatgaaaagacttaacgccggaccggcattgtatccggaagaggcgcatgaatatgaccgactgaattgaagcgcgcactcagtaagttcggtcagtatctcttggcagtagcctcttggcagtagcctcttggcagtagccagtacgcgttgagttggtaagcagtcagcaagcggacaacgattgaggtcagcaccatgggtgttgactgtcgatggttatgtggaaggaatgaaactgttgcacagattgagagtaagcatcgggccggggaacgtgacgccagcgtcttagcctctcgtcgctctttttgctttccattcaatcgatggtccgctcgatcgaccgaagaagtcaacaacacggataaacaggattgtagatcctgacatcgggcaatgatcgttcatctgcatcaatacccgtactcatgcctgtgctcggaaatatcttcctacatcttatcgacatcggtccggcgcagtccagttttgtatgtatcctcgatcagattggaagaacacatcctgcaaggagaaaagatttaaagctacaagtccaagattgagtgagatgttcgcaagtcttgctttatatgttttcgtctcaataatattacaaaataggtaggactaaaaacagaatagatgtatcaaggattttgcataaaggcaggaggaaaaggaagacgcatatttattttagagttcatacaaatcgttctgcttagccttgatgctgttgcctctgcttctcaatctgattaacgataaagagtgaagaactaagaatagagaatgtatgcgaagagagtaaagacgaatgaaggtttgtttaggtcagtcctataggcaacgctacaggttggtagaattgcaaacgaaaaggaggcatactctagaaatctatcggtgcaattgagctagaggatgatgtcgaaagtcagtaaaatgaccaagattttaaacgatcaactttgttttagccccggaccagatttgctcgtcatggtcaagagccaacaggactcacaagacaactctcctcgcctctggagaattttgatgatactgatccggttacacacctggcggagccgagacaaattatgatttatatcaaagcagtccgatataagtcaaagtttagggggttcaaacaccttggatcgtactcgatgagagcaaacttacttgtcccaacacataccagtgaaggtatggatactagcttgtaactttgccttggcttgctcgttttccaggaactcgccgagctctttctgttttcgatatcgacgtgatcgttggaaggatgatcgtgcattggagagaaatgtagaatgaagattgaaagagagttgagatatagcccttaggatcaaacaaataaagtatttgaaagataattcttgacaaggctatcacagacctgggttgcttcgtcgaaaccggccatggtagacatgatggagatgtgatcttgaagaagaaagaggggaagggagctggattctggtataattcaatagaaagagcggtaggcttagaaaacagaggggttggtccaatgatcacgtgatatgcatagccttgattggcacacgtgatttgcaggtatattccacttggctacacaagaacttttgagaagaaccggaaagtgtgcgaacatcatcgactgatcagaccacttgcgattcctatctctgttttccctgttcttcttgatcggataaaaactagacactgatcccgttaaaagaaagagagtggtcgtgctgatgcggatgtcgtttttcataaaattcccctccctccgagtttagatacttccaactggcgcgcgttagcttggtcaacttcgtgtcttactcttcagagcgcaattatctctccctctctaccataatgtcttccaaggtcatcgagttcttccagtatctgccgaattcattgtttcctcaccttcagatgtcggctctcaatgctaccggccatgtcacagagactctggcttcctccccactctatcaatctactaatctaagccaaatgagcctgatagaatcttggtgggcaagatattacgcctacatcggggatcccctgatcgctaccgcgctgttaatcttcttgaatcatgaggtaggctcatgagtaatcttagaagctcatttaatcagcgcagacgctcactcatcatcactttcttctctcttcgaccactctgacagatcgtctactttggaaggtctctcccgttctgcatcatggatacgatgccttacttccgtaaatggaagatccagcctgtaagtcctgaatatcagtctgaaatgaagcggactagatggcatatattaatgggttgatcttatcgcgtcctgttgtttcctgtgcttgaaaccaactagactaagatcccgacagtgaaagcccagtgggacgtagctatgcatatgctcttctgtcactttactatggagctacctttggtatctactcttgctcaaaaccttgactcgattctacttgacccttcccgcttacggtagatctacttccaatctttctttgtagatcggaggatttcacccgctttgtgtctacctcggtttggcgactcatgagcttccgttcccgacatggacgaagattgcttggcaaatcgcgcttttctttgtgatcgaggacacggtccactactggatgcaccgatggctgcatactcccaagctctacaagatgattcacaaggtgagtttaacagatctcgaggaaaaggtcactttcccgcgcttacttgattgaaacccaatggtgaacgtaggtccatcatgagttccccgctccattcggtttggttgccgagtacgcccacccgcttgaagtcttgatccttggtggtaggtttccgtcctgtctgattcacctctggaaccttatcttggatgtgaacaaaagctgatacacctatatcgagaacttcagctggaacgatcggaggacctattgtgttttgcgcgatcacccatgatcttcatctctttaccgtgcttgtctggatgacgcttagattgttccaagctgtttctgctcactctggttatggttcgtttttcttgccgctcctcttttaaaccgtctttggatctgcacagtactgatacacgatttaaatctagacttcccatggagcatgcataactggttcccactctgggcgggagctgaacatcacgactatcatcacatggctttcgtcaacaacttttcgtcttctttcaggcattgggattacttcttcggtcagtttacttcgcacttcttcttctatcatcatctccgtataccggcgctttatttacgaaacttgcgttgtaaacgatttgtaggcaccgataccaaatatcacgcatacaaggctcgattgagagctgccaagaatcaggccgaacgacagagacttcaaaaagtagaggacgagaaggcagaggctgagggaattgtcgcagcaaatgagacttgcgcaaaggcttaaaagattttttgtctcttcattcgtttgagttgtacatatggggttttcacagattcttcttgacagacgtgcgcttaagaatgcgaaaaacgaaaagaaagcagagagagagtaaactaaaagatgaagagagttacatagtacaaagagataacaagcagaattctaataatccaccctatccccacccaagccaacttcaccattctcgatctctgtcagactgaagaaggtcttcaggcaatggtcctcctttcttctcgtacctttcaagaaacccaggaagtctaactcgtggaagcttctcaagaacctgacctgacaatcctttctctttctatcttcctcttctctgtctgaaccgtatgactgtagaggagtgctcacatctactccgagcacttgagcaaacgtgacgaaccagtcgtacaggttgatgatcttgccagactcgagatattttgtaaagaggattgaggtatcaggtgcgtcggccggatttgatgaaggttttaggaatggattggatagttgaaagtatacataaggagataggagagcggtctggatggcttcaagtggtgatggccggaaaacctatcaagtgcatatgatgagagctatccagtcagtccgaggaagaaagtcaaccagtatgagtgttaacgttatgactgaccttgaccatatcatcgagagctgttgaatagaatatctcgtggaaaaggattttctggttcctggagaacacaccactgtgatggaggagcaagcaagaccgtcctctatcagattgtcttaccttttcgtctgaacgaggatgaaaacctacctaaagaagctacgcaaggcagtcggtatgacttgggctgcgctcgtttcggttccatccgggacacctataccacctaggcttgttgctagttttgatcggtactcggatttataagggccaaacagatcgagcgccgttttgaacgactggttcagtgggcctaacaagttggttggaaattgtctgttttaacgcatcgtaaccccacagacgtcagtgaagaaacagaaggcgtcgaaacgagcgttacgaaccctattctttgcagatccacatctagtcgactacaccgccctgtcagacaatctttcatcaactgtctccgatctttcacaccaagttttacaatcggaacatccaaattgaagtcatcgacctttgctttgcctaacaagaatccttggatcacggaaatcaaatggtacgctaatctaacgtcttctgcatgggacatgacctgtctcctctgaatttcaacccaggagatcagttcctttaaggtgggatgagaagggcctatagccagaacctgagggagcttaatctgtgggtcatacacgcgatcaggtaagagacacagaagtcggtcccgaatctcgtcagcttccatcgtagtcctgggcagaggaggcaggcaggttttgtcaaatggggggattagcattcctagtggtgcggtatagctccgaaggttgatgtactgtcagcagaaatcgacacaagatagtatcactatcagtatatcgttgtagttgcgcgatgtttcgactctatgtggcatactgtttggaaagatgaaagttgcaaacagacctgtagtgaggagaggaagcattccaaacttccatcatcttgaagatatgccgtacgaagctcatcaaacaaatccccgccgatcaaaacatgaaggtctgattttggagagaagagcagctactcaggattccgcgcaatcgattttggataaataaggaaaagcaatcagttcgggtttagtcaaaagacaaagaaacgcatgaaaggcacttacatcggacataatattttcccaaatttcctctccatccattagatccaatgtcctaagatccaaatgagatctcaccgaggctggcaagacttctctgagaacacccgttgctgtggaagccgtcatgagtagcacaaacccaagttgaggcgcatatctggccagacagtgaagaaaggaggagagaactgatgttggtaggagatgtatttgatgcagggtgatgaccggtttgcattctgtgggcagattattagccagcataaatagatttggcacgccgtctggttgttgacctttcaggagaccgatcacgatcgtctcaaccagaacctccaggctagatgttggcctacattcgaccaaaaccgtcctgaagactctggtaaaagaagacgatgatgatgggaggttgagcatctcgacatcttggtctggtcggatgtttgatcgctctaggcgtaagtaaagcagagagatgatggaccgaagtgtgggattggaagttgctgatatatccaggaacaagagcccaacacagtcagcgctgaggacttctcctggggagtaggtgaatacgaaaggataaatgcaaaagactatatcaaacgagcagcctccacgaaacttacagctaataagggtggtaggtatttgagggtacgacggaggaagttcgtctggatctcgagcaagggagcagtcctgaacgaattggtaaagtgtttgaaacgtgcctttcgtgattctggccatggtggactaacatggagttagaagagtcatctttcagcctcaagaagaactgttcgtgtgcaccccgcaaaagtctatcgtttcctaggactgacctctatgctagactcaatccgtatccagttctccttcagggctctacgactgaacgctttgatggcctctgcagacctactttcagtccgaggacgacggtgatctatcttccgccttttgcaaggcactaggaatgtaccctgtgtttttgaatcgaggtcatccatggctgttgaagtaatgattgttgaggtttacctctaacgaacgagcgagatgatggctgatgaggtaaacaacgccaaccccagatctccccaaatcaatgatgaaaatctgggcaaatttggggtcaacctgggcaaaacctgaatcactttctacttcctactttctactttctactttctactttcaacctatagaccacaaacagccaccttctctttcttgatcttcttgacttgttatctttacctctctcgctctggtctggcagatttaatagaacggaataatgtctcgtatcggtgagatcattcatcctaaagtcgctgggttgccaaaccatccaccttttgaacatggctagcttactctctctttgctcattgattcagacaagggagctcctagattcaagattgctcctcgaggagcatcaagaacaccccgtccatctgcctcgccggctccagcgctcacgcattcatcagcctcgggtcctctgaactctcagatctccttggcctcccctgtccagaattcacagggagcatcgtccacccagcctcctcttccgactccgccttcgaccattctcccttcacccagtcagcagacgccaattacttcctcattaccttctcctcctcttaatacggaacctcagccgttacctcctcacaaacctcacaacccgtatctagatgtgctagctccacctcctatccctacttcactttcactctcaaaaaacgcgccgagttttgggtctcctctgatcccctcccggacggcccccgttcgacagttccgacctcagaagtcatccataagtgctagatcgacatccgctcttacctcagctccctcttcgcccgcttttttggcaacgccggcaaagacgcagttatcgccccatactccttcccgtgtcactgctcctctttcagccttgactccttctaagacgtgtacaagtcaaaccaacgaagctccaactccttcatcgacagcacaatcaacagatttcgtctcccaatcactagacgctttagggaacgcgcctgaagcgactgcctcccaggactcagcctctgttgattcgacacctgtcttgacgtcgtcacagccgagtacaaacaaacgacccaaccgaggggtgttgaaacgagtcaggtctttgttatcggatgaggaagtagaggcagtcactttggccgctccttcaactcctgtaccttctgctgagcctgaggaatctgatttgactgtaaacaaaacggctgcttcgggactaccgccgacgacggctcggaatgtgcgaaggacccgaccaaagaagacaaatcccattgttagtagcgatgccgaagaggaggctgaatcggagctcaacggggaccaatctatcagtgaggcaggaaggatggacgtggtggaggagggtgatgagttggaaattgaaggggctcaaaacagggactcgagtgtaggagaagcgcaagagactgaaagaaagaaggctatcaggaaggtggttccgaaacctagaaccaagccggcttcgaaaagtaagggagtagtcaaggaaaaggagaaacccaagttgttccttgaagatgaggcagaggatggagatgaggaagaggttgatcacgaatcggaagaacaagcctcatccgaggttgaacaagccgcagcatccaaaacacctaagccagtcgtccaacgaaagaaaagccagaaacctaaggacgatccgctcgacccagtacggaaaggaaagcgtgtcagtcgcaaatcccgggctgcgactactcagcaagaatctcgactgggcgcgccaccgcctctgacggcaacaacagctgaggaacataacgcctcgcttcctcccccacccgatgcgagtgtgatgctgatgagtgacattatcagcgataacggatttggtcgagtttcctcccggttcctagacatacgacgtaaagcgctggagatcaaaactaatcgggtgaaggcgagagaacggatgaaatctcaggctaggaaagcccagagattaagagacgggatcttaggagaagacacagatgacgaggatggtgttccgcttcaggttgatgagcctggcctttcgacttcaattccttcaacgcaacgaaacctttcctcatcttcagccaaatcgcatataccctccatcttttctggtcgagtggatgtcgtttcagatcgtacgaatgaacctgtggcaggaccttcgaactctaattcaaatccctcgacagacactataatttctgctgttgcggccgacaaagacgatatctctgatatctctgatgtcgaagacaaggattccaattatgccgcccagatccgaattgtaaatggccaaatggtgattgaccagaattcgctcgtggtagatcagcatgcacgagaggagaagaaagcaggtattatggaaaccgtggaagagagagatacagaccgattcgtcaacagtgcgacctggggaagaaaaccgagaggagagagatggagcaaggaggaaactgatttgttttatgatgtgagttatttctctcttctcatcctgcttcgtcccgggcaattatttctgattctttcaaatgcaatcttgtgcgctttgcctttaaacaacttcactcaggccattcgacagtttggtaccgacttcgagatgattgctcgtcttttccctggtcgtactaggaaaatgatcaaaaacaaatggaacagagaggaaagattcaacgatgcggctgtttctcacgcattgatggccaggctacctgtcggttagttcattttttcgactctctccatccgttctctcctttcttattgatagagtcctgaacttaatttgtttttatgtctgtttcttccttttcttcgacgcgtttctcagatatgcgaacatacgcccgaatgacaaacaccgatctgtccggacctcctcctgagatccgaatgcctacgcctccgccatttgatcacgccacgagtctcctccaatctaaaccgatgtctaatgt

SEQ ID NO: 626 - DNA, 18968 bp, Xanthophyllomyces dendrorhous
tgtctaatgttctctcgaaaaagaaaaaacgaacaaacaccagggatggcgaggaggttgtgggtacggttggggaggatggagaggaattgaggttatcggacgacggtctcaacatggatgagtttgaatagacgctctcctgtttctcgttctcttcttgctcctttttcttcctctctgggttttttttcttgactttcatctgttagtttcttaatataacatatgtacatatctgttttctcttcctctgtaacaaaggtggttcaagtaagacgactaggctctgcccgcagtcaagatgttatcttatcttatctatgtgttgaaagaaattgctcgaagctactagagccatctggtctctcgaagcatctaaacctttctagtcatcctctaaatgtttctttcattccatgggacgcacttgctgactggactggttgagccgttggcatttagtccagatctataagaagcgccgacctgaagatgctctatattactgacccattcctcttaatcttgcgcattcacacttctatctctaaccgaacgtcccaacaacttgcaacgacatctcggaacacatccacagatcaacatgcctcttatgtacatcccgccatcatattctgactctcctttcggctcagcctgctactcccatcaatacccatatttccaatcatatgcccaaccccaagacggagggtgcgatttctcttaccctgcgttggtgaatcgacagcgagagcataaacttcagcgacagagaagggaggaagcgagattacagagggtgagacagagagagttcaggttgaaacaagaaagagagagactgatcagggagatgatccaggttcgttctcttccctcctcttctcgctatcgaagtgatcatcatcaacatcaaagttgggcatgccaattgaaactaacttatcttcttacttgtggacaatcagcaacgagagatgcaaagatgtcgacaacatcataaccaacatcaacaacaatcccgtcacagaattcacccagcctttcacaccacttatagtgacgagccaaagttgtcgccaaggccgacaccgatgtcgataccgatccacacacaatcaccgatagagaaatttctctcgaatatgtctggtatcagccaccgagaagagttagataacgactctgcttctacggacgaagatgcaagcgaggaagagttcgaggactctgaagaagagcaggatgaacaggtgagattatatcttccactatctcctttttcatcaaatccttgttatcttgtgtagaaatgatatctgactgagtggcccttctgttcgtaaacttttccttaactcaatctttcattagttcgatacatccctcgcgccccagctacggtccgagttacaacctcaacctcaacctcaatcgtctcaatctctgaaccaaataatggaactcgaacaaacccttcaatcattgcttaccgagaaattgcctaccctcaatagactccaactcgaaggacatctcacgaacctccttctagaagctgatcgagttgacccgcatggggaatttgatgaggatgctgtcagagagaaaaggagagagcttgttcgagccgtagagcgagtgttgggtggagatgaggatacaaaggggaatgcagatttggatgcagaagaaagaagagcagaagaggaagagaacgaagtggagagcgaactgcagcctctgacaatataactataataatggttttctgcttttgcaatattttggcgaggttgaagaggggtttggatgtaaaaatgcacatgagataaaccgacagataaaagagattgagatcgagaggaggggagcgatacagtatgaaaagatgaatggtgaaaaagtacaagactacaattttctggtacacttaccattgattaaacaaaaactacaaaccccaagagagaagaagaggcagaacattgaaaggatgaaagaagttgctggcccacgaattggttacttgtcggtcggatcgacaataccttcgcccttgccatttaccaaccccttgccttgctcatctgcttcctctactcctcgttctccattcactacatctccttcggcatctgtttcgtaagaaaactccaggaggtggacccttttgtacttctttggctcctcggtattttcttgctcatctccttcggcctcttctccttcctcgccttcgtcctccgagctgtactcttcctcgatttcattaagctcaccccagacccaagcccactcctctttgcagacacttcccggtttgccccatttgattccgaatccgatagcctcctgaccgtctggttcggtcttctttccataactagcatcggtaataagaataggcgcgacttcagtcgacgggtcggtcggggcggattggtgctcggtaggatcttgggtgtatcgataatgggcgtaatcttcgaacagcgtgtcccatctggacgaagtgttcaaggtataagggtcgtgtgcctccgggtcctcggcatcttcctcatcggtagagtggtggaatcctgtgtatcaaatgagaggatagaggatggacgaagtatagaagaataaaagataacagaaagaaaaaaaaaagagaacgggacagggagaagtaagcgagtgaaagagcgaaggtcatgcgatgagaggatgtttgatcttttttgaagtctctttggttcgaaaatttctttactccttcgtttccttcttttttcggtgtagtcacgggatcacaccgaaaaagttcagaaatgaagcaaagcgacaaagaacaaaaagacccagcaaagcaacctcacatccgcgatcgttcgcccaaccgcccgtccatcagactcatcttttatgtcccgtctttctttggagtattttcttaagcatacgaatgactatcaagatggcagagaaatttatgggagagacgaatgagactgtcgattgactgaccttccaactgaacttgccagctcacacgtccaccctcgttctctacccagaagactctggaatgagcgcgaacaatcttgccctcgtcccgaggaaacactaagtttttcccaacgaggacttttggatcgatctttccgtacgacttgtcgtacacgatcgtcttccactgggaagactcgaacgcctcgatagaaaggacccggttgagtcgaagagagttaagacgttcgcggaaaacttcaggagaagcaggctcctcttctgacacagatggagaagatttctctggagagttagagatattcaggtctgacagtctggtttcaatggaggaggacatggtggtagcaatatagaatgtgggatggatggtgagatggatgtcgttggtcttaagaagatcaagaaagacctgggtaaagatagaacgaaggccatgtgagcaggtgagtgggatgcgcgtcatcgaaagctgtgtagcacgtgatatatgcacagcttgattgtggcgttgttaggcttattatctatactgatagaaaacgttgaacgtacatcagagagaaacacgggagaagcatacatcaagagtagaagagtgtgagagtagccaagatagatcaagagcacagggaacacaagccaccatggtaatcctactctctcgtttgtgggatcctcttgaaatctatcagctgattacgcgttgtcttgtcttcttcgcgctccttctcgtcagtcacaatctttctacctaggcgacatcgttcgcgtaaaggaaacaaatgaacgagccatgatcctcagaacctacgccgaacaacaagatgaggacgatgatacacatcaccatcaatcctcgatccctgcattatatcccaacgaacttgctctttccgttctgtatgccaaggacgatatgatcaagtacgcgaccagacgagtcgtgtcgcaggatacagtcgttctcgaagatcgttcgttatcgtgtggagacgccgtcaagagaagctggagcgagactgagagcggtcagatcatggaggttgaggtcatgagccggttgaggcatgtcttaacgggcgagcctgtggaaggctgggtgtctagcacagaattagtcggagcgttggcggtgcgtaccctgtcgtccctctccttgttcaaatggcccaacctggtcattgttgcttccgactgataaatcaagtatgcatgcaccataggtcgaagttggtgaccgagtgatctacaacgattggctgggagtcatcgagaaggtcaacgaggaggccactgtagagtgtcagctcactaaccattattataagcttctcgatatgttcgttctgttcttcgtcgagtctatggtcttacgtcgaatcaagtttgttattgatatctgaatgtaccacccaataatatttctcttctcaccaatagggctggccgattggatccaggctgtacggccgaaaatatattctgcaaaaaatcagcactgcccgctatcccttcacttgcatcgaatccgacattcattcaagaagagagagatttatccaaagaaaccatctgccaagttcgatgtctagccgtccttgtcaactgggttgcgttttcacaaaaggttcttcttctttcttgggtattcagctactcgtgtgtgcgtgctgaaccatcatcttttctctttttcctcatcatcttcgtggttgttgttaactgcgcatgcaacaaactcgacatacgtaggtaccgatagaggagcaagacgacagacacatccctagtagattctggtacggcgaaaacttggcaaagctgactcatgtaacgtccgatgtggatcatctagctagagtaggaagcaaagtacgtttctgaccagagtgagaggcgggatattaattgttatttacagcacttctatgctaatattttcttcttcgtaccaaaaaggtgcgtttcaagtctccgcaatttgctgaaggtacgcttgcttttgcttctcttgaacgatctcagttcttccgatgacttcaaaggaccgagtacactgtgtacggatatcaagttgatacctttgaaatacacaatatgatttttcgttcattaaacagctcacagtttcaagccgacgttgcacaaagagggtacaatcgaatttgatatcatgcaggttgtagaaacaaagtttgtcccgtcgtgtatccaaaaatcataacatccttcacagctcagcatctctactcaaactgactcttgatgatgggtctttcttcatctcgttagaactaaggtgactgttctctggcagaacggaaccgaaaccacagagtcttcgatcaatttgattccccacatttaccttaatgatcacgaatgctggtttgtctgttccttccgtccgcttctccatgttggttctttctcccgtcttgtcatgatcttgactgacactacctctgtgtttctcaataggcctggagaccatgtcatgttcaaaggagatgacgataagagacaacatgctgtcgttcagagttacagctcgagtgatcggacggcagagatccgaatcgtctctggagaggtgcgcttctgtcttgttcaatgaggctttccagatcacatactgactcgattgtctcatgttgttgctgttgaacaaaacccctgttctctctcctcgattgaaggacccggcaaaggatgagatcaaactggtgtccgctatagaggtcgaccccagggggtcgagaacaagtacgatcaccgtatccactcttgtatcatcttcgtttgtcgagcattgcccatgactgactatcgataatttgacatgaccagaacaacacagtgttcatcctggagagattgttctgacgagcatatcgtccaacggatatgaccttccccatattcccaagatcggccattgggaagatccgctcgaaccagattacattgaatccgtcctctatgctcaagcactcgtcgcttcccgattctcaccttcagatacaccttttgggttctcaaatgacgttagcaagatcgactggtatggtgaagtcaagagactaaggccggaggacggaatggtggaggttgtgttgccttcagggaaggttgtcgtcgaacatccaggaactttgttctgtctgattgaagaaggagaggacattgaaggagatgggatggaatatgaagatgaagagggtgaaggtgaaggtgaaggcaatcaatttcagttggtcgatggccaggccgagggggatgatcaagaatgggaagataaccaagacggagccagaagagagaaaggttggataggccaaagaagggacggggaggaagattatggaatggaagtggacgattgggcttccgttacacttgaccatcaagatagaggctatttccccaagatggatcctttcgtttctctgtctgatcgaacatcaacatcggccgagcctcaacaacccactgtattgattcctccagctgaacgatcaatagctgccgctcccgaaaatgtgaccactaccgacccttcaagctctgtcgagcttgatgttgagcccacacagacaactgctccgacatccaataccgtcgagatgctctctcttcctgatcttctcaatcaagcctcatcatcaccctcgacaggatcattcggcgccgatcactctccaggctcgatgaaaaaggacgacccgagttggttgagatttgatgtgttggaacacgcacctttggatcatcatttcttgaacaaagtggtagaaaagacgaacagttcgttcatgacgagactcaagaaggaattcaaagtgctggcttcctctttgcctggttggtcaatcttctgtgaacgtacaatgtttgttgatgagctgtatgggagtaggatctgaccgctggaaaagtattttgcttcactctatgatacctcatgatcagatactatcttggtcagaagctatggcgatcgactagatctcttccgttgtcttatctttggaccaccaggcacaccgtaagtaactcaatatctactgagatgaacggattatacaattgacctgacgagttttcatattgactttattgattgaaaacaacagatatgtcgatgcgccgctcgttattgacttttacttaaacccgtctcgattccctttcgatccgccgttggctcacttccactcctggacagcaggaaaaggaagaattaaccctaatctgtgagcttacgtttcaggctagaaatttcatttctctctgctctcgtctgggtggatttggattgatatcatctatatgggccgtgttcaacctcaacaggtatgaagaaggaaaagtgtgtttatcaattctagggacatggtccggctcgtccaccgaaatctggaggtatgttctccccccccccttcttccactctactcatattcatccatctcaatctagatacaccgtggtgtatattcctttttctttcaaaatgaactcgacagcccgaaccggtcatccttgttgcaaacattggtgtcaatccaaggtctggttctagttagggagccttatttctgcgaaccgtcttatgagaatctgagaggaacaccagaagtaaagattcactctgtatgttcttctttttcctcactcttctgtgctcagtctcttgtgttccgttttgtttgttcttggaaggaagacatgatggcatttggctcattactggcttacatgtctgttcttttgaaatcggcgttgatcttgtagcaagaatacaggcaagtcttcactcttctgtctcttgtttgctctcatcattttaatgatcctcttccttttgcttcctaaaaacaacagcgaaaaggcttttgttctaacgagagcattcatcctccatgctctcaaataccctatccaaggatttgaatcagagatttctacattctatttcgctcgcgggaaactagaaaatgtcattgataactcaagaaggttgatcgagcttggagaacaggcccgtggaagagggtctgggtctgggtctgtgatggaggtagggaaggaggaagaggaaggagatggtgtaggcgtgttgacgatgggcgggataatccctcttaaagttcgtctttcttcttctccttcgaactcttctcttctctccttctttctatctcatcgtggacctaatcaggacaagcctggcctctaaccatgatgatgggtttctttggtaaaacgaacagagaacaatagaagccttggaaagagttttactccaaagacaaaattgataggctggccttttcgtttctccttaatcgtgtcaattgcatcctcgttcgatcggcatgctaatttataataaatgcattgaaaataaactgagaggaagagaactgagatgtagaaagaaaacgagggttgaatacacatttaatagtggcgtctttggattaagatgtgataaattatctacttgtcgagtatatgatgataagacgaaagcatcaagagaaaagcggaaaattggagaaaagctaagaaaaacaactctcagaattagactcgtgggatcccttctaccacccgagggtagttaactctgatctcttcgaacagcgctgggtttctctgtgccatcctgttgtatcacccagttgagacccaaaaagaaagtgacaagagatagggacggtaagtcactgattcgcataacggtcaggtcgaacacagacaagtagaatcgatccaatacgcacaaggctgggtcttctcctaggcagacgaagatcgtgctgactcctccctccaatgcttgcgccaaggtcaaacctaaactcgagaaaaccaggtcaagccaagaaatggacgtcagattggtccagcctgtcttaagtgttgataagtggcgaagaaatggagattggacgaaccggattggaaaccaatcaagaaagagtaaagaatgatgactggggagtaatcaccgttgctgttgtacgaagggttggtgtctatacgaagttaagactgtcagtaacaacatcgaatattgctttgtccgacggtcatcaagaaaaacctgctcacatcgaaggtaaaggtatccgaaagcagcgcaaaggatggcgatcacataggcacctgcagtagatgagaccaatggatagatcaacattggagcgagcatttttataataagaagagaatgaaacgtaccccatcggaagaccatgccgaccagagagtcattgaccaaagcgtcgattccgcctgtagtcccgtgaataaacatgagttatacgctctgaaaacacttcttcattccgtatcctcatgatatgatgatgtaagacttacgatctttcatgagcctccaagcatctttagcagctgggatctaatattgggcaggaaaaaggagtcagacagaagaaaaaacgaacagaagcttcgatttcaataccaggagcgacgcaaattcggggagtccacaagaaaagaaaaaggcacatgtacgcacgtaggactttccgtagagcgcaatctcgatataggcgtatcggttaaaccattcaaccatagtcgtgatgcacgagacgcagcaactggaagagaacagcacaaatcagtcctgaacgatagagaagatcgacaaggaatggaacagcaaactacgtaccctgccacacaactgagaatctgaccgatagctaaatcaattcgattggaaggatgaagatgttcagattcaacttaagggaaaccgcatagtcaagagctcagggcacgtaccatctccttcagcccgagcgttctgttcaagaatactaaacaacattctgagcaactccaagagtgtgacaattaacgatccaaacgcgatcgatccaagagacattgtgctcgctctgacgaacgccttgaagcacgggtttgtcggcatgtttcctccgtaggcttcgctaggtccgtagtaataccatcctccgtatggtccacccgccaaggtacacagagaaacgttggcgatgacctgtccatgagttgataagaggatcaatgatgagcatcagaaagcgggtaggatgccgaggcgcagaatataaaaggaggagtgaggggtcggttgacaggagtgagatacttacctgagacatccaaagatatgcaaacgtgcagaagacaaccagcccagtcactttggcgctcgagcatgatccgccagccgcgctacaagcagacgagtcgggcgtccatttgacctgcagagacgcgtgcgattagaaaaggcccagttagtattgaggtggagacaaactatggtgatccgcatatgtatataaatgaatatgtgtgtgcccatcctgagctgggatagacttacgtagacagcagcgatggtgctgatagagaaagtggagactatcaacaacttgatcactctaagccaagggatgaaagcaaactcgtagaaatcagagttactcacaatgcataccacacagataacgctgtttggacgagcaacgcgattatacaaacaccatagacgctcttgtgatgtttcgagatatcgatactgaaaccaagtccaaaggcaaaccccaaaagggtgatgtgagcgattgcaagatgtacttgtggcctttggactgctctactacaagcgacccagacattcggaacttacaccatctgcagaagcaaccgagccagaggaattcgttttctcatgctccagtacgaaaggacagagatgacggcgataatcgtaaaaatgattgctccggaccagtatttgatgatccaatagtagatgcacaacgcaacgttgaacacgactgtcaagaccagggtctatggatgagttggttggaaaagagtaaacaagctgtgagaattgatcttctttgttcattgtctttcctttctctttttttttggacgtaaatcctccgtacaagacgtaaaatcacgtacgatctcaaggataatctttgtgaaggcgcggaccatcatcaggtaaaggatggacagaagcctatatgttcccgcgcggagacaaagaaatcggaaaaggatcaggtgtgagcgagatgacacatttatgcgtagaggaaacatctggacggttgactgacaaggcggcagctccgaccagagccaataggtaagcggtgtgagcgttgagtgtgactccacttccggtgtctccggaacctagtcctcctccgagaccaccgttttggacgtacgcgtggatggcgattcctgagacggcagtgaacccaaaaacggtagcgatgtaaagcagaaggggaattaaatcgttgattctctattagtccccgccgatcaggagaagatttggtgtttgaacaggtcagcttgtctgaacgggtagagctcttgatgtatgtatgtcgagcgaagcagagtgcataccttcctgggattgaaacgttctccactctctggctttgatccgtagtcaacgttctgaggaggaggagcgtattgctgttgagcatagggtgcgggagcgttcatctggtattccggaccagagttgttttgctccgggtatttcccctgttgaccttggttgtatccctgattataattctgttgctggtactgctgcccgtacgcttgctgtggttgctgtgggtacgacatgggataacttgcttcttgctctccagaaacacactaggatgggatctagcagaagaggcaggcgagtgagtgagtgagtgtatggacgtgaagaaggttgaacgagaaaaatagctggaaagccgtgagtgatcgggaagcgggcaaaggtaaaaaagatcgtgacgtcatttgaaattaccgccaagaggacttgttgaaatcttctatcctctgtctttggtcgcattggaaggattctttcacgttatacagacatttcattacatcaaacagccatcgactccctttgaaacaagacgttcctaatctcatttgcatttctgagcgatgatctttgggccagactcgagccattcctctttgctgatccagagctgatggaacgttcccagactggccaagacggatcctcctagccaggaggagaaccgtcgttcggtagcatgtccagacgcatggattcggattttttgctaaagagatcgcaaaggaagggagggggaagagcagagggagatgagtgaacgttggaaaaagaaaatcccttgcaaaacatgaacaaaagcctacttacaccaggtagcaagacaccgagttcgtagttaaatcggtcggtaaacccggctagtaaacttccacctcccgccacgaccacgtttgagagcagggccgctcggacgtccacatcgcacgccatcaccgcctcatgagcgagttgagcgatcgagatcacctggtctatcgaacgagagtgggccgtgtttgtggtgtgacgcaagcaagaaggcggtaccacagactattaagtgaaaggaaggggaggcaacgatgtttagatacaaagcagcgagagagattcagcgaaatagaaggaactaaacaatgacttactcgatcgataaactggggattgaatagagcctctccaaacttgtatcgttcagagccataagacgcgttgaagccatccgggaattcatacggcctgggtgctcgttgggccacatacctatcaaggcaattagatttcagttctcaattgtccaaatacatatctaaagcacacagcaagaaaaaaaggctataaacactaaccgctcctcgtaaggcgtctcgtatacgttgacgcaactctccctccagttctctaccactttgttctcggcgtattcctgccagctggccgttgtcttaccgtcggccagtctgtcctgcttagttgtaaaacggggagcctgtcctgccggcaccggagttcgagtcttcattagttggaatggtctgttcctcgccatgtccagtttacaatgttagttctgtcgtagagagaaacggtcaactcagagatcatttcctggatacacttacgtcaaggatagagggaaagaccgagcagggttcggtttttgcaagtaggatttgatctgcgaatggagaagagccattgccaatggctgacgtcgagttcctattccgtcaagatggatcagcaaagaaaggaaggtgtcagatttttcctaatggatcttctcctagtgaatccaaccttttctctgcttttgtcttttttcccgaagagaaagattctagaaagcgaatcctagagacttaccacctttgaggacatagccttcgaggacgggagtgatgctaaccaggtcgtttccaacatctaccaccaagctcgtcggcttgccagcagcgaaactactgagcacacccgaacaagcagtaaaccaggctgggacattctcctgctcaaacacaagctccgccatgatctctcgattcgatgtcgggttccaagcggcctccgtagagagcagcgggtgatcttccggattcactcggagtcgagagtgaagcgcgtgggacaacaacggtgggagagaactaggatcttgaactggtgtacgtacggttttcgcacaagaagaaagcgttcatatgagcccaccctgttagaaagaatatgcactttggaaggaccaagagcagaagaaacagaagaatcccacgaactaattccatcacccatcaacgttccgacctccatccctgcccgccagacgttagccccgtcctctcctacgaagtattttcggacacgaccgtccttggactcggtctgtacggatgtcggcagggtatcgtcatccatggtggtgtctccatctttgattgtgctagcagaggaagtgccgtcgacgtcaaggtatccatgtgctgtcggtatcacgcatttgggagtatcctctccggcgtagcccgctcgggtcgtatgagatccaatgtcaaagacaagagcagaaacttcagatgagcagaaagaggtgcacaacgacagccttagtatatatcgacgatagattcatcctacaatataacaatatagctcagagtctgcttactttcatcttttcatatcatgaagcgagaagcagagaaagaaagtaagagagattcgaacatgttagcttcttgtacgcgtccactatacaaaggaagaaaagttctttctgcggatataccatccgtcatgaataatctgacaggctggaaagatcagttgaacatacctccaccatagacaaccatgacgaatttatttatatgtctctcttcttacgggattgtcggtgcaaggaagggcagggatgagatttataggtcgaggctgggttgtggttagggatgagattcggcgtgacgagcaggacgcgtcgatttctacagaaccaaagtgcaatactatcccggccgagcagcagcagcagcaacaaacttggtagcatcgatcttccatacagcaacagtatcacaggatcaaagactcccagtcaaacatcctttcattagctcgttataaaggttcatacaaacgatttacgttctccctccgtcttcgagcaaatgacttcctcctcttcaacggctccttcagcggatcctctggccaaagacctccacgtaaaatatattcagtctctatcaaacgtccgttctcattgcttctttccgtccggtaaaagcctcgcttcgattcaaagcttatgactatagagttgaaaagaagaaacttccctttatctctcaccgtgcaggagcaagatctggcgtaccatcactctgaacatctccggctgaatggcgtgtactggggcctaactgcgttatgcatcatgaataggaaggatgcactcaatagacaagaaatgatcgactgggtcatgagctgttggaaccagaagcagggttcgtcttgaggaggtctttgagctgtggcaagaacaaaagcgctgaactttgtgttttctcgcaccatacgcacgcatattaggaggattcgggagttctccgaaacatgacgctcatgcacactcgaccttgtcggcaattcagatcttgatcactcaggatgcgtttgaccgactcgatatcgaggccatcacttcgtgtttgttcactcttttcttcttgggcctcgactcgacggctgattgtccacctttgactcattcggactctgtcttggcagtctacttgtctctccaaaatccgaccactggctccttcgcgggagactcgtggggagagacagataccagattcacgtacatagctgtttctgcgctttcattgctcggcacgctcgataggctcaatcgggaaaagacgattagttggttaagaaggtgtcgaaactttgacggtgggtttggtagtggcgaaggaggcgaaagtcatggttcccaaggtttgtcctctgtttgttatacagtcgtcagaaaaagaaacaatatagagtgattgatcatcaagttggtttgggctctgtcacgtatattcttaaatagtgtttgtttgcgtgggcgcattggcgatactcgacgcattggagaccgaggtcgacgtcgacatccttgccggttggttggcggagagacagctacctaatggagggatgaatggtcgacctgaaaagctagaggatgtatgttttgactcttttcttcttatccttctctttcttttctcttcctttcgtagggagatatcaagagctgatgatcgtacacgttctatcggtctcacctctggatgacaggtttgctactcgttctggaacctgtcggctctatcgattcttgggaaactccactggatcgatcaagaaaagctcatcaagtttattctcgactgtcaggtccgtcgttccctcttctcttttcccttttttctgtgtctacttctgaaccatactgagtatgtgtcttttctaaattgcttcgtttccgtcttaaggatctggaaggtggtgggataggagatcggccggaaaacatggtggacgtgttccatacgatctttggcctcgcaggcaagtcgtctacttttctcgctgccttgccagtcctctttcttatttgatccattcattgacggatttcctttccgggattctttgggggaaatgatcggatttgaactcgaaatcggacgcgcccggtaaacaaaacaggactatcaatcttgggatacaaaggactggacgaaatcgaccccgtttattgcatgcctgccagtgtaattgaccgtgtaggacttcgaaagccgtatcagattgggtctagacctgattctgatcatcaagtctcgtccgtgtcgggagaggggaaggggtcggaggtaaagtgatgtgaggtttagacgtgttacatcaggacattcacctattcatcgaatgagcaaacgtttaaccaagcttctgttgatcctcttcctctttcttccttcatctctataatagaagttctttatatatgttgttttcttaaggaaaaaaaattatacaaatgtacaatagtgatcccaatcattaacagagttgggaagaaggcaatcgtaggtgtcgatagtgagaggggcgatagaaattggattttgcgaagggagtcttcttttgtcttcttccttagtcgtcttctttcggggggggaggtccacatggttggagcattctctagtgatggcgagagagagagagagaaagaagaggtgaatagtcgtagcgtcagtacaagtagaagatagaaaagagacagttcgcgtcttacctcgagcaactcgaattttgttcgaccgatgctctctccatctgccagagcaacgtacgacattaatggaggatgaccgatgatagccgcgttggtatctctgtgttgatgagtgagccactcgctacccaggacgtggagggaaaagagaagagagagagagacaattcagccagttagaagaggaaaacaaggaaaacaacgtagaggatatcttactatttggtcatatcagcatgtcctgagtgaggaggaacaggagtaagaagaataggtcccgaatggagagagaacgttttagccttcaaccaccgaaagcgacgcgattgatagagatgacaaccgaaatatgagcgaaccggttccggtatatctggcgtgaactacgtgtggatgaacgcgtcaaggtggaagaggacaagaatccaagcgagacagaaagacaagagaccaagagtgagcgagtgggataggatgagatcttgtacatagacaagcgagaaattgaatacgtacgctgctcgagctgagtgttggccgtatatctgagttcggactaggcatccaaagaagtgtgagtggatataccagtacaaaggagtagacattcaacagagatacataccatagtcttgattgttggttaacgttgaactgtgagaatgaaagtaggtatgttggacttggtggttcggagggattgttagggttattatatccatgaaatccagatgaaattctgaatttgttgaatttcatgttacctcgacgtgaattcaaacctacagtaacagcccgataatgccctgagtaccacgcgtgacatatcactttgaggtaacctgatagtttacatcacaacctccggagaataggatgggatccatgaatatgtaatgatccgagaaagctgatcgactcttggcaattatgatccggttccggatgactggcaagaggtcagtcactcaagaaaatagatcggcaaaatgcgggcggagagtttaactatagaagactttttcacttccgggcttggtagatcatgtaacatatgaaactaaggaacgtgttgatctcgccgcccatatgaggagaccatgcgtggctttgtgtaattatatgcccaaattatcccaaatgaaccccgaagatgatgtctaacacgtcatagtttaccgaaactacacccaataatagcccatggttgtttggagtctccaagatgatccatccatactcttggctgttagccagatcgagggggtttcgagtgaaaccaaaatcatcgcacgagccttgtccctgttttctttactcacttccaccctcatcctctacaccagttccggatttaatttttgaaacctcggttgagcgggtagaatgctggagctccgaagaattggaaacgagtgtatagacagaggtgcaaggaagagacagaggcagaagaggagagaaacatatgacccgctcaccttctgtcgctgaccttgcgtttcttcggtttgctgatcgacccgctcacgtactagttacatcgccatgtgctaattcagccttccgtattgcttggctttcttccgactttctgcccgtttgatcgtttctgatacccgtcttgttgaaaattgacattacccgtatgaaaattgaaaaagccgggtgtttttctcctactcatttctttcaggtgaatctttgcaaagagaaaaagaagaagaaattcctatatagtatccatccgtttggtcagctttcagccagatttttcttttcttttcttcgtcctctcttttctttttctctttaggtcactctcgctttctccttctccgtcttctttccccccctcttcttagcttgctttccttgctttccttgctttgctcttctcccttggagctttccgtccatccttcgtgcccgcctacacacattctttaagaaaaatagactatgattgcctctctcttctctgtcgcccttcttgctaccggcattgctgcatcccccacccccgctcctgctaccgaggaccccactatcgacaagcgaactttcggtctgttttgcaactctggttggttcacctggcacgac

SEQ ID NO: 627 - DNA, 8780 bp, Xanthophyllomyces dendrorhous
ttggttcacctggcacgacgcttgctacaagtcctcctcgaccacctcccaacccagctcatcctcgatctcttgccctaccggttggacttgggattcttccaactagtatgtctttggttccgttctagttctctctcacttttctccgatagtacgagacgctgatgatttcacccctccttgtcctttctatctttcttgtccattcgctccatttcagtcaatgcaagcctaagacgagcgcggccgcgaacagcagcaccagagagtgctccacctccggtcactcatggctcgagaactacgtgttctgtgctcgaaagaactacgccggctcgctcgcaagctcgtgtgaatccagctaccagtggtactggtcctccggatcgctctgctgcgctaaagaaaactacgacaacgagggagctattccttctggaaagtcctgcccatcaaactactactggtccaccacctggggttgcatccctaaaggccctcagtacgccggttcgacctcctgcccgtctggatcttcttggaacgctgccacttactgctgcatcaacaaggctcctaccacgaccgatacgtcttcaaagtgctcgtcctccgagttctactggaagtctgccaacctctgcattgaaactaaccatgacaccacttccaagtgccccgagaccaccaaatcttgcccgaacaactacacttggtcctccaagtacaaacactgtgttcctgatacccgagacgactgcgacaagccgaagccgtaagtctctaaacgtttcacaaaccttctcgttcaagttgtttacttgctaatcagtctttttctcttgttcatgaaactcaacagatgctacacccgaggccacaactggtcggaccagggcaagtactgcaagcctcctactccctctgggtactccaagaggagacaggtcgagtgggtcgtcgaaaactagacgtcattcccttctcgctcttctttctttttcttctttcttttccgttccacgcctttttctgcttccttgttcatactgcttgctgcctctcgttctatcgctttctgtttcgctccgctttgttctcgctgctaccatatagacttgcttttcctatcttgctttctccgtacactcttttgctttccttgtcctactaccgtttgctttcctaccctctcaaagagagggccgacctccactcgttggctgttattttctcaacatatattatcttagagcctatcttgtcctatcacttagagtttgtttcctagagaatcctagattgctcatataccatgcacaaacactcttgttctctttctagtacaacgtgcatgcagtctttgctccctcttgagataaaaaagatattcacaggtctgaactatccaaggcgcagaaactatggcaacgacagacacaacattggtagaaagtgtagaatatgactaagcctccatctacagtagaaaccttacgacgtccgactctctagatggaggcagaactctatcaaatttctcgatgtttttgacttgtctgtactttctctctcatctctctttctctctcacatcttgctgcttctcgtcctcttctactttcttggtctctttctttgtcccatgattcaatcaagaacagcagcagaaacaagagaagataaagcagtctggccgagatccattagatggctagattaatctttctgtacctataaagaatttcaaacaaacacgtccgtagaatcagtcagagtgccgcttggattgagccaacgaacaggttggaatacaaagaagaagaaaaaaaaaacaaaaaaacgtgtctcgatgaatatatttattcgtgcgagacattctacaatcacgttttcttggctcctctcgccccctttgggtttaggttaccaatcaattactccatcagccaccctttcgatttaccaaacgatgctgaccaccccatgtgttaactgacctctctatactgatcgggaggttgaccacagacccgcgtgactgatgtcatgccaatgtttaatcgcgttctagcatcgttaagaaggctttctcatatcctcgatgacgttttccaggaaggaagcccccgatgaaccggtatcagtatctctcaatctgcgcgcggataacatttctggagatcctccttaagtactcctctctctcttaccttttccctttagtactttgccgcctaaggaaaggatttttaacctcttctctctttctttctgatccattatgattcttcttctgcgcgaactttccgactggttagctgtgtgatgcaaggtcgtcccctctaccagatcctttactcatatagtcttgttaatatgcgcttgttagtgactgacggacgtcgtatcctcgacaaccagactcctatctagcgttcatccattcactttaattgggcgcacatctgacgggctgataagctgaattgtgtaggtatggcagcttctgccgacactgcctcgcagaacttggtcctctggttcttctgggcagacgccagacttcacgtcgacatagttcatagcatggcattcgtagcttcctctttctatccgggatcatttctggatggagaggttgaatgtgtagtggaaagactgacgttggccagcttacatgcgtctcttctcttaacagcgcaacgaccccggatagcagcaacctctgtcctttgaagtttagctaatttaatcatatccatcaatgcgttcccaacaccttgtgtgattgtacgcatgtcacacggtatgttcgtcctcctttttcaagtatggctcactcttatattctccccgcatttccttcttctcgtctttggttcctctcttatttttcaatccatcctgcttctaccctgggcttgatctcgagcagatgcgccaagagcactcatgtatggaacgctttactgatgaactgtagaccttcgaatgcttggactccaacgacttcaattaataagagagatctaagtcattgagaaacagacttgattcagctcccttcttctcaatttgattgattgctcgcctttttttctctggtcatcggtgcttcttggttctctctttgatttccttctcttcggtcgtcattcttcttttgcacccgtgctcctcttcaatctttctccttttatacttctatcctgctattctagtgccttctctatgctaattgtgccatgttcaatgtccactaaatgttctattccgttgcacactctgaaacaccgatcttgtgcttatcccttcttcttcttctttctttgaaatcacctactttttccattagatcggggtctctttaggtctcttacagtttgtttctgttctctttgtttccccttgtgcccaagtacttgtactttctgatctatcctctctttcatcctattgacgctctttcttttgtctttctccttgtcttttcatccttttatactactgatgttttatctcactacacgatacaaaaatgatatatgtgccatttgttgatctcacttgccttgagaggaaagtacgtggatgaaggagaaatccgtttcataggaatatgctgagatgcgtgtggtcagaccatcctgctttcgagtcgagggctactcatctccactcaggcgatcagaagacagaacaaacacaaacacacatgatgaacatggaccagatgggatagcgtccggatgaaggcatcttgcgattctcagacatgcctctcgcgattggtgtccagttccgaagaggtcaaaccagacgttagcgctcctactgccatcaggaaacgggcattaaacgagtcgttgaagattgggtattgacaactcttctgtcttgtttctctctcctttcatatctactgcgtcttccgctcatttatgtcgggtgcagtgtcgttcgctccatcttcgctcttgcgcataggacaaatctaccgttactttctcatcaactacttgcttcatcatgctttctttgctaatcaactgctctccgtccttctatcttcttattattcattttctgtggtatgatagagaatgaataagccttgtctaatctaactcttacgagaaagaattgatgagtagagaaaggagtatacacgagagagggatgggcatgagtgatggaaagaattcaaatgataaacacagtcgcgtccgtccgacgcgcctgactttctctgattatactatctcgtaccgacactcgtacacccataaacgcacacacgaacaaacgcaagcaaacatatattcacacaagtcggaaaccactcaacctcatatccgctcaattgcacttccacacgctcgttaccagctacggtcggctctcgatcaagagtttgatagtacaaaactagaagaagatgtcacccgctacgccttcttctcggaagtttcagcagtatacgttcaatgttgtcaactcaccttttggcaaacaagctttgaccggaggacatcatgcatcgtacgtctctcgagatacgaccgagcagaaggggctgttactactgatcagagttccagtgacactaatcatcctaatccgttccgtttggggattgtacatcggatgctaccttcaacttagattcgatgaaagcatggagacaccgacttcgtccatggtgtacataaactctcaacttcaagcccacgggttctccaggcggcctattaacctatccggtatggagatcagagatcaggaaattctggtcaggtgcttgttctcgatgcttcatcaacgatctgtatgttctgagacctcctactcttctctcctgtattctccgaaacccattgcggacacctagtcctgttgctaatctgcgattcatgtttatgcacaaacaaaacaaggatgacctcactcattttgagacactctcgacagcacaccgaacgttatcgtacgaccatgaacggttggtcaagatgcacaaacagctggtggaagaaacggctcgagcagagagtaaggagcaacatgcgaagtccctcatgaggttcgttatatctcgacattgtcttgcctccgagatccttctctgatttgagacatcccaaaattatttagaagttcatgactgacaaaatatacaccgggcggatgaatgtcaaaaatgcgtgatacagcggcgctcaacaagctctcaaggacgaacaaacatcacataagcaaaccaaggaagaggcccagaaggctaggaccgcgttggcttttgtcagaagtcaagctcaggttcgttgttctctctagaagtcgtgttgaactcattccctcattagtggtctatatcttctcgcgctgttggccatgttttcgtttgcagcatgacatcaagaaaagagacgcagaaatcgctcggacattggagcgatggcaaaagctatcaaacgatcaggccaaaataatgtctacccgatccggcttgacctgcctgaacgctcctcaacggcctggatccgtcaaaccatccgaggtacatctgcttctcttatctgactcgaccggttttgatcattcagtgttttctcaacctaacggtgttatttgcttgttctgactgtattaccatagccttcggactacttccaacaaaccattgaggagatggatgatgctcgttcgagactaattgcagaaaacgacgcgttccggcgggtgctcatcaagatcgccgtcaacgtcgagtctgccatcacggacctttctccgtcccagggacgtactgtacgtatcttgtcttttgcgcttcaaggttcttataaactagtaattgatcgtttctaactatctttgtgagttgcctttcgtcttgttaaggatttaactcggatcaatccaacaacatttttcgaaccggctcaaccgacagcttacacccaagtgacatctcacgcgtcaacagcacaatcgaaagtctctcatctgttactcgagctaagggatctagtcgatcaggtcaagcaggatggtctgaaggtctcgaaggctggcgaaagatcggcacaacagccggccaatggagagaaagtgaaggcgatggaagaagaactcggttcgtctaacaaagtttccttttccgttcttctccttctttctggaccaatgcaatttacttcatggtgttcaatccaatgctcgttctctttcttaacgaaacagaaacaattagagcgcaacttgaagaacgacaagagttcctcagaaactttatagaacaatcaaacgccgcgctcgaagcagcgtctgccactaccaaaaccagttcactctctggaccatcatcgtcatcaggggaagagagaggagaaggggatggaggcgacgacctagggctgattcaagaagaattaataagacagaagaaggagctcgaggaagagaggaagaagtttaccgaagctgctgtcaaattaggtcaggagagaaccgagattgaggtttgttcaattctctcatcaaccgttttcccctgttctggacgttctttcctcaattttgtttgaaactcatttatcttgactccagcttgaacggattgccttcctggaggagaagcgagctctgaagcttgagcaaatgctctccgacctaccgcctaccccaccacagccgaatttccatcctccaaaaacaaccacgtatgcaacatcttctccctcccgatcgaaaacatactcttcctcttcttcttcgtcatcccctcgcaagcctaaatcctctagtagatcaccttcgaagcaaagtagtcatcaccaccatcacacatctctcgccagacgggctgtgctttcatcggtttattcgtccttaccggctgtttcctcccctctgcgaacaggggtcatcatggaaggtagcaagtcaaatgggaagggaaagaaggaaaaggctgttgggtccgaaggaatctcgtctgacgctgtagaaggtcgggtcaagtccaacggggatcgtcaaagggaaggctcgaatagaggtgagagtggagggggtgaaaggaggaggcattcggtcaagggtttagggactccgacaaagaaaaggggggagcaacatcgaatccggacaacatcatcgaaatcacaagagaatgagaaggagagggagcagctctgagatgatcgttcctgttctcgataattcgtgtatattcccaatctttacacgttcgtctctttgtctaactggtcaaacattgcgtttggatggtaacttcgagttggagcataccagaggcagcgatagacaagacgaacggtaatgataaatgaagctttcttggcagaaaacatcacaaatagtatgaaacgatgcatcaatcaggcaaactgggttcttacttgaagttacgacatccgtctatttcttcaaactctgatctaaacaacccttcttccagaaatcttccgctccttcccatcgacctctaagcgccaaagtccttcccaatccctgatgacattcgatagtgaaagggccgtcggctgggttaagagattcaccgtcgatggagatatattgtgaggggagagggtctttaggcaatcggttgctagccccatatggatcaacatgtaaagcccgagctaatataagtattcaagacagaaatagtcgaagaaagagggcatgcggttcagcttaacttcaatcaggattgagtcacctaaagaagacttagcggtaaggacgagttgaacaaacctttgagataatgttgtgacggttgccagacctgatttccatcttcagcaccagctactgattttatcatgacggctcttgacgcctaagcccagaaggaaggaaagtttggtttcagtacgcaaccatatcacatctggaacaggggtttgacattagctcagctggagtttacgcactgattcttgaatgacaaggtctatgagaccttgaccctgattgatgaacggccattgcatcagatctctgtatgaatccatagccagccggtcagctcgatcttggcgaaatgtcgaaagaaaggatgagtcgcaaatcaagaagaaaactgaaaggccaacctagaagcaaccgactgcaatcctgcgtaagcatacatgatcccatccttcccaactcctccagttccctgacctatcgtgatccaatcttcttccggtcccttaaacttgaccgctggcaaaggtccatcctcatctttatcttcttcatccaagttcgcaacatcgcgctctttgtcagcttcgacttgctcgggtgacatttctagtcgatcacgaagatctctcgcatgggcttgtttatcagcgtatgcaggtgaggcgggtaggagggagattgttcctggccaggaaggaggggataaggctatatagagatgaaaagataagatcagagtgtgaaaaacggaacacatcggctatttgtcttgactcctagtatattcatgacttctaaagagaggggtatgatgagcaatagaattcacgtactggctctgaggaacccatagacgaatcgggtgtcgcccatccatctcaggttttccgttcctagatcagacagaaacagccaagctcgatagcctcgttagatctaggatgaaataataataaaaagtttcacaggaaaggaacagataagcggaaaggatggacaaacctagatcgagatcagccatgagtccgagcgcggtactgagg

SEQ ID NO: 628 - DNA, 3395 bp, Xanthophyllomyces dendrorhous
gtactgaggaagcttatgattcgaggtttgtccccttggctgagagagcatagatccatcaccatttgttttcctttgatcggatggatgtttgtatcaatgaaaaggtatacgatcaacgtcgaaactagacttgaggagtatggaaataaagaaaagagttatctcttgatgcatacctttgatcagattcaaagtagctatgtggggactgaacccatcgattttcccatggattgacaagctaagtgaatttccactacctatcgaataatagtcgagaaagaatatccatcatgagggcaaattccagaaaacacaaggcgacacggaataagcaagcctgagaaacacatacctgctggtacagggacgacaggaattctgaagcaacgcttcgcgtccgacctcccagcgaacccagcaagaacctcatggattcctccatctcctgaaacacaaccgattacactgtttattcccccatgagaaacggagaacacgttattcacctgtcgagcgcgcgccattgaggggaaaatgcgaaaaagaaataatgacttactcatatctctccggatcaagctctgtggcaacatccttggcgtgtccatttcgtgtggtgtatgttgtctctacatgacaacctgctgctttcagagcaggcaggaccgtgccctctgtcattttcctggcctttcctcttccacccaccgggttaacaagaagaaggattcgacgacgggcggttggtgtcggtgtcgatgtcggataggccgatttgttgagcagagagacaaactcgggtaccgagagcgacgaagtcagggatggagacggatgaaggacgaggtgaaggagggtataagctggtgcaggcgacaggtaactcagccggatagtctccggtgccttctcggccagtctgagtgagacggaaaggatatgaagggtcggtatgacgaacaacggtttagatcctatatttggaacgatacgacaaccatcagcaatggatgaggaaacatagtaggtgtgagcgcagggacgtaccttttacgaccccatcattgcgtctcaacacgaggaccttctcatcgtgaaccacaaggcagactttcacacccgttgtcgggagcactccgtccattctaggagacgactcgatggagttagcagacagatctgatgtcttctgtagcgaaggcgagccaaactgtttcaagatagccatctcgggcaaaggggatggtggtggatgattgagctgttgggtgttggtggtgagcgtgttttgaattgtttctatcgcctccactttcatcatcaacaccgaccatctctttcttacactcaccatctgttcacttttgaattcttctcctatacgtcgcgcaatgtcatcatcatcatcatcatcaaccctaccagtcacgctgatcgtggcggctaccacatcaaacggaatcggtctggctgggtctttaccctggcgattaccaaaagagatgaagtactttgctcaaagtttgttttccttttcttctcgttctgttgtttgtctcatcccgattagaactatagtgtttctgacattccatcttggtttgctcctctcgtttcgaatagtgacttcgggaggtcctcaaccagccgagaacgaagccgagtcaggttcgaccaagccgaacgcggtgataatgggcagaaagacgtgggatgggatccctctcaaatttcgaccactcaaggaccgacagaacttgatcatctcgcgatcaaactctgtcgacatctcgaactcgatctctgcgtcctcgccgaccagtctgcacccttcgcttccttccgccttgagtagtttatcaccgtcgacgaccaacagagtgttcctgatcgggggcgcacagatttatcgacaagctctcttgaccaccccgccgctcatttcgaggatccttctgacccgcataaaatcgcctgcgttcgaatgcgatgcttttctggaagagttcagagagttggaaacggatgatggtaggaaactatggaggaaagctagcggcgaagaattaaagcagtgggctgggtggaatgtcgaggttggggagatagtagaaaaggaagtgacctatgagtttgagatgtgggtgttgaatgcttgatggacctgtttctctttggcactgaacgtgacggcaaagcacggcaagaagaaatcgaatagagcttgatatgtttgtgattgactctcatctcaaccgactaccaggtcgggccggcgaaaagagagaatatagtttataagcttgtagaactacaaaagagattcaaacacgatgtacaaagacaacgaaggcggaaaggaaaggaaaggaaaggaacacaaaaaagcaagatagagaatgacttagttgccaatgacgttataaacacaatcaaattcgacccgaaaaaaaaatggattaggagaaactatatggacgagaacgaacaggaggaaagacatgtaggtgtatagtggtgccatgatatgcaaaaagacgtgataaactgagaagagacccgatcagtcctgggaagcatcgatctccggcaaaggaattggcggtgggaatagtggggtggttgacgacgacgccgctccatcccttgaccaagcgtcagcttcggcctctgatgtttcgttcagcgtcgcgccccgagtggtcgactgggacttgtcacctttctgtgcagacagaccaagacccatgccttcggcgccgacgtcctcactgatcacgtaccccatgatatcactcagcgagatgatccctaccaagcttcccttccgtctgccctcgtatccttcatcaccggcgacgacgacgagccggtggagccttcgttttcggatcagctggaacaagttcgcgagcgagtcattcggagtacaggtgacgacgccgggaaaatcggcagaacgtcgcatgagtgcttcggcgatcgtcaggtctaacgaagtgtacgtccctagtcggacgagagtctagaaaaagttgcaagagggaaaggccaacgaatatcagatagagcaagagagcataacgattacgcgcgagaggaagaacgaacgatgacatccacggtctcgtataaattaacaaccatgcctgcctcgtccacgatcgggaccgcgctgatacctctttcggaaaacatatggactacgtcaaacacggtagtgtcgagcgtggcggtagctatcggccagtagggagagattggaccaggtggtcgggcgtcctcggaagagacgtacgtgccaatattgcacgccctcagggacctggtgagcgagtacgtgatcgggcactggggtgtgtgtgtgtgtgtgtgtgtgtgtgtgtgtg

SEQ ID NO: 629 - DNA, 43791 bp, Xanthophyllomyces dendrorhous
tgtgtgtgtgtgtgtgtagggaggggaagtcgggagggaagagggaggttgagcatgatgaaagaacagtcatcagcaaaagctgagtaagtatttggagacaccgaaggaaaacttacattaacggcgatgaatttgagaactctatactgtgtgagcacacttagtacgacgtcacctcctgtctgatcgtcgacgtcgatgagtggcagccgtctggcgtgggtctgttgaagctgtctggatgcttcgaacagaggttttagcggatgaaccgactgtaaaggtggaggaggtacatgaagttccctctctatgtctgtgagacggaaggaaagagtgaccgaatgaattcagagatagtcccaagagagaaagggagagcacacggaagagaagactgacctctgacatgttcgagtctgaaatgctcgacgtcggtggccgccccttcgtatgtctgggtgtagtagtagtattggatcagatggatgatgtctgagaccgtgagcattcctgaaaaggcgaaaggattgatcaaagtgtaagaggttccatcagcattcgagtgaaatgatcgcgcctagaggccgatgcaagagcaaagagacgttcgtaacatgtagcacgatacaagagatagagaggaacacgaggacctaccatcgaaacgagaggtttccgagttccaaagaggagcagagatcactccattctgccacataacgccaagtgctttcttgaccataagcttgttatcaagcacgataagtctaaagctgacgggaaagacgtcgtacgagcttctgcctttgagaaactgcctgatggatgtcatgcctgcttcatgagtgggaatctgcgaaggatctaccgaagaatgtcctctagctcgcagcctgggctgtgagtttgacggccgacgcggctttccggaagtcagaccggacgatggggacgaagccgagggtgtgatataagccggtgaggccggccgatggatcactggcggtggcggtaggggagaagtggctgttggccgactagtcgacagaggagacaggataggtgcgaacggagaggacatctgtgggagtgtgtggttctacaaggatgcggcttgatgatggatgatgagcgatgagtgatgatggaggttggatgaacgagataataggaaggtcaaggtttgatggcgaacggctgggaagaaaagcattaggaaacgttgtagtcgtttcgtagtcagttgtagtgtttttttgtagtcttctctttgcagctgcttgttagagtcacctcaaccttaccatctttctctaagggtacgcttctgaaggattttccagagccactcatatgttggtccctgtggtacggattgttctctcatgggtctcacctagtctctgctgtaaaatctctttgggcgctccctgcgagccatcgtctgtgatggctgtagtcaagtgccgtggagagaacaatagagaactttgtagtcggcctattagaacgtttcctaatgcttttcttcgcctccctagcccgcccccgagatgtttttttcggttttctgctctggctccttccagattcatcaccttcatcatcatcatcactgtcatcagacatgccgtcaagtcttcataataaacgtccttccatgacggccgagcaggtcgcagagactcttgccaagctaggtctgtctttctttcagacagtttctcacttcttcttcgctctcttccttcctaagggcctgctttgttcaagcggttaagactgactcaatctctttttttttggtttgttgacccgtgaatcatttgcctcgggtatatgccaatcattaatcgtctacctgctaccatattgaacctgacaaccataccgaaacagaccttccccctcctgagaggttagaagatgaacccgaggtcgatccggaggaggcagaggccattcaggcagagctctccaatatggatctcgggccaccagagtccgtcaccgaggctgccaggcgagcagacgaaggtcttggagctaaaggtgttgccgagggtatcgccggacagtgggacgctctgggagaagagtacggaggccagcccgagtggcttcagggtggaccccgaagaccgaccgtcatcaggtcgaccacgccctccagagtgccgaccagggtttcgtctcctcagcctcaacagtcgaccctatcatccgccccatccactccgtccaaactgtctgctcaaatcggacaggcggcctcttcaatcgtagagtccgcttcctttggtatcgccagtgccgcatccaccatcggtggacttctcgcacctcctactcccgtcaagtcgaccactgctccgccctcgaccgcaccggccaccgggatcactcaggcccagaaggaagcagccgccgccagcggtgggtccgagcagaaagtcaccccttgggatgtcgagggtgaggtcggagtggacggtgtagccattgggatgtgagttctttctctctctttctttccgacatgttctaacagccacttggcctatgttcgaggctctggaccaaagatgttgatcatacataccttttctcttgtctagcgactaccaaaagctcattcgacagtttggtacggccaacatcactcccgagctcatcgctcgattcgagcgactcaccggtgaacgagcccacccgttgcttcgacgaggcaccttcttctctcacaggtttgtctttgattcgcctcttgtttcaccgggtatgatgtgctcaggagctattattgtatttcatttcgccttcgttggctccacaactacctttacacagagatctcgaccgaatccttgacaagttcgagcaaggcaagccgttctacctctacaccggtcgaggtcccagcagcggcagcatgcaccttgggcacatggtcccattcatgttcacctggtgcgcctcgtcttcccctagagaaccctctcttgctgttcagtatttggtccgctcacctatcgatcgtgtttggttgtatacagctggcttcagagcgtgttcaaggtccctttggtcattcagttaaccggttcgtgccatctattctgccctgttggcatacaatcacccgactgactgttcgttcacatgcgcatatacccagatgacgaaaagttcttgttccagaaggatagcaagccactcacgcttgaacaaacgcatgctttcggattcgagaatgcgaaggatatcatcgcctgtgggtgtgaactcgagcgaacctttatcttctctaacctcgattatgttgggtttgtccttttcttttctctgttctttcctctgttctttcttcgtcttaaattcaatgcgtgtatatctgatcgaactggctttgaatccatggatgcgcattggtatttgttctatctagaggagcgttctaccgaaacatcgttaggatctcgaggcaggtcacctacaaccagtcgaaagccacttttggattcaacgactcgtcagtctctctctctctctttgctctctttatcacaaacactagactgacgtcttgttgatgaacacacgaatctatagagacaatatcggaaagtctcacttccctgccatccaggccgccccgtctttctcaaactcattcccccagatcttcggtgaaaagacagacatcccttgtctgattccttgtgcaatcgatcaggatcccgtatgtgtttctctagttcgctcgttctgtcccgagcttctaataaaacaccatcggctaattcgagatcgatctctacttctgagcagtacttccgaacgactcgggatctcgcgcccaagcttaaataccagaagccagcactccttcacgcaaagttcattcctgccctccaaggagcgcacacaaagatgtctgcttctgatccgaactcgacgatctacatgaccgacacggccgcgcagatcaagaagaagatcaactctcatgccttctccggtggaggaggtgatggttcggccgaagaccagaggaagtttggaggaaacccagatgtggatatcagtttccagtacttgtgctttttcgaggacgacgacgagttgcttgccaagatcgctcttgtacggcttttccttcttcctatctttctcacttgatggattgagcaagactgaaccatcttactttcggtttcatctatcccactggctttaaaaaaaacaggactacaggaaaggagagatgctgtccggcgagatcaagaagttgtgtatcgccaagatccaggagtttgttcaaggcttccaggacgtacgtcttagttttttccttgtctccttgttcttttcttgtatctcatcgttttcccatctgacggttatgctatctctttctttcacctccctcttttattttgacgactgtaaagcgccgagcaaaggtgacggatgagttgacgaaacagttcatggacaaggatagaaagattgacccgttgcctggaaagaaagtcatcggtggccaggccgcttaaatcttttttagaatcttcctcttctatacatctatagaattttctcccctctatttaactattcactatctagcgtactctccacaagctcttctatccttcctgtttgtcttccttttggttcttaatcctttcttgtctgggttgcgggggatcatctaatgacggaaatcgtttttggacgcaaagagcgaattacccggcttgaaccctaacagaaatcgagagaattggaccgatgcgcgctatagatgattgagaaaggccatccaaataatgccaaaagaaggtagagagggagaatacagaacgacgagtcgatcagggtagttcgaaatcataagcaaggacatcctgggtgtttggtctgacatcctcgatgacaatcctgtttcagatgagcaaccgacatcagccaggtgaagctttcgactggcgaatttcttctcttcttgagacaacgaaagcaaagaaacgaacttcatgtgggcatcgctaacggcatatttcttgagagcatccatgctctcgaataccgcgtagaagccttcaggtgtcgttcatcattccccatgagttcgcgaagagagagagagagagtatgagtaatcagaaagttactggccaacaaaaatgcagacagctcagataaaaaagatgagcaagcaaagaaataaacgcaccccaatcaaatcccttggctcggtcagcgatctttggttctcctacataaccttccaagacaccaggtacggtcaacaacttttggaaccgagctttgacctgtgcttggtgagcggctatatcggccactgccgtgatggacgaagggggaggagcaagtttccagagaacgatatgaatgatttctaatatcgttgggtttcaaatcagatgtcagtcagctcccagaaggatgaaaggtctggatgaaagagctgatagaaggatcgacaactgactgcccatggttgaagatgtcgagatggtgtcggagatggatggataaagaagcgaattcgtttttcgtaacaaatacaaattcttctaataactttcaatcgattttctaatatctttttttccctctttcttagccatcgatcctccttctcatccatcatcttcaattggtctccgtccattcaagcatacacaccaacacacactcattctagctagaaccagacacgctgaagccgtcccatgcctccaagaaggttcaaccagccttctccgctaccccatcatcgaaaacgaccgcacacgccgcctcaacctgaagcggcgcctctgccatatgactcgttaacggtttcggtcaccatgctcggagcaggccaggaggttgggagatcatgttgtgtcatccaacatcgaggtcggacgatcgtttgcgatgcaggtgtagacccaggtgctcatggcttgcccagtttaccgttcgtagatgagctggattggagtacggtcgacgtgttgctgatcactcagtcagtctatatcatcctctctctctttgtggtctctttctctatggctttcaggttcatacgattggagttatgagatcagtcgttgatgcagtcttttagcgtttcgtatgcagtgcccatctggaccatgccggaggggttgcctatatcatggaaaaggtaggtttcacctttgtttcttttctagtggtcgggttgtcataaagagggccgaacggtcatcgatattgtctactcttcgcctgaattttcttcgatgtactctcgctgatactgctgaaatttccaaatcgatatcgctcttgttcatttggcctgcagacaaacttccgggacggacctggtaaggtatacatgacccacgcgacgaaaggaatctatcggtacattatgcaagatttcatccgtgttcgctcgtcagtcttcacctctttctcttctatagcacccttccgttgaatcgtttgatggtctaacaacatgtactcctgcagacgttcaaatgcgacggatgacgcgctcttctctgagtccgacgtactgtcctccctgtctgctattcaaacggtagactaccatcaatcgatacatcttcccggaggaattcattttaccccttaccatgccggtcatatccttggcgcttcgatgttcatgatcgagattgccggactcaagattctttacactggagatgtcagtagagagatcgataggcatcttgtgccagcagagattccgctagagaggccggatgtgatgattggggagagcacgttcggtacgatggcgctggagaacagacaagataaggaatcaaggttcctcagtaagtgattttgccgtatctgaagttgatttagttgaatcacagagcgagcgcttgttgaactccgctaacttttttcccacctatttcttctcctgcttagacgaagtacagaagatcgtccgcagaggtggtcgatgtcttctccctgtattcgttgctggctcggctgttgagcttctgttaatcctagatgaatactggtctaaaaatccggaccttcactcaattccgatctactacggatctcatcttgcccgtcaatgcatggaggtctacaagcaatacatccactcaatgaatccctccatccgatccaccttcagcaagcatgagaatccatttcagtttaaacacatttcccacctcagagacgttgccagatggaaagatgatgggccgtgtgtgatgttggctagtccgggtttgatgcatgcagggccaagtagacagttgttggaaaaatgggcgccagaaagtaagaacgggttaatcctcactggttactcgaccaccgggtccatggccagagtaagtctctgtcgtttctcttccctttcttcggggtttcctgcttaaacttgttttcaaccctttattactgggcccgccctcttggcggttcacgcattttagcatatcaccgacaagacaggactagaagatatcgaaggtctcaacggccaaaaaattccgctaagaatgtcgattgagacagtctcgttcgctcagcatgttgatggcactcagaacactgagtttatcgaacagatcggagcggcccacgtcgtacgttattgagaactcccttcttgatttcttattctcgtttcaaacccaacccatcacgggacacgaagctgagcttggtcagatcgtactgatcactgttgtcaacaggtcctcgtccacggagaacgtcaccagatggctaaccttcgaaaccaactagaaaagaacgcaaaacacaacgagcgggacgtcaagattcattctcctcggaatactgaaaagttggatatcgttcttcgaacggaacatatggctcaggtaagtttttctttttctaaacactgcttccttcctgcaaccttctttgtctcctcttgccgcggcgcaaatactaaataggatacggcctcttgtgtgtacatgtttgcttgcgcgtgttgtctttatatgtaaatctcaggctatcggccgactagcttctcgaccgccttcaacatcccagctcgtttctggtcttcttctctctaaagatttctcgtataccctactggatccatccgacctcaaggactttacaggattggaaacgagtgagatcaaacaacgtcagaatgtcagactgaatgtcggttgggatttggtcaagtggcatctggagggtatgtttggtggggttgaagaaggtgccgacaagaatggaacgccgatcatcagagttcgttcccttactatctttcgtttacctatatgttttcaaatatcttgaagagacaaagacaatggaaagccgtgattaaactgacatcaggattgttggtctttaggtcatgtcctctgtggatctaaaattggttacagagcgagagcttacgctcgaatggatagcaggaacgagtagcgacatgatcgccgatgcagcgctctcgttgattctcggaattgaagaaagcagaagctcagtcaaacgtaaaacccttactctcttcgcattcccgtttacggacgtacatgtctgatgagattggccatctgttttgcttttcttttcttctctatccttacagatactacgaagaaacatcgacactcgcattcgcattcgcattcacatcagcataacccaacggtacctccaggaggagagaccaaatcctcaaatacggttgacatcgaccgggttcttcctttcctcaccgctcactttggctctgccgagctagtctacatatctcctcccagtacaagtcctatcaagccagaagatgaggatgataacggagacctgaatgaagacaaggccgagatcgaagctgaaagatctgaagaggatccagtggcaaagatagacgagtctggagatgatgtcaaagtagaggtcgatgagagtcgtatggaagccattctcgaaggtgacgacgggcggaactcgacgaacggggaagagcagagtgggaaggtcggaggagaccaggaggagggggtcaagagaccgacaatcttggtcaaagtggatgctcacgaggcttcgattgacatttggacgatggtcagtatctctttctcttttttctttctttctctcttccttctccgctctcgagtaataaactcagacgacttgtatctggactttttgggttatcagaccacaacgtgcgcgagttcaactagctttgcgacccgggtccatggtgtactcgccatggctatcgccacgactacacctcttaacgtagcgtttgagtcggccaccggccttgtgtctggccagtccggaacaccagaagagggcaaggagcgaaatgggttggagtcgttcgtgaggccagaaggttcatcgacgaacgaaggactggcggatgagaagggcgatttagatatgtagaaatgtgtactctgatgaatcaatgtaaatgttatcgtggaaagcacaacatgcgaagacgggactgtctaacgagaaagagaaatcaacagaagataatatgaagaatggaaaacgatgagaaagaaaaaagagccatccaaagaaaaagaaagaaaagagaaacgaccgctgcagggtttgaacctgcgccttcagagaagagtagctgatttgattgaaattcaaggctaccgcgttagaccactccgccaaacggcctgttgatatttatattgaaatttttacatagatatatagagtcatagtgcgttgtgcatctcgtccgcggctttcccaacacacctccttcctgcctccttcatcttgtatttcaacctctctgcctcgttcatcactctggagttcaaacaagtcttacctcgtttctatacacacaatatctcccagatcccaatctatgcttcctcgtttgatttctctgcttgtgttagggctagggtgtttcttgtcgctggcgagagcacactcgatagagatcgccgctggtgcaaaagaatgcttctttgaggatcttcacacagaagacaaggtctgtctgttccctttattgttctctccggttctgctcctcttttccttcaagctattgagattagagtctacttcgactgccgagctcgtattcacagtagagcctccgacagaaacgaaccgtttactgacaatacttgctgtctatcggttgcctatcgtctgtcggctattcagatgacggtcacctatcaagtcggagagggtggtcatttagacatcgacttttgggtttgtcccatttcttcttttctctctttctctctctccttgctccctgcttgtttgataccatgctgatcatcatctacgcgcatgacaatgatcggcaaccgctttaatcgtgatttagctgaagaacccgtcgtcgaccatcatctattctcaacatcgtcaacctaccgggacgtactcttttacagccgatcagaatggaaggtatcaatactgcttctcgaatgagatgagctcaatgtcccccaagattgtttcgttcgtccgctttatctcgtccttctgccctttgtgtcgcttcgctcttgatcttcagggaaagcttgttcgtcctgcacgcgtcttgtccacgactcaacactttgctctgtctctccgcttctttttctcttgttctcaaatgtccctcttgttcgatcagattcaacgtccatggagtgatctacattgccgatgacggtcaaacggcgcctattgagcgacagatcagggagctagctgatagtctacaggacgtgaaggatgagcaggagtacatcgtggtcagggagagagtccaccgaaacagttcgtttcttttctctccctccttacgttcattacggctttctcttcctcttctgcggaatctctgtctcaccgccggtttccatggttctcttgctccttgatagcggccgagtcgacaaactctcggatcaaatactggtctatcttccaggcactagccctcatcggtgtatgcgcctggcaagtctactacctcaaggtatcgtcgtcgtcgtcgtcgtcttttgtttgctctttccatctgttctcagctatccgggcatgtttctaaaattctaaaccatcctggggtctatttctgttgtgtctgttgtgtcttttgggatacaggcgttctttgaagtcaagagagtcatctagtaacgagaaggaaaccctcggaattcgtaccatcaacaacggatgatgaacatgtcaagtttttttttccctttcaaataatcaagagtgatgaacagcaaagaatgagttgttcttgggggtttggcttgtctttgacatcacagaaaaagggagaggaagagggagaaagagaaggtctgattatgaaccgaccgagtcaacgagccatataataatagcagatcgcataaaaacaaaacaaaaggaagaaagaaacagacaaaatttcacatacgtaagagcgcgcatgtgtctggaggttctttcctctgaagaaagaccaggttattgtttgtaagatagccgctgaataggaggaccagacacaagataatagagaagaagagaagtaagggagaaaaaaatgtttgactgggacaagaccagaagaagattacaaaagtgaacaagacaaaaagagatttccaacaaaggcacgagcggtcattcttgggaataaacataacatggtcgatttgatcggtcgagattcgcatgaaacacggaacacgaagcacgttctgctttccccagaagaacattgttgtattttgtacgatcagtgatggagagcaggtagagaggagatacatcaacgatccggaagagaagagacagcaagagggcgagtgaagaagtcgtatgggcttgcgcggtttccagggatggtgatcagattgggagactagatagaaaagagatccgctcaaacgttagtcaacgaggacgaagcgtgtctagtaggagaactgtcatcagcaatattcagaacatgtggattgccgtcagcaacgtttgtttcccgggagaaatcagaaatagaaagggcttcagccgagacacacccttccatatgactggccatgatggactccttgacgggcgagctggagagcgtagggatatgacctcccgaagaatgaggaattctgcagagagacgaggaaagcaaagacaatcgtttgatccaatctgatcagacgacgaagagcggaagggactagcacacacaacagtggaaacggatgaacatacgtctcaggctttggaatagctgtgccaacttggacaatgtggccggttgctttgcctgctttggacatggcgtaatcgccggaatcaaagaacttccgctcctgtgttagccaagatgtgtatacgaagatatccatacggatcataagtagagccaggcgtgttcaaacaggatggccaaggagagaacgtttgaatgtcaaccgggaagccaggcgttgaatgaagttgcaggatcatccgtcagctgaccagagactaaagcacaacctagtacgaggaagaatgtctgacctgcattcggttcagtgggttcttcttggctggaagcttgccgtaaagctgaaagagtttcttttcctcctcgttcaaggactgttccaaagtgagaaggaaggacaaggactggtcaactatggatttcgagatgaggataactggtcaaaacagacgaggcatgttcgtgccagaaagagaggatgagaggaagaagagagaagccaccaggacgtacggagaggtccactttgttctacagaccagccagcagatttgtttcccccccccccatcgaatggacagataaacagatcagcctctagcccaacgagctgtttgtctggtcgaactgtctgcttaccttttgagagggaagcatcgtgtcgatcagaagggtacaggtctatgtgggtgatggttggctgagaagtgagcgggtgagatggaagaatcattaggtaatatttgtagttcgctcattacaaatgcgcagcaggtcattatggatttctctgatgatctcctcaacatcttccttctagctggcactctcgtcactctcatcaacagaaaacccatcgttcgctcttggactggaacatagaccaagtgttgttctcttgttggcaagtgcacgtttgtcttgagtacaccatacgatacccgtacccaccatggatccttgctcgcccatcggtctggcacagatcccagtgctgatcgtgccgctcggcaaagtccgggcagagacttggacaaagtattcagagctccttggttcgttcacccaactcagccaggcagatatcccactggatgcaaaccataagaagtccaggttctatccatctctatcctcgtcgttccctacttcggctgcttcttctgcttctgtgacggctaccggagcaggtctcgtcaagagcaacaacaataatacccttcatctcacctactcccactcgcttccaccgttgggctcaacagagtccctctcgctcatcagacctagcgtaaaaccattaatatttatcgggatagtcgacctccatcatacatgtactccatcactgcctctgggcgcacatctgctttccaacaaactggcagaactctttccatcgaacgacagccatccgctcgtcgtaaagtgctttggggtggggggagaagacgataactccagagatggtggtccggacaaagagacgaccggaacagtcggcatagagatcggtttgaacgaggtcgtcatagacggtggtccaggagaagtcggagggaacggggtgaccgtgctgcctagacttggtcaaccgagagagctgattgaagccatgataggagagttggtaggaactcttctaggagagttcagcgatctggtaagtgaacctttcgagctgcactctttttctgcgtcttattctctcaacaaggttttttcttcttgttcttgttcttgttcttcttcttcttgtttctccttctactcaaccgaccatacaggctgcatcgttagaaaccccgtctggttacgcccaccttcaccaatcgcttctcccttcattctccgtaccctccggtccaaccagagcttcgtctcctttctctcgtccaggaacggcacattcagcatcggtacccgtatctcactcccagcctcaccccttccgatcgtctactctgaatggcgggtcgacaccacccatctttccttcccctagtcccacacctcctgtcttgtccaacactttaagctcgcagacatctcaactgcctcctttcccaccttctttcaaccgttcggtctccgcttccgctcgtactacaacagcctctccaacaccgatgacaccgacgtccgaattcggtgttgggacaggaggagggcctgtcaagacaagcctgggaggagtcggcagaaaaagagtggtgtcctccagcccgagcaccaccagccaggcagcgacatcattgcccacctcgtcggcatcactcgcaccggcatcaggaggagggcctgttgtgggaagcgcgcgattgaatgttgtgttggcaagtttgtatctactaagcggtcggctgggagatgccatcgccagcatcaacgaggctctgcctatcttcaataaatcaatgaccgatccaatctggctagcgaacggattggagatcctgggaagcgcaatattattactggagctcaagtctaaaggaccttcttccgctggtcgggcagggcctagcctgggagcatcgacctcttcctctttctcgacaagttctggaggggtaacgacaacagaatacgcagagatcctaggaaacctaaaccaagcaatcaacacctatcatttttacaggaccccttttccagcatctcccactggagcacggaacccacttccggcaatgtatacctggtgcgctctccgacaggcccgggttttggagcttatccttctgtccgggggtgaactcgggccggacacggttcccttcctcttctcatcttcttccgagggtcgggcctatccaccctcgtatcgcacgacctgtcgaaccaaagctatcgtcgccgctcgcgccgagatctcggccaaagcgtcggtcgctcatggaccttggttgttaggcctcgaacagaaggaacggattcacgttctgagtgtgctcgtcaagctgatgagatctcttggactcagacggaaggaaggtctctatgcgagagagctgttggcgtgtctggcggatggggtcgtcagtgctagaagttctaatggcggaggtccatcatcagtcggcgggagcacacagaaagcaaaggacagagcaggctcaaatctctcgctaggtgagggcataggagtcagagatgtgatggatatggaaggaaacaaaggaatagtcatactgatggagagaactttggaagggtacggagtcggcttgggctcgagtgcattttgggaggggactgaaaagagcgaaaacgacaagttgcagagcgtagagagaaaattcgtcggtgggaaggagtatttagatgaagaggccaccgggaaagataggtttggctggtcagatctcgttttgagagttttgagagatgggattgcgctaggagaagtcttgcctggtaagtcgctgggtcctgtctctgtcctttcccttgaacaaactaattagagatcaaactccttatttctttcttctattagactaccactcagtcattcggatctccacaacgatgctcagggtgttttatccatcgatccctcctccagagcagaattatctgagccaggttctctcccgtagcctggcgaccgctcatcgtaggggcatactaaatcctgaaagtcaacttcggttttggccgggatggatcgtgttgagtctcgaagctgggtcgtgagtctctttttgttggtttaaagcgaggaaagctaaagcgcgagagcctctgatctaattggttataatgaactggatatgtatcttgaacttcatagactaccaacgagccatcaacctatagagcatgccatgcaggatcgagagatcgcctcttcatcttcagccaaagggcttttgagagatccgttcctcttcaacccgcgttcaaaatcatctggtcagggaggaactgtacgtgttgagccgatatggccatgtgttgatcgagaagaaaagtttaccacaaaggatgtgcactgttaactgatctgtcttctctcctttcttttagactcccctcgttcagaatgacaatgctgaattttttgtaacgctaagaaatcctttcgggttcgagctgcaaattcaaaacattcgactaaggtagcttctctctcgcattcttctgtgtctatatacaaaacttgactataccgtttgcttttaaaaccagtacgtttggtgttggatttacgtccaacccatgctccgcgacgatctatccgaattctatccagactttccgagtcactggatttgctcattcgcatggccaactcgtcgtccaaggatgcgttatccgtcttcaggatggctctgaggcagaattcatgcttcctctacacgacgcggcagaaatcaaacgacaacagaagagagaaagtatccggaaggacacggaacgtaccgtcaagctttccgggctgaacgctcgaccgacagaaaggaaaaggagagaaagcacctggttagccaacgcgcccgagaaggtcaaagctcggatgagtttgggggaggatgatgagttggcgaattatctgacgtgcgaggtcgttccagagcagccgttgttgagaatcagaggaaccagtctgacgcatggagctattatgctctacgccggagaagagtaagtggactgaccatcaacctgggtctgtctcggtcatcgtttgtattgtaggctaacgtgtcgagtcatgtttgactgtcagatctttcatacgaattactttggagaatacgtcgaacgttcctgtagattttgtgaagttatctttccaggattctactaccgggccagcgcaagcgaagatagcagagggcgaactctcgcctggagagcttcatgaaatcgaggctgatcttatcaagagacctgttttcaactgggatcgatctccagaaagcgtcaagatccctcccaggggaagatatactgttgatgttggttgtcttggaaaagttggctggtcagtcccttcaagttccatcctcgtgatctgtgaaagtaaaatccagatccttaacttgatgttctcgctcgcgcgctgttttatagcacctggggatcgatccagattgactatgctttgatcaaccgatctccggaaaaccctagtgcaatcttccacacccgacagatcactctttccatccttatgtcggtatacaacaccctggaaagcacctcgctcgatatcctgcgaatcccttcattcacctcttctcgagcccgtctgacatcctcaaatttgtctttgactgagagaacggttgatctacccctagatcgtcaggaggaatcctcgatcaaagacggatttgagatgaaagatccagaagatcaatgcttagtggcgattgatataagaaatgtatatggacagccattcgaagtgacgcttgaggcaacaaaggtctacgaaggtgagactgttcactcatttatggatattgtgatctgcttatgtgtattttactcattttatgtgggaaccaccgataggacgaaaacggaagtcatcgacgaggctagtcacacccgggtgtacggaaaggtaagccatcatcggctcgtctatcaatagggtttatgaaatagtctgcttacaaaactgtcgaaacgttcgtatgcgctgatcttatgcagggtcgtgatctccatccctcgtgtacttctaccatttgaacaaacggctatgcctattccgagcttgatgcagcgtcaatacgtggtttcctcttcaaatgcaacagggtcggaagatgatcttgtcaggaacttgttctggtatagggaggaactgttgagcttgatcaaagcttcttggtgcgaagtaagtcgactcttggtacaattttgtcccctcttgacatggagattctgcttctccgactaacattagatatcaattggatacaacagcctggaacatcaaagagagggacattatctcttcgatctcaacgattaacagagccaatgctacaagtcttaagagtagatgaagtctctgtctcattgagcgttgtgccaaacggtcgttcagagacgggtctggttcaatctacggtccagtccaacgagttctttgatatcgtagtcaatgttcgaaatcgccttggtaagcttctggggccttcccgcactcatttcccctcttcaaatcgtagggttgtagaaaaatcttgacctcgctgactttcatatctctcaatcttcctcccttattgttctttactaaaagcgcgctcaatttcaccattaatccatctttcctctctaaaccctatccttgcttcccaacccacttggtccatcatatctcccaacacacctacagcacacacgtccccgtccaatttaacatcgccttacatgatccattctaactcgttgatgcttgttcctcctggtagagcgatccctccaaattcgtcggtcgacacagtctttacggtgaatgtcttgacgagcggcgtagccgatttcagagcggcagttgaagaaattggaaatgaggcgtcatcttccttgacgaatgttttgaaaaacggaagtgggaaggctaccagaaggatccgtaaagaagagcaaggtctttcggagaaagaaaagaagaagagagcggagagtaggaagagggaagaagaagttgaacgaaaggaggtgtggttttcggatatcttgagagttgatgtctgttaagtagtagaatatttgtgcaaggtgtaatagttagatacccgcttgatgctttagatcctcctgttgtctcttgcttgtttgcccttagcggaaaacccccccgagtcgttaagtcataaatatgcggaaagtagaatataaaacataagacgaaaaagatttgagtgaatgtgattcattcatcccccatttcactggatttcggtagaaacatcgtttttgtatcagccaaataggtaaataaatgaaaggagggaagcaagctcgaagaacagatgaagggaaggacgaactctctacgttgatagatatagccacctgcctccaattcatcaatcacctcgtccggtagttttcccatcaccctagctgcgtataatcctctcacataatcctctgtatttttttaaggtagaaagacggttagaattcgaagtgttcttgaagacgtacagaagctttcaaagatatggacgtagaacatgaaacggcaactgaccggtccgttgccacttggctacccagctaccatccctcatgacagcgatgattccatcatattgagcagaggtgcattgagagactcgatcactcgatcctttcatctgtttgtttgatcatgttttcatgtagagattggtagaacaaaccgttcgttaaacccgatcgggattaatttgtatacgaagaagcgcgtcagttttctgtagtgtacatatgaacaacccctccctattctctcgtctctatctctgaatcaatctgtttcaaggaagaggcttccgtgatctatccccgagaacgtaatggcaactagggcactcctcaggagttcagcaaagggggaaggagggaaggagagtattcgcacctgtagaatctcatcacaattcggacatcccctttttttgaagtctcctggcgaaagcaagattgagcagtacaagcatgctctgcgtttggcttaacattcgttattcaatccatccagaaagaaagtagagaaaggatgggaatgtgtgaagttcagtgttcaggataagtttatcagaggttgatgtttgggagtgccctagatgccagaggatgagctaccctcttacctttttgagatggtaaaacagcgtttcttgtacttttactcatggttgctttcgaggcttgccaatgaatgtgagaattgggatggacaaccagatgatcgaatgaatgagtgaatgaatgaatggagaaagtagaatctatccgagagcgtctcaaaaggagacgcggtgtaacctgacgatcgttacacacgctctatcgtagtgtttgagtaactactttagagtgctgacatacagagacccaatttgggctacatatatatacacacaaacacgaagtttctccgtacgacgcgttctcttttttcaagagatttaaaaagacagacaaaaggagtaataataagagagaaagagagagaaggcgtggatacagggaaaatgtgttcacatcagtcttccttgtctctgaagccctcgtaacattctccaacaaagatagaaggcaatacaagccgaggctcctccgaatctattagttgaacataaaatgaataagagagttagagcgatggagagatatgacgtatctgtgaagattatatgcaaagatacaaagcttaccggaagatgaaaccaacggcatcaggcggagatgaaggattcggaaggtcctgcctagccaaccagtctatctccccatttagagagcgcaggtcggttacggtcgaattgagtttgacatcggggaagagattcgtgaagtttccggctggtatagtggagtttttagaaatcgccggtggaacagggagatgaacgacttgacggtcagggtcaagcagatagaaaatgatggaggacaagaacgtgatgatgaattgagggatctgtagaaaatcattaaagtagtcaatatcgaacgggtaatacaatgcgtttctaaagtgagattatacgaacgacgatcgccacgttatgaataccctaaaagccctcgaatgaaaaagaaaagtcacaaaccacggcaatgagaataattgatgaaggctgccgatcatgacccactcaaggaccctactcaccaaaatgactcccgccttctcggcagtacttccgccttgtggtcttctgttctcttggccttcttctgtatccccgtcgacctcaacattcacttccatgttgtcttctccatcaatgccatctggaaccctttcgttcgattcgaaacttgtcttccccatcaagccttcgcgctcaacctgttcgttcgtaggagaggaaggagagagagagagagagtcggtggaatgactatgatcatgattcaccgtcaaggtcgatcggcttcgcagtgggatggaaggaggcggggcgtcacatgaaagaataagctcccctaactgtcgaccgagacatgaaatgacgaggcgatttggaacattaattcctatccagataagcgcatgaaaatagatggaagggaagatgtctagattgaacgtacgatagagaatggtgcccctacagtatgaacaaagagacgtcagctactggttcttctcttcacgatgatatttcaaagattcgagagacgtatgtggcttacaaccagcaatggcccagcagaacccggtaagcccaatgatcatatttgctcctaaaagcggtatcaaagaattgatatcagtctcaaacctcttcagcacatatctgaatgaaagatcaaacgaagactgttctgacagacttaccggttacgctatcagcgaaccaagttgcgaacatcgtcagcgcaaatacaccgtggctgaacagccaaactctgcctaacgtgagccacttgatttgcaagctcttcaccgaccatccttcttttccttctgaccactcgccgcgtctgatatctcctgattctgtttgctggtctagagagtatgaaggagacgatagagttgatggagcaacaagaaatggaataaaaacggcagttgcaaaggaaacaagggcattgtagaaaagcgccttggagccggcccgggtggcagacgcgagaagcgttggatcagtgtgggatagatttgggtgttggagaagctcttgatgtatgtataaatccgaaacccagacggatgtaaaaaacagaataggaaacctaaagattgagtgatgcatgtttaaacctcaagtaagctctttagtttccatctaagagatcacttgttatacttaccaaccgatcctagttaccgattataacgcgttgatggtcgtttaagccaatctttctcaacggttagcgtatatcttttgcgctaggttaagaatgatatacgtgacgaaccaagcgaaaaactgaacgatgcaaatgttacggatatctttaggtaacgtcaatgcgttcacccagatggatttgagcgtacctccgagagtactttttggtcgcctgcacatacgtcgtatgatcaaaacatgatcttagataacatatgatttaacctcaaaggggaaagaggtgaatggacgaacgagtcttcaataagaactctctctttcactccccaaaccatgaggccatgagtgccgacaagactcaacacagttatcactgtaagggccttcagctgagtgctcgccaagaacgggaagatttttagcagatcgacgtttccactgtataaacagtttttggatatattcagaaatgaacaaaaagaaatctcaagtccagtcaggaagggtacgacaatactgtgatatcctaggagagaaacaaacatccagaaaccggccaccgagccaaacccagacaaacggcctgcccatgcgttccctgcctcttgctgagatggcggaagcgtatccactagtattattataggatgaaaagatcagaggatggtatcgatagataggcgttgtggtaagattgagaatgacatgcctaggagcgcccgatcagcggccatgacttgaagaagttgtgtcgaggtaagttgatggataaataaatcacacatagagttgtcaaatctcgatatgttgagagaaggcacgatagagatagaaaggaaagtgaaagatcgactcactagcattaactgagaaatccacaagaaacacagctaagattgcaagcccgatacttattaccttcatctaggtagcattcaccatcagaatgtagaaatgttagggcattcattccacaagacacgtcatctctgctcacaagaacaccaacctgagttgcgctcccaaaagacaagattgaaccaagatcttttgcccagctcaaaaggtacattgctatgatagtgagacagcaaccgacgatgatgaatggtcttctacggcctagccttgctttcgagcggctgtttttgcaaaagttggtttaaacggagatgctgagtcagagatggcgctgttgttataaaagaataacgtaacacatgcacaccgaacaaagacttactctgctagactccctgttctcaagaacatgattccaaaccaagtcagttttccttgtttctctgaagctaatagatagatatccttaacgacaaaccgatcagaggttgcatgatcaagcctgacaatggccctgccacaaagaccaaactcatcaagctcttcgacagcccaagttcgatcagaaatggcgaagcttgactcatttcaatcgtccagactgattgaacgcctaacatccctagtgtgagcagtgggtactgatggtattagccgaaacagatgagcaagtcgggttagttgatttgaatgatatatcgcgaacggagtcacatgtctgagcattcactttcatccatgaaggccctataattctgttttgtcatacacgacgctcaacactagtatcagtaactctgttgacatgagaacagacctaaagaggtgtacacaactaaatcggagcacaccgatagcaaacgagaacgacacgcacgaaggtttcccaacccatcgaagctgaggatcatcttcttcagagttcggaatcagaaggcctcctcctgctgtcatgtgtgagtctggatgtgtacgtgcgtgtgtatggtgatgcgagtggtgtacaagtcaggatgagacccgagctaatggtgctgatgaagatggggtgttagcggttggaaggctagcggggaatagaagataaccctagcacaatctggggcaagtcacgtgatcggccgctacaaccgagttatcaccatatttttttgtttcaacttcttttgctgctcccactttgaaagcttgctctgtttgcttgaatctctcgctcaaccatctagtttctattcaagatggcaccccatcagccatcagaggcatcttatctgccttctcttcaatccagtctgttcaagactacctcgtatgcacaagaattgcccgccaaagcgtccgaccttgcctttcaccgatcagttgatccaaaactagctgccaagcttgatgccactagcggtcaggtttggaacctgattgatagcttgctcggactcatagccgaggacgagagtgggagcaaagttggaaagagaaagagaagggaggaggatgatctgattgatgatttcgaggatactgttgtaaaagaaggtgtcgatggcttactagagaaggcggttcgtcttcggtctctatttttgtttatcctcaggtttgaactctctccaactaatctagaatttctgtcatatgtctgtctcaggacacttgtatggacaacttcttgggaaggatacccgcgcccgcgattcctatcattcctactgagactgctcgatccaaagtaggttaaactatcatgctctgtgtgtccatggctaccgtcggtcgctgatacccatgctttcctatgcagaactcgacgctcaatccgatcgtctcgtccaaccgtaaaggccgtttgcctagctcgattttgaatgccaacattcccaagcctcaaataggtttcatgtcttctgtcgccaactctaattcgctacctacctataagatctactctgcgctttctacccccgaatttgcctatcactatggccgattccctctcgctcacacctatacccctgcagagctctccacacttcctttcccagacgtcccccctcatccctacaccccttcccttcttcatccttcattccctgcttcgcttctcgctgcagagaagcaagagtccgaacctgaacagccggcttcgttcgaaggtacatcattcgaatatgtcgagaccgccgatagactaaacgggttggtggatctattggagaaggaagcaaaggaggttgctgttgatttggaataccactctttgagaacatggggtggattcctgtgcctgatgcagttgactgcgagggatcgaaagggacagatcatgggagactatgtagtcgaccttttggttccagaggtcagagaggccgttaagaaggagatgggtagagtactcgccaactctgagattgttaaagtaggtcggctttcatgtatcgttgtcttccttcaaacccgtcgtttactcattacttcggttgtatgacgcgacattcaagatcttccatggagccgaatcggatattgtctggctgcaacaaaattttgacttgttcgttgtcaaccttttcgacacgtaccacgctacttgtgttcttggtccgtctttccttccttgtgtggctcggtttctctgtcatggttgtctgatgtaaaatcatctgttttatttaaaagagttcccgcaacattctcttttgtctctcttggagaagtattgtgactacacacctgataaacggtatcagcttgccgactggagaatccggcctcttcctcaagagatgctcgaatatgctcggtcagatacacactatctaatttacatctatgatcgtctccttggggctctcttggataatcctattccccctccaccaaatccatcgacctcatcctctttccacacaatcaccggtccattgtttactctggaacagacttttgaatttccgaaatcaacccctccgtccatcgctcaagttctcactcggtccacccaaacggctctcaagcgatacgcccacgacgtctactcgtccgaaggaaccggctctcaaggttatcggtcgcttgctaagaagtacaacaagcttcatttgttgcctcctctaccggtatacgcttcgaccgagaccgttcttgaaagcgttgtcttccgaaagatccatgcttggcgagacgccgtgtctcgagaggaagacgaatctaccaaatatgtgttaggaaatcatttgatattcttgttggccgagagaagaccagggaactccaaggcgttattcgggctcggtcagaattggagtgaagtggtaaggaggaaggtagaggacatcgtgcgtatcatcaaagaaggagaagaagagggggagaagttggctgaagagttgaagaaacaagccggaacacgggtcggacaggttgtcgaaggagaaacgggggaggatagagaaaggttgctaagagaggagaaggacaaggaaggaaggaagacaggtgttgtgcttggaatctgggaaacacaatcctcaggtgagtgctcttttgctctctcttaagagctgtacataaagtgttttctaaatcggggtttctgctcttcttttagtgcctaaatcatcaccgacaaccacttcccaatcttcctccctcttcggctcctctctcaagtcttcgtcccgaccgacacagtctacctcatctgtcaacgcgatcagctccatgttcggacaaagtctgcaatcgcaaaagtcaagtaaattagtagctggctccgctccgtctaactcgtcaaacgccgggtttttagaggctctccgtaggatccattcgtctatcaacgtaaattctatccatttttcccttttctcaagcgaatccataatctgactagtttttatgaattcgtgacattcttttcttagcctcctccaccgccacctcctcgagctgtcacccctgaagacaactcgctaccaggtgtagaacaggtccccttcgttcctgcttccgaaaggctaaccaccgaagtcaactctaaggatgattctggatcggcctcagctaaggttgtcgacgacgacattgtgactgttggaaagcctaaggcgaagcgacgaaagactgagcaaaagacggcagtcgcgttggccaaagaggacgttaaaggcaaaggaagagaaggcggagatgcgatggatgtcgatgaggacgaagacgaagagttggaagagaagaagaaagtggaggctttcgattactcaagtgtaccgaacggactggacgttgtcaagggcaaagggggggcctttggaggaaagaagatcaagaagccgaagaaggagaagaagcgttcgtcctttacttctttcgtctttctttccattatgttttctttataaaagatcaacatctaacttctgtctatttttccgcgggtatgcgtgtattctaatcataatttagctatcgtcgagtacggggatttcaagaaaccacctcagagtatggccgagaacaagaaagggaaccgatccaaaacattctcataaaacccctctttcgttctttcgtttcttccgtctcctctgtctcttctgtctcttcttttattctctttcttctcgttttgatatatctttgatcctccagtgtccatttactctaccaaaaacgacacccgcgtatattgtcttagcatcacatggtaaactcattcagacttatagatatcatgagctcatcagatgatccaaccacattcacatacaagcgccaatataagacatcatcgcaaaagagttgagcttgacctatatagtgtttacccattgcttcttatcttgatttgtctcaaaccccgcgatcaaagctctgaaaatataaacgatcgaagcggcacgttccgattattacagttcatgaagccgtcataggagggattgtactgggatagaagatatgtttggtacggaaaaaaggctggctataagcaaatagacgggatttttctttttagggggtgagataggggagacaaatagtcaacgaaacaaggggtcgtgcagtgaaagaagtgtgagcccaaaggtgaacaaggcgaaacgaaatagaagaatggagcagagaaaacagaaagacaatatagtggaggtagaaagttggaaaggccgaggatgtagaataggatgaaagaaacgaagaaaagaagtgagctgataagtcagaagttctaagatttagagatccatgctcattcccattcctccaccctccggagcgacaagcgcactcttcttccccaccctgctcttctttgctgccaactttcgggccgaatcctcctcggttcggatcctgaccttctccctgattcgctctccacgagcagcatcggcggacgaagaaatagcagcagacacaggttggacgagggacaagtttcgagagacctccctggtgtcggaagctcgggcgagggaagggttgatggacattctgtaagatcagtcaaaaaagagaacgcgtgaaccgaatcaagagaacaacgacgaatcagcatcttgacagctacaattacgttcttgatgagaaccgattgatatagaaagaataccacgaaccggttcttccagaaagctcgctctcgtcgagccttgatctcgccgactcgcttcatagccttcaaggtagtggccaccaattctcgatcgtatcggaccggaacgtttcgcctcttctggaactcgaatgtcgaatcctacgaaaccaattcaagagcgttagccgacaggaatgataccgacacatcagagaagatagcgaaacgtacgacgatcatctcctttccggcagcctttcggaaagacttggtccatcggacctttcgcgggtttcgcttcatcctgaagagcgcaaataagagagggacggtggaacaacacacgatcagttggtgaagtgatagattcgaaacaaggattgaaacgcgactaacttgaagtttttgtggcatctgattgagcagagttaaagatgacatggaagattatggtcagcatccatcctacaagtgtttgttattctaatccggcataaacgccaccgtttgtccacactatctcttatgaatccaacgaatgatgactagaatccgatactttactatcctccaccacatcaagaattgtacttacttggacgtgcagaacaagaaggtcttggcatcgtttctgacgaaggcaacaccgtgaccgggataaacaggcacggagcagaaggaacacggagaaactcgcatggctaggacgaaggaggaaggaaggagaagaagaagggaagggcaagcgaacggactggtgggggcaaagagaggggggagctgagtgggaggaggaaaggaggaaaaacaatttgacaactgagcccttcaaggcggtacacaatacagcacgtgatatagcctggtctgatgaacacgtgactctcttacaaatgcttaggtaatgctcatccctcacctccttacttccacctctcatctctttgtatcctccaacactctcgtcatcctctctcttacatctatcacttctcctttctatttgagcatcggaagaacgctaaaagaggaaaatggcaacaacatcagaacaggtcggtagtgtctccttttaccgtctgaatttgaccctgaggcgatatctcgactctgaacacgtcagctcaccctcatgaacacatccatgtcagataaatgctcttgctggaacttcagtgtatgtccatctgctttcgttcagattctgttccatgccctttgtgactcactctttctccctcgaaaccttctttgtcttctgtttgatcacatcaaccgcatacacactttcccctcaaccatgcgccatcccaaactaaaagcgtggttcacccactggtgcttctctctgttgtagaccatgcccatcgatctcctacatcagccaagaagcgtgtgctcggtgtgcttctcggacagaacgatggcaaaaccgtaaacgtagcaaactcgtttgctgtaccatttgaggaggatgagaaagatcccaagacgtggttcctggacctagattatgtagagtcaatgtgggagatgttcagaaaagtcaatggtatgtttttcgctcttaacaatctattaagacactgaatttcttttaaagtcaagaatacgtttgacttgtgattatgttctgttatgcttccatgttccccgcgtgagtagctaaggagaagccgatcggattctaccacactggcccaacattaagatcctctgatctcgagatctcagagcttttcaagcgcttcgttcctaagcctgtaagtgttgctaacttgacgtgatggacgcgctttgaagacggcttcagaacggttaggatggaagagatttcagttgaaatagtcagaaccgtatgcgattcgacgtatgcgtaaccaatgcagttggatctcggaatgatgtttgggaaatagtgacttatcaagttgttctcttaatttaatctctcttcaaaacaggtgatggttatcgttgatgtcagaccgacgggaggacgaggagatactggaatccctacagatgcttacttcgctgtggaagagatcaaggatgtaagtagtgttctgttagattattcgaaattaccttctctgtcagacgaggtacaacgcttgtaggatcgggaccctaattctgacactctccaatctataggatggaacgacaacccagaaaacattcatgcatgttccttcacttatctctgctgaagaagccgaagaaattggagtcgagcaccttcttcgagacatctccgcccccctctccacttctggctcgctctcttctcgagtttccgctcagctttccgcgctcaaaggtctccactcgaggctaatcgacatcagggactacctcgccaaggtactcgctggggagatggccgtcaatcatcaaatcatctacaacttacaggacgtattcaacttactacctccgggtatgatgtctggtttggatggagtgagcagtgaagacgatgttgagggtggaaagggaagacttgaggtcgagaagagcttcagggtggcgacgaacgatcagatgttggtcgtttacctgagcagtttgatcagagcagtcatcgcgcttcacaacctgtgcgtctcatcttctttattgatcatgatttcctcgatttctacgtggcaagtatccttgagattattcgtagtgattttactaatcgaagttcatttgtatctttctctctatcatttctacggtaacaataaacagggtggataacaagcttgtcaattcgtaagtatctgctcctcaccttatgtctctcaggacgatcaatgtctgacctcgttttcgaccatcttctcataaccagtcgagctgagagtgatccgacagaggatacccccgttccggctacaccaagcgcggtgcctgcttcagaggatgccaagaagccggaggaacctaagaaataatgtctattttcaattgtcgaatgaacactttataggctagatggtgatgaggagttgaccaagatgggatgaatgcacagatttttttaaaaggcctgatgttaactcaattattctgtttgtaggagaacgaaaaggagccagagaagagaagtatggcattatgaccacatcatgtacaagatgagagaaaaagccatctatatgtttagcgcacgcggctgagaaggcatcgatcttgatgaccagagatatctttcatattcacatcgagtgaggagacgggtaaatgagcaaaaagtttacttgactttgtccaacggtctggattaatggtgtagagaacaagagggaggggaaggatcagttacaacacgcgaagatcacgaacatgggcacaggtgagactcaccgattgaaacctcctttcctgaagagattccgaagtaattgccatcgaaaattgtaggacagaggattgtgaagaacatagcaagggagagaaaaatggattgtaaggattatcagacaaacttggtcggcacgcacgactaaatttgctcaaagatgccagcttgtgctcttccccctttcgacaggacaaaagctcaaggcgagtaataatactgataaagaagacgaaccggttcatgtattgacgccatgttcgctgtttctttataacgacgtctcctgtatcatttgacgagacgtgcttgccctacaaacaaatagatttcggtcaggtcggttgagctgcgaagggaaagagattaggaaaagacccaccttggacgtgccaaagcctccgaagcccatcatcttggccatttcatcctcctcgccttcttccaagccgttctcgtcctcgccctcctcaacccattccccgtcgacaccttcctccattccatccggtggctgcatctgctgccttttctcctcagcctcccgctttagctcttcagctttcaggactacgtttaggcagaaagaaagggttgtgggttcaataacatcgcaccaaatatgttgaaatcaaagtaaaagaatagtcctaccggatggcggaggcttgctatctcctttgagccgagcagcactcatggttgtaggctcagatctaccaggggacgaacgacgatctcgacgtggagaaggcgaccgtcttctggtcgagtagctggaaggcggcccggatcgatctgatgattagaggacattgtgtccatcgcgggccagtcatgaagagacgtgatgattgttcagtgcaagcttccagatgaaaaatgaaggataggaaagaggaaggaggaatgaaagagagggaagaccaactattcacctgatcggggtcgttcataaggcttccgatctctttctctctctctatctctgtaccctcctgcatctctgtctacatatctacctcccccgctagctactccccttctatcatctctatctcggtcgtggtacgatggcctgctagatcctccttcgtcgcgtcgaggaggacttcggctggcgcgagaataatctctgccagtactgcggtgatcccgagggtctcgctcctccgggtttgatgcataagatggacggtctcggtcttgatacctagacgaagacggagctgagtttctgtaggacatctgggtgggtgcaatgatctaatgatgatatggctgtttgtgcggatggatgttagaggaaactgcgcagagtcggtgaaggtttcgtcaccttccagtttctagaacgattccaacatcctgctctatccgttgttcactcaccgagacgctggacttgaataccatgtatgttgttcttctgtatttcttgaaaaaggacaagtgaggctgacgtagctttccattttcgcatgttttgtgtgattgtccaggtcctaccctctcccggtccaccagtcaggctcactatctccgaaacgtcggcggtccccttcgagtcagcaacctccaaaggtctctccgaccagccggtacaccattcgacttccacaatctctctcctctcaatcaattcgacgcaagactaagcagcagccattgatatacatcattccttttggtgtcgtttttctcattgttagctgctacttcatatttcggccattaggtggggcattcacatcttctcaagggactcgttttccggacagcatcacctctcgcgttgattatcctcaattgttcacttcggatcacgccttgaatacagatccgacgcctcaatctgagactttatccattcatctcagaaggctggatagtctgttgtctgacgtatatcaaactgaggacactctccgggataggaaatatgagcaaccagtgttccctccaactctgagcgctgctcagatggataggtacaaacctctacgaaacgcatcgtccaagtacctatttacgtccattctcttcaacgttggtcacatccttcccgatatgatccaatctctccttgttgctgttgacttcctcggcccagagaatttcggtatatcgatcgtggaagggccttcgtcggatgcgacagacatcatgctagaaagagtgctcgcgccgctcttgatagaaatgggagtcgatccgcttgacattcatttgaacaccagacgtcctagcgccaagttcggagagtccaataggatcgagaaactggccgcgttgagagaagagccgctgcttcctcttcgacaggccagaaaagggacggatgaatacgaggcggtcgtcttcttcaacgacgtttatttctcaggggccatgttgctagaacttatcctccaacacaaaaaccaagagagcgacgtgacatgtgcgtgggacctcttatggaacgatggttacttctatgacgtctgggttgctagagacatatatactggagatgtatgttttctttcacttttttttttttgtaatttacctgaagagacgaatctaacccacatttgttgccatatctaaacggtatttttgccatgctcagctctttcaacccatggggtctacctggtcgacatcatttgacttgtttccaacttctcccaagactctgaagcgttatcaggctcggctccccttccaagcttactcttgctggaacgggattgctgttctttctagctctgctctcttgcctcctcggccaatccacttccgtcggtcttccatcaaggatggtgaatgcgctcaagcagaggtatcgctcatgatgaaagacatatgggctcttcgagcccaggagggacagggtgcaaaagtgttggtcgtcccaggggtgagacttgcatacgagagaccagtagcggagatagtgagaggcttggatgaggctaccgtcggaggagttattgtagggcaagagaaaaaagtcgggctagcagggggtgggttaaaggaaaaggtggattggacaaaacggtctgtacttgaaaaaagaaaaactatcttgttgatcattggtcgtaggacatggacttcacactcattgtacttcgccgttcttggctatttttatcttccagtccaccgaaggcggtaagatgtcatccttggcctgaagtcaatggcacaggaagcgatatcaacgtctggaaggagacgagatggattgacccgctaacgggctaatcatgggttatatatgttttgtatttcggtctgaatctctataagggtacacataacagatggctgacttgatgcaagaccctcagagaaggccctccgtgttatgatgaacgctgctgaatatagtgttttaggcctaccacgagacaccatgcttactcagggcagatacctcaggaacagctcttcttctctgccttcacaacaaacgaacgaacgagaagttgatatcataaacgattacgacctacacgttcttcctcttcaccaatcatcatcctcatttgttttgtgtaatctgtacagcgatacctctccaagacctgctctcccctctaccctcatatcatccctctcgctcatatatcatgaccaaatcacatatccgttcgttctctctcggtgcaacaaagaccgcgcacctaccgataagtccaccatccgaggacgttccacctcgaaacgtactatctacatccctcaaagcttcgtcaaatggctatcctggtcggcctggacaaagcgttttatcagctggaggaaaaccagctgaatctcggttcagaaagtactctgcttcaaaggggccttcctctggaaacaagaaggtaagcgtacgacaaagatactttactaatcttgtttctccgtgctcacgaacaactgtttgctatggtttgtttatccgacgatagtctgcaatgcatggttctatgactgtcgacgacccagattcctctttcgattctggcccatcggcatggtggatcgatgactttacattgtattctgtttacgttcgttcctctccctctatagctgttcgttcgtcaatggttttagttctgattcgcttccttgccgccatattaggagtacactttaccttccagatcaatatccccaaagctgatagaatcgcagcctgctccgactctaatgatttcttcagatctaccctatatcgctccaccaccatgccctgctctcatcgatactcatctgaagatcgttcgtcctcggtcgattttgaaagacaccagctctcgacgaccaccctcgcttgaccgttcggctagaaaaacaggctcctccgccatacacaggagagtcaggaagaatgcgccccattcactccccgccctttcgtcctcttcatcatcctcatcgtctgctggtcagattgctttaggtttgagtctaccgaccggtcggtctcatgtctcgcttccacccatcccgtctagcccatcgattccatcgtttccaaccaatcttaagtctggctccccgcttcggaaagctaggggcatacgacccggggatttcagccagagctcataccaggtcttaaacagcatgtttgttcatcctctggttttatcgtcttcgtcgtcatcatcatcttcgtcgtcgtcgttgtcgtcagcatcgtcttcgcagaaacgaaacgatcttggagaaggttcttcaccagagacaacgcctctggtggacgatcattacttttcagcagaagcggatatcaactgggagagtctgatcaggtcttgagatatgtctgagagtatgtgtcgagggctttgtgtgaatagtttcatacaagcaagttctcaatgattgtcaagatcattaaacccaagcataaatgtcgcgcgcgacgagatgttttgggtgagctcatttggacgcgtccctccacttgcgcgcgtgtgatttaagggtgttccacgcgcgacattgtgatattgatgttcgtttaacactgtatgctctttggaagaaagctatctggaaacgtcgtgcgagccatggagagtcagtctaagtgaacacttgctcactctcaccttgaatcagtctggctgcttgcccttagatataaagtaggctcttcaaatgaagcattatcatcccgcgctgactatcacgacttgttgatcgacgcatctcttgaggaccctaacagttaaagcatctgtgaccatgaacccggccccggcatactttttgatgaaagctgagccagacagccggatagtgaagggaaaagatgtcaaggtgagctgaacatcgattgaaaccgatgtaggaaacatacatgagattaaagatgacttgttcttgtctcttccttatgggatgacattgtagttctcaatcgatgacttcgaagctgctgggtaagggaatcgaaagccaccatgttcaatcttacagtacaagtagattatgtctgacacaagagagtattctgggttgtttctctttgtttcctacgaagaacaaccgaatgggatggagtacgaagtatgctctatcctatctcttccttccaacccattgttcttcaaataagcaaagatctcatcaggtttattcttctgattctctatcacgttcacgatacccggctatgacttcaagaccacgaagcgaagaatttgatgaagaacctgatgaaagtagggcatcaagtcttgttttatcactcaaacaccaaacaaccaggagtctttggaattgcgaaagttcgttcgcctgattttcttccagtttgcggtggatcgttccaacgaagtgttacgaactcacctctaagcgtattttctgctttctccttctttcgaaagattattgaggaaggtcatccagatgaatccgctttcgacgtcaaccatccatattatgatcccgtcagctgtttctctcttttaaagaaggcctccttgtccaggtaggatccacgactgaacctatctacttggtgtgcgcttggacgcgcggcctatgttctctttctcttccttcgacagaaatcaaagagagaagtcccaacgtggtataccccgacgctagaattcgtgtccagactgtcccatcctatccttctctcagatttcaagcggctcgctactctcgatcctggtgatcaggccaaactcaaggaggagggatttggggtgctgacgtccgaagaaattagatgtgagatagtgtccaaactcccttggtttcttctcctacacagctcactggctttgtgcattttttcgattttattttctgtcattatctttggttgatgttatcccaaaagcgattcaagagatgccacttttgaatagaggtagactctccgtccagacagtgtccgacctcgcgtttcattcgattatcaaactcggagagaaaggcgtcgtcaatcatcctatcccatcagttggcgacgttgccggcgggaatgcatcgtccagattaaaagtaaaatctgggatcgattcagtaccaggatctagatctgaaactagtctgagtaggaagagacgtaaaatcgaaccgacgcgcaagaacgataagaatgcaatcgaagagggacttgtcaagcctgtaaaggtcttgaaagaagatgtcatttccacgaccgcggatgagggattgaggagatcaaaaaggaataaagtctgactctgattgtgatgtcatgctacaagatggctcgtcaccgaagactcaatccagacatgttgacatcccatcctcgagggcaagaacacagacatacataatcataaatatatattctagagcgatttgaacatcgttagattttgttccgttcatttttggtagtcaaggctgtttttacatagcacagaaaaatacatgagtgaaagagaatgtgtagatagaagcaaagcgtcgatgctgtgaagagtccatgctcctagattgagtcgcgagagataaaaaaaagctgaagcaaacgagggcagatcctgagagatcaatgtgtgaaaaggcaagcaagcaaggagaaaaaatacaagagactagatgagaatgatcgttccggccgtgaggacaatgatgaggagcccagcgatacaggtctttgatcggatcaaagaagaggcacccgatgtagaggaagagctgctaccggaactgctagaactggtagagctgttggtggtggatgcagatcctgtggaaacagtcgatccactagaagtaaataaggaagacgagttaatattagcttagaattgaggaagcaaggacattgagcatacaggaagcactcactctgcaagggatgcaaatccaacttgacttccggtagttgttccagagtacgaataaacagaatagacgttctatcaaaagagcaagaagatgaggcttatcagtgagctgctggtgagtcggagtgaagtatgatggtgagaaacgtaacacaccttcaagaaggtgtcaccaatgatccaatctacagtactgtccaaatcgctctaaagaaggaggaagaacataagagtggagaagatatgaaattgtagaatatgaagtcggatgatagacgagacgtactccataaataccacccagacatgaggttccttgagagtccaatgctccgatgttaaagtcgtccgggtcgatagtgtacgtgacgtctccgaaagtgagagagatctaatttgatcgggataaattggtatcaggtagaagtcagcaaatcataagatttccatcaacgcatactcatagaaggaaaccagaagaaagacagaatatagtgggcctcacattaacagagctactgcaggggtactcatagtatccctcataaccagattccgtcatggccgaggagccgctaatagccgcgtacacagcggcggctacagtcgtcgtaacagatatcatcgtagttccactacgttgtagagaccgtttcaatgtttggtaagttcgactgacattaaacgaaacaggatgtcgaggacgtacgtatcgatagcagcctggggagtactacttgagcttgatgatttagacgagctggaagaagtcgatgaaatggagatatcgatagatgttccttcgacactcaacccggaaaccgggatttcccaatctaatattcaggggagaaatcttgtcagccgcattgtttatttatttattcaagatgtacccatagaacgcttcagaaggagtagagttgtaaattgatgacgaacaggtctgagcgctgcaggtaatgtaattgacatcaccagagtagtgggatgcgtttaatgcgccgctgaatggttgtaacgtgcctatgttagtcaactctttccaaaggcagaagaagatgtccatacgaacaggtcaatgtatcctccttgggtctcaaaatctgtagcggtggcaatgttcctgtacctagcaagctcgaacgcaaagaccttgctagtccatgtcgatgattccgcttgccaccatggaacggagtttgagctcgaaagcgcctcaaagcccattcccatgattcccgacagaggagaggagagcaatccggacgagatctcggtgacgaccgctgcgagaaataggaccccagatcacagaccgagaagaatattagacaaaaaagaaggttcatctagagatcacgacaagtttcacgaagggtacatacctaacgtctgagaggtctcggatatgcctgccagactgacggtgtctgagacaaggtatccagatgcatcgccagaaccatacgtaatctcgaatgctgtgctctcgctttgagagacagaagggaatattcagacagtcgaagacattagccacagctgattgtttgactgctaccggaaaggatacttacttcgtgtaggtggaggacgacgtaggatcccaggtggtcaagcctgagcaactactgtcgcaggagctgcccacgatgaacaaatctgccgaaccggtgtccaacaggagatagaactcctgggcgggtgttccgattgatacagaggcagaataggcagcatcgatatagtagtcttggagtcttttgtatgaatgtatcacggaagcaagggtggacaccggcacatcagctctagctataaaaaaaacttggaggaaaagagagagggagaacttacgtggccatgccatcccgtttagtagcactgttgggagccaaccgagtggcgtactttgattctgtctttgccttttctctaagggcccagcctctgactgtgccgtcaggacctactcgctttgcgtggggtgtgtgagtgaggggaatccgacgagcatcgaggatagaattcgaactcggaggaacagcggcggacagagcgagaagcggtacggctaacgagccgatcatcagggtggacaacatgttcatgattttgtcgagaacggtgattgtggagaagggatttgatgaaggaaagaagagaaaatccgacacgaaggcatcactttgggtctcgattatttataagaacgacgtttactaaacaagagttgatgatgccgctgccgctgccgttgctgagccgtagcgagccgatgacgccgcaggggtgggtaccaattcccgccagtgttaatccccggggaacccagagctggccaggtttcatcgagggcaatcgagatcacaggtcgtcttgatccagaggactgctgctgtgtgttctgtttgtaatgacatcgacggtggcagtggctttagtcgctggtgtcggtgtgagttcgggcgtttatcgggaaaccgtctgtcgcccttctccgacaaaattaactcttcaccttctttccccttataccctctttttataaagtaagaatgtctgaggagcagctaccagagtccaagttgggcacaaaacagcagtcagtcttccgtttgtgtttatgttcctcaacactgtgtgtttcatcttgcttacatctatcgtttacggctcaaagttgggatgatgtctaccagtcagtcgtcgataccttacgtcccgcctgctttcagccgacccgttctcaccagcttactcttgccattccagacgggagatttctacgttcgatgacatcggagaagaaggcgaggtctggtttggaacccaatcggccaagaagatgctaacctggacgattcagaatctacctccttcgcttgaccctcctcctcgaatccttgacctcggtacaggcaacggttacaacctatttctgctctcttccaagagaggcaaatacccaggagctgttctcaaaggagtagactacagtcaaggaagcgtcgacctcgccaggctcatcagagacaaacgggcgagtggagaggtcgagagcagtgacgaggatgatagcgatgatgacgaacaggacaatgaatcaggttggaccgactctacagcagacatctctttcgacgcggctgacatccttagaggagatcccatcgacggtggaccttgggatctagtgtgagtctttctcttcgagtctgaagccgatggcccaacatggtaacacttcttccttacaaccttaatcttatagtacagacaagggttcgcatactccatccgttaactttctcatcctttacagaagctgatcgagctcttccgttcgtgagcaggcacatacgatgccatcgcgctctcttcagatcctattccaccgacgaaccttagcccggcagaactgtatcctattcaagtctcaaaacttgtcaaaccaggaggatactttctcatcacctgtacgagtcccttttccctcaccgtttctttgttcttgccttttgcggggtagccagcagctgaagaagaggacatgagttcagcctgtaactttacagaagaagagatcaaaaaacggttcactaaatcaacactcggtccgtctatctcttttctcgctcctcctcctcatcccgcctgttttttttttcttctgctgttccattcgctctctcgtctttttatgttctcatgccgacgttcaaacttcttcgcttcttgctgtacctcacaggtttctcttaccagtgcgtctttcgttctccttttttctctcctctttctcgttgaccgggtggaactgacctgaaacaactcaacctactatgatatacctcgtttccctattggtccctcatcgaaactggcttgatcagctcgagagtcaaccacccgacattcacgtttggaggctccaaagggtcgaccgtatgcactgtcgctttccaaaagacggcttcacacgccgaataagaacgaacgagatgaaggcggaacatgttcttcatgttttctccctgcttttttctcttccgatttggcttttggaatggtgatgaattaatagatagacacattcatttgagatagagaggagaaaagaagagaggagaaaaattgagtaagaaagaactcggaagacgtgaatgagacaagtaggtagaataatcaagagtcaagcggaacaaatgacacgttttgttttcctacaaacagtgtgaaaggagggcaaa

SEQ ID NO: 630 - DNA, 23028 bp, Xanthophyllomyces dendrorhous
  misc_feature (22458)..(22467): n is a, c, g, or t
acaagagtagagagaaaagggaagattacgtgctagatccaaccgataagccatggaagagatgacagaaaagaaaaggtaaagaaagacgaaaacgagaacgagaacgaaaacggggataagaggaagacgttatcgaaaaccggatgcagaagaagggggggggatagtagatcaagcggtacattcaatgaggacactggaggcggagaaacctattgaaacagcagagaaacaacacaggggtaggacaacagaggaaagttgaaacagaagtcgtatgcactgggcgcgccaggccggtcagacctagtcgagcgagattcggagctgctcaagaggtataggctctgttgttcgtcgagtcagaaagagaaggttccgtgtcagctcctggcgtttggtccagtcatagcgaaagaaaaccattaaagatgacacgtaccgaatccgtccaagttgatgcctcgcgaggcgagctcgggctccgtccactctgggacaagctggttgataagatctggtcgaccggaaagctcttccttcgtgaagctatagaacaaatgtccgagagccagaggaaaccaagagatggatcagatgtttggtcatgaaatcaagtcaacacggaaagagagaacgagagactgacttgaagagttccgggaagtcccgaccactagggagcttgcccccctcgattcggagctcgtcgaagaagggatgaaccatggcctcgtctatgaaattgaagcaaacaataataagggtttagtcgtctagaccgcttacccgattacatccttcatggaaagtcaaaagaggataccactcacaggcagacaatcggtgcccaggagtgtactctagtagtttggagatcaagtcgatcgcatccggggcggttcctgaaagaggtttcagacaagaacaaatgacaaccaagttagtcaccctcaaataaataagactgaaacgagaaaagaaaactctaaagacacgtactcggtcggaacactttggagaatggatggggcttgatctgagggaacttgtgctccatgtactgtttccaggaaacaaggacaaagagcccgtcagtcccgagtcaatgatgattcctggaccgagaagaagcgaacggcaagtaactcacgttaggattcatcgtcttgatctgttcccttgtcggtgttccgagaactttgatgatctcaacgagctgatcgattccactctctccggggaaaagaggctgtccgagcatgagctcagccatcacacaacccgtcgaccagatatctattatacgcgttcacggtcatcccagccaggtatgaatctgtcagctgtcgcaaccccatgtgcaccaacaagaccggtcgcctcgaaaaatagtgacgtaccgatgttggtcgaatagttggtcgctccaaagatcaactcgggagctcggtagtatctggaacagatgtacgacacatttggctctccggccaccaagatcttggccgatccaaaatcaattagcttgagcacgccggtggtcgggtggatgagcaagttctgaggcttgatatctcggtctgtgggaaacggtacgacggccagggtatgagcgtcttgacaggaaagcaaatccgtgagacagaatttgtaactcacggcagattccaaccgagtgaatgtatgcgagagaacggaagagctgatagatgtacagctgaatttacataacacgcaagcagtccaaagtcagcctcgatttcatcgtctctttgagttagcatgattgtgtagagaaaaatcccttctctaggcttcaacggccaagtcctctgtcgatcaagccatcatccaccctctccctcacacatcatatcctccctctaaatgactactgaagaaggggaaagagggcagaacgaaccttgatctggatcatgggcatcgtctgctttaacttggcgtagtgtctggaagcccggtagacggtctcaggaatgtactcgaggaccaaattaaggtaaacctcgtccttctaataaaatccaaagaattgagatatcatccggtttgaaaagagccgccggtagttgtggcaatagtgggaaggtgagtggtcggttgttaagatgaatgagaagcacatgtcgtcagatctccaaacatcagtggaaacttggagagaatcaaaaagaactgtagacaaaccttttctccgttagagtagaagaacgaccgaaggtcaacgacgttgggatgcgagaccaaacgcatgatctgtaactctcggttctaaagagttgttgtttccgttcgtgatttggaaaaagaaaaggagcgttcgatcaagaacgagatggcagtgaggatggatgtatcgtcagcttaacacgtatgtatgcaaacgggctgaggagcgaaaagagggaagaagaagaaagaaagatacagaccttgaatcgcttgtcctgcagtactttcttgatggcgatctcctcgagaacctcctctttcccgtcagcagactccttggctccttctgaagggaccgagaacaggtcgatgggaaaaggtggcgaacggtcagtggacgggtacgctcattgacattggaagatagtgtgtgtcttgttcataagaaaggaagtcagatgggagaagaagagtgaaggacgaatcgagatgaacggaattgttgcaacaaaaggccgtgtggacaggagatgggcgacgggaaaaggaaagggcgagatgggaggagaaaatgatttgcaaaagactccccatccgttttgcttgcgatgaggtatggaaactcggtatctgacatgtcggaggggaaaccggcccagtcctacttgcatctcttttctgtaatctgatgggactttgttgagggaagatcgtcccatctctgggttgccgaaaggtttcccgtcgttgggtcctagttgactcccccccttgttttccaagggttcccattcaacgagacgggcccgacttctcgtcgagctctctctctctctcaagattctcacgaccgatggagagatgactagaacaggagaaagaacatatgacgaaaagtgcacgcaccaggcttgactagctttgcggaaaagacgactccgaaggaaccgttaccgacaactttacagttggtgtacgcgatctctttctgatcgccagattttccgtcttgaccaacgaccttgacgatcttttgagggtcatcgatagctagagagggaggttgaggcatgtttaacgatgtatgtgttagtaggtgagaaagaaggaatagaacgagagatgaataaaggtcaattgaggaaagagtgtggttgttggttgtggttgcaagtgtgtggatgtgtgatggtggagtctgcgtatgaatcgcccgcttgggggcgggagaagagaggatcttagagaaagtgaggagagactacaaagttgtctaacacgaggactagagaaaaaaaaaagtagaatggcctagaccggggacccgagtttaagagaaactctgaatgatcattaagaggaaaaaaaaagccaccgtcgtcttcttgttgttttctctctaataagagaagcctttttgtttggttcaataacatgatcatgccagttacaatccttctcgctcttcttctttctccttgtactatatacctttgctttctttcttgccctggacttcttggtcttcgtgtcttgaagcggaagctcacacgatcacagccctgtctccatcacacatcttggttcatcacaacttctcactctccatcacacatctccgtccggatcttttctttttactttcttctctttctctctctcttttgatagattatgtgatacaagtacataagaagccaacaaccaatcaaacttaccagtgatcttgacaccgttgacgggaccatggtgagccattgctgattatgtctcttctttcttggtagagggtgatggtttgtttgggatgcttagtttggacggttcgttggatagagaatgacacacgcgttcacagtttcttttctttagggagacagacggtcgagggtgaatcttccaggcttgctgtgttgtgagcgaggatgagatagagggataggcaacaagaatagaggacaggcgaagagtgtatcgtgcaagaacgaaaaaataaagaatgtaccgttaggctcgtttgaggcctagagcttgagccaggtaaaccaaactgtgtgggacaccaatggttacgactcgagaatgtaacccggtttacacacgcgtcacatccacaagcacgccacaatatagaatcctcgtgatctccagacgcgcagcacatctcggagtgcagttcaagctgttggcgcgtctgcctcactcgattggatcatctcttgaccgagtcgtcctccttttcattctctcctctgctttgaatctcttcttcttctctgtttatttcattgtttctacatcttctcaatcagatacatcttccaagcatgtctgttagtcatccggttatatctatgtgaattgcattggcatcgctccatgtactcattctttggtcccttgttcaatctctcgatcagtcagccgaggttgtgagttctggagcccttttcgctcatacgtcctccatatggtcaagaaggggatttatttgcaagaaagaaagaaagaagacaacagtcaagagctcacatatcgatcttcttggacttcatccaaattactgtgtgcatatgcttgtgtgggaccaaaattgaacggcagaaatacgagtacgacgtcaagatgacctgtggaggttgttccggagctgtcactcgagcgcttacaaagatcattcctcgttcgtctttctttctgtttctcttcgttctttgtatgtcctcgtgatatcttggacttctctctaacatagtttctctctctgtagcctctcagttcgaggtcaacctggaatctcagaccgtcaaggtgtttgcaggcgagcaagagctccctccgttcgaaacggtgactgaaaagatcgcaaagactggcaaggaggttcgtttctagaaactgcccaacatatcttccaaaattactctttatcttctgctgactgagagagcatcatgttgtattctttctatctagattcgagccagcaaggctctctaaagtgtcttcctatgtctgcctgtttacctcatctgctcttatttgtctggtcattctctttgttccgttcattctattagatggctcagttatgaattggttgtcttctctcttgagaaccgtcactttgtcgttgttcttttttgttgtgtcaaatatctgtatcgagccaaaaagactattttgtcctcttctgaaacaaaaacacaagcaaactcaatatccatttcaatcgtcccatccacccactcccaatccggtactggattctgcaccatcgcccccatcctccccatctcttcgcgccgatccaactgtgccaaacacttgcttcaaatcaagatcctgcctcttctggacctttttctttgcctccttgacctgaatcaccttcaagaccgaagtctctgatttcacctttggcttcttcgcttttccagccgtctgactaggggctcccaatgctgaatctttctctgattggctttccggcgcctggacttctgttttggcgtccgtttcggaaacaagcgtaggcgcaggtgcaggctccgccagctgtccagaacgaccagtccgtttacgtttcttgttttccgaaggaatgccttcttcccgaacttccgttggctctccgtcagtcgagactttctgctttggtgccgagtggggttttcgttttctcttctttccttcctgtgcgccagtcgcttcggatccaggtttgctctcctccatggtggtcatggtgtcctgcatctcggcctcattgggagcggcgtcctctgcctgaggctcgacaggcgctcgttcacccgaggtgaaataagcatttgcgcccgtaggttggaatgctttgggctctcgtcgagctcgcgctttgggaacaggcagaattcctttgttctttcgttcgatcaagcgttgattatcaaggatctgaagtgatgggaggagttgagttatctatgattgcgcgtacccggtttatcgatgatggatgtagtgatgatttgacccgatataacagaagaggacatcagctactttgtttcaccggagatacagaacagatacatgaatgtatgcttgagaacagacctgatctttataatcctcagccgaggtcacgccacatcccttaagccctaaacttcgtaagccttcgagaccggccaagccgacttccaatgctgcccattcgtcgatcccacatcctcccaattcgatgacttccagtccatcacctcttctaccttgaccaaacttgccgcctgcccggtcagaagaaggtagtgtaccggtaccccatcgagcaaaatgcccgggtaactctcggagggtcgtattatgagagagtgaaaggacccgaagatatggtagagtcgacagatcaggcagtccagagctcgttagttctgcgttcgacgcggataactttgctagcatggggagacgtccgagggaggacggtaaggatcttaacgggttgtgtgagacgactgtttcgtgttttatttgtttcagacaaaggtcatcggtttagtaattggttaatggtagaattcaagctgaactggatatcacgtctgtacgtactcagggagtttaaaagtgaccattgagaaatgaccgagtcatccaattctgttaatttgttatgaatcgcgacgagcgccttgagcgagctaagcctggaaaattgttcagggattcttttcaggttgcatcccggtacattcaacactatcaagcaaacccagacaaattgatcagtcctgcacgcatcatactacgccctacccaaacccgggggaagagagtcacaaagaggacgcaccgactaatccagtaaggttctcgaacccgtcccatgcttcttcacccatctcaccaagcgcgtggcaccctcccagacccagccaggtcaactggcttccccattctttacctatccatccggcacctatcccttccagtccaccctcaacatccgtcaggtcgagcctcgtcagatgtgggtaagcctgtttggtcggtgctggattaggaaagggctgtcctttcagggagagagaggtctgatggtcagaggtcgagagcgcgagcgctttgggcttgtgggctgtaggtgcgtggttctgagcctgaggattcgcccggtcggcatgtctccgagagcgtgcaggatcaaacggccgagtagcttggggaccaacggtggaggtcgaagtcgaaggtttcgaatatgtccctcgaggcttgttctgatgaaatggaggaggcatatcaagtgagaggtcttattgaggtggttggttgatcgattggccggctggtcaaaagttaaaggtagagggaaaacttgcgtttcaaggaaacaaggatgacatgaaatattgagagataaaatatgacgataaaatatttacattacaaaaatacatgaaaagttataatagaatgctggacatttcctaatcgaccgaaatgcgccaagaatccggccagagttgcaaaggcctgactgatctgttgtcaactttccttcaactatcatctcgattcgtctttttcatttctccttggtcatcaatagttcaagatctctgcattatcaaccgataccatcatagaagaaaaatcaaaatggcactccttcctctctttcgacgccggccgaatgaagaccagtcaacagagcaccacagggtcaccttccgggaggttatgatatcctacggagccgattgggccctggcagtgcttctctgggtggtatttatctggatgaataaaatcgacggtcacaagagagaattctctcttgattcagacatcagcattcaacatacgtttgccgttcagtaagtctctacgtctctagatcgattgattggttccttgagagggctgactggtaggccatcgggggtaccctaaactgactttcttccacccattccttctacttacaaagcgaacgtgttcctgtatgtgtctctttcattctgtcagacttcattgctttatgagtcaaggctggatggttcgtcgtgactggcaaacatgcttgctaattctcttttctgttttcgctaaatccgcctgcagcccaacatgttgtttatcatctctcttggccttcctctgtgttcggtcctgttgatttcatcgctcatcatgaagaactcttggtacgtttctgacgtcttaattacgttcttcgaacctcaagaattcatcactcatgcgagcgcatcgtctcacagggatgtccataactcggttctttcggttgtgatgagctggactgtgtctggactgatcacccagatcatcaaggtcagtttcatcaaggcgcaaatggctatgagaagccatgacgaaatgatagagctaactccggtgtgtttggtgttatgaagattgctgtcggtcgacctcgaccggattttatcgatcgtaagcgcatagaccttatgcactcatccgttgtagagacaacgctttggatctgactaaatgcgcctcctaaatgtctcaatcttgtaggatgccaacctatccctggttcgtctccctcgcatctttataacaatcagcagtccctcattcctccgagtctcttacctatgtttgttctgcaatccgttttacgctcgactttcaggttcccatgatgcccatccatatggactctccaacgtgactatatgcacccaaaccaacgcgttcattcttgcggatggacacaagagcttcccttctggtcatagttcgttgtcgttcgctggactgggacttctttccttctatctggctggtaagcttcacctgttttctgtcagagggcaccagtccagggcatggctggcttttgctccacttttgggaggagcgatggttgccgtcagtcgaacgatggacaacaggcatcactggacagatgtaactgtacgtgctggctcgttgatcacgaatcaattttgacatacttctctaataaccacctgtcgggtttacgaacattcataggttggatccatcttgggtcttaccgtggcgtacgtcacctaccggggatactatcctcctctttctcatgcgcgctctcatcttccgtatgccccccgagaggttgaggaagatcatcctctgaacactatcagaacctcggctcatggatacgagcctgtcaatcgaaacggcgaggctgagcaagtcgtccgacgacccagcggagaatacggtgacgatgagtaggaaggagcattaaggacaggtcattctcgattgctgacaatcaattagatggagaaacctgtttgcgtctgagaattagaatgagtaatttgagtggcattctatcatgttatgattgttcgatctaccttgagcccgcctgtagtggcgaaaatgaaacatggagatgtggcacgcgtttgacacgtgcactcaccgctattgaactttttggtagacacccgtcattttcagaaattaccttcaactttgtttgtgataaacttgtgtgtagatacaaaacgaagctgcttgggtctcgacagacagctttataaatccatcatccgggccgcatctctactttaatcgtaaccaaacactaaaccaaatgtacggaagaggaaatcacaaaggaggccgaggtggtggcggcggcagcggcggtggccgaggaggcagaggaggaggcagaggaggaggcagaggaggcagtagttacaccgtcgctcggaatgctggacctcgaccagctttcaaagaggatcgaacgacattcctgcccaaagggcttctggatcagatcgatggtggacaaggtctgtctacttctctttctcttcctccgtactgcctgtttcctttctgggtttctccgttccgagctctgactcttgaaattggttcaaatctcgggaaactgtaattcgccggatgtgtgaaaaatagacgtcttgaacgctcaacgaggggatggtccgaaaggtcggaaagctgaacggaagtttgaacgagaccagaagaaatcaacacgaggtccatctcagagtcgttcatccggtagcactctcagcaccacgtctgcttctgcttctgcacctacgcctacgttcactcgattggaaccaacaccagcagctccagaagcagcagcagcagcaacagcatcctcgtcctcttcaaaaagaaagcgaagttctctcggttctgaagatccgtcatctgccgctccttcatccacgcgaaagaagctcccttcatcaactccactatctaagctcctctctggttcatcttcttcatccaaaaagacctcagggtcaaagaaaagaaagatttcgaccgcagagaagaatgaagatgatgaaatcgcttggctagagtaccatctgggtagaggtcggaaggggcctggagagaaagacaagaagaagaaaaagaagcttggagaggaagatggaggggagggggatgatggattggatgagctcttggatgatctggatcggttagaggaagaagagttaggcctggccagtagcgatgaagaagacatggaaggcacagaaaacgaggagatggatgaagaagacatggtatgttgctctgaattctttctgatgaagcgtttgatccggttggtaatgttgggtcgaaattcttatatattcaatctttattttcgattcctgaaatttgcaacagtcggacgatgaagctccagagctagtgagctatgcagaagatacgtctgaatggaaaggaattgcgcctgtccaagatgatgcttcgtccgaagttgacgaaactagttcgttcgatgaggatgaggatgaggatgaaatggatgagccgacctcgggatccaaacaagttcacttccgcctcccatcctcctctccaccacctgctcccgatactgctgctgtcagtaccattgcagcgcctggagggaaatatatccctcctgcgcttcgagcaagaatgttagccgagtcggctgcccagggggatagcgaagagaatgcgcagaggagggaagacaagctgaaacttaccaaagcaggtaaaggtctgttgaacaggttgggagagaataatatcgagggtattttaggcgaaatagaggggctatatagaaagcatcctcgaaatggttcgttggcccaccttgtttgtcttgggcgtctcttaacattgactaatacaaacgcccttctctattttttcgtgattaaaatgggcattcttatgcaaagacgtgacgtcaactctgacaacattgattctcgagacaatttcgtctcatgccaatctgctggggtcattcgtcgtactctatgcggctcttgtcgctggtctctacaaaatcatgggcgtcgattttggtttgtattctgccagctcatctgatttcagacctcttccttcttttgttcctctttctgactgaatctcctattttctgttttctcctaaccaggtgccaatcttgtacaaacactcgtcatccagcttatcaatcacctctcgaattccatatctacaccttcagcagaaaacgacgatggatctccagccggcaaggaaggcttgaatttgatcactctcttagctgagctttacaacttccaggtcgtatcgagcgtgttgatgtacgatctcgtaaggaggtttttggatagtgggttggatagagaacaaggtgttgaagggctcttgaaaattgttcgaagtgagttttctgttacatcattgtttgtttcgttcgtttttccattgcccatatacaacaaaaatgaaactcatatggtatttggatctcgatcgtgttcagatgctggacctcaacttagacaagatgatcccaccgcgctgaaggatatcataatgattgtgcaacaaaaagttgctgggatcaatcctgatgacctgaactctcgaacaaagtacatgctggagacattgacaaacctgaagaacaacagggtcaaagctgcgcctggaggtgaagcttcggctgaagctactcagcggatgaaaaagtttttgaacggtcttgccaagaagaagcctggtaagtttggatattcttatttatttgtctactctcgaatcaatccttacccaaattcttgccacgattattcatgctagtcctcgcccatgaacctctacgagtatcgctctcggatttactctcggctgatacaaaaggaaagtggtggcttgtcggtgctggttggggaggaaatccgttggtagatcgacaagagaccaagaagcaagccgtcgttcaggagagcgcgatggaagaggatgagctgttgcagcttgcaagaaaacagggaatgaatacagatatccgacggagggttttcgtgacaatcatgggaagctcggttcgttagatgattcccttcttcacttgtaatattgggatgattaggctgactcaattctgcttcttcttcaaatgcatcaggacttcatggacgctcatgaccaactgctgcaactaggattgacggatatccaacaacgagagattgtccgagttcttctacattgcagtggaaatgttagtctttctcttgcctgtgggattctctcatcatcgcatagaactttgcctgatgtttgcgctcttctctcgacatccacacaattgacgaatgtgaataggaaaagatctacaatcctttctatactcttgttctgtcgcacctgctctcccttcacactcacaaatttactttccagtatagcctttgggactttcttcgggagatgggtgaaggcgacgtcggtggtgcagctatcgttcaagctcacaagggcaccaaaactggtaagaagaaggttccagtaaggcagattagaaactgggcgaaggtttatggatggtgtatagccaaagagggggctactctagccctattcaaggtatgtgtactgtcaacccgacttcatcgttcgcgggcctttatcttcatccaaacggatacactttggttaaacatttgatcatctttgttcttcctcagcccgttaactttacagcccttcgaccgcaaactgagttattcttccttcacttgataactgcgctgattctatcaacccagacgacgtcgcctgtgcttctcttgcctggatcattatctgaaccggtggcttcgccgttggaacaacatatcatgaaggtcgccaatttgccttccctctgtgagggacttttatatttcttgaccacgagtatggcaggagaagattggctcgatactgttggtgtagagggcaagaaggaacgaaaagtggttcggtggggagtcgaggtgtggaaagagagattatcgatggagattgaaggcaggggtggagatgaagagtaggtgtaatgtatgatccatccaaacagaaaacgtctatcaaatgatcgagacacttcaaaacagatttgagcaactatctggatgatctgagactttcatataacatagcagaatccgaggtatgcttcgatttcaataagtttagtcaaagagaaagatatgaagtgggttagggttattattgaactctgagccggatcgagatgtccgaagtatgagatcaccggctcggagataattccatttaaagcttgtctatccgaccatagtctttcatcatctctcttttcgttcttgttcaacacactgccctcaaacaatcaccaagccatttcagcttcccaacaagatggaatttgacccatcagatcatcctcacaggagatgtatgttttaaatcaggtctgaattccttttcttgtggctatactttagactgatagctcctttctcttctaacatcaaacctcagacaatcctctgaccaagacccatgtattggtatctccccatcggttcggccatccactcattgatgcactttcataagtgtttaagtcttcctaacagtctccttgtctcgtgtttgtacagaaccaaacgtccatggctaggccaggtggatccgcccgctgtggacaagctgccagagtacgatgctaaatgctacctctgtcccggcaatgagcggatgggtgggggtatcaatgaacagtatcctggcgtctatgtgagtctctgagtaggcgcggattagtgacctttgttagggatagatgttgacctttcaacacttttctcctttagcgattcacgaacgactttcaagctctgcttcctcctccgatcccaacgatctctcctgattctgctttgtcggtgtcgggtacaaattttttcgaaatgaaacctgttggaggaaattgcgacgtgatctgcttttcccccaggcacgacctaactcttgctaagatgagtgagaaggaaattgaaagcgttgtcagaggatggacagagatttgggagtccaaggccaaagaggaagataaagtggaatacgtacagatatttgaggttcgtgggtgcttcatttggcaacatattaataggcattggtagtccaagcgaggcatcaaactaaagagcttttgtgctggattttatagaatcgagggtcaatgatggtacgtatctatcactctcaggatcgctcttgaaagagtgaaacatgatgttcatctcggcgttaatttctatcatctgcttttcaagggcgcatccaacccacatcctcatggccaagtttggtctctctcctatattccgacagagcctgctctagtattagagtcgcttaaggagtattcagaggctgagattacgaaaggaaaatgtcttctactggattatgcaatgctcgaggctgaaaagaaagaacgagtgtacgtccttcttcttcttcttcgcaacttgtggaataagataactaagcttcaggcgtaggtgttcttccctgaaaatgtacgatttgctcttcttagaattgcgcagaacaaagattgggtagttgttgttccattttgggcggtgtggccttatgagaccatgggttcgtttgaatttctccaatagatgaaacgtgcttccagtcgaaactcatctgtcttcaagtgccctggttctcaatgtcatcacttagttcttcctttgaaacgacggattcggtcgttggcagagttgactcagactgaagtcgagagtttggccgagataacgaaagcattgcttgtcaagtatgacaaccttttcaggtaagttctctgttgtcactgtgtcttctgtctgtatcgatacagcttggatagctaaacaatcttgtcttgtctctggtaccgtagctgccctttctcttactcgatgggtattcaccagtaagagctgtggcatcttcccatgtggatcaacttcctttcattgtccgcactaaggcttacaaaacgtcttcaaactcgtccaatgatattcaataaacaaactaggtctccttcgccccggtatgcggctagattgaaagcggaaaacaaggatgacgtctctcagttacactttttgtactaccctcctttattgagaagcgcgagcgtcagaaagtttgcggtcgggtgagtggcattcatttcttcacgtcatgctgcgccgaagaccgagctcatgctgccgtacatgctgtcgtttgactctaaaacacagattcgaattactctcagagtctcaggtatgaacttttctcttcatcaactttctgtatggatatcgcgtctggacggatttaccagcgcttcagctgactcattaaccatcaaattcctacatagcgtgatctaacacctgaacaagctgctgcaaagctacaggcttgcgaggatgtgcactatcttgaaagaattaaggatagcttatgagagacaacgaagaagacgacctgtaccagagatctgtagcctttgataaatgttcagtccggtgactacccgtaacacatcctgctacgctttactgtaacccaaccctgttccttgggtttttttactcacacgccagttcaactttctgctgctctcttgcatgttccccagatcgctcttcagccaaagaatcactagaccatctttctacatattaaatagactcatgtcgaccaccatcaacgtttccgagatcgtcacccaggccattcaggtcttgccttctccgtccaaggatcaggacaaggtcgatcaatgggtcgctaccgccaagcagggagagatcaaggatctcgacgagctgtgagtccgaacttttcttcctggttggaactcatcacattggatatagtcatgttgatggctgacccaacgattgtttgatcccctatctttcgttcgtttgtagtaacaagaagcttacgcctttaacttacctctttgtacgaccaccttttcttcgccagcttttcttcttttctttaaagcagtcaatcctaactgatgtcttttctcctaaatcttctcgtatacattgatagaaccaagagcttactaccgctgatgtggccacctatgcttctcttcaccctacttacgtatgtcgagatctatacctgcgtttcgaccaacagaatattgaccagcatcgtttcgtttctttcagtcggttctccctgcaagcgagcactttgcccgacctgctctcactcgatacctccttcacatccaatctcaccctgccgtcgctcctcttctcgcaaactttgctcctatcaccgtcgacgtgaatgctcttcctccgcttgagcgtaaatccgctgcgaccaaggagaagaagccaaagaagccgacggaggaggccaaggctgtcgctaccaatgccgcccccgccgccaagggtgctgtcgagggaatcaccgacaagttggctggactcaaagttcaggctgagggagcgctcggaagtgtcgctggagctgtcggatcgttagccgagagcgtggttggctcggttgtcggtgccaagaacgccgtggtcggtcaggccggggatgctgctcaggccgttgagggacaggtcaagaaggagaagaaggaaaagaaggagaagaagcctaaggcgccggtcgttgccgctgagccgactggacctatgcctagcatgatcgatcttcgagtgcgttgttgatttgttcgaaacatataatcctttccgcgcgatcgtctcgctgaagtactgacctaatttccctctgaaacacatcttgatcaggtcggacacatcttgtcggtcgagaagcacccggatgccgactcgctctatgtcgagaaggtcgatgttggagaagccgagccccgaactatcgtctctggattggtcaactacatgaccattgatgaggtcaaggacaagcgaatcgttgttgtcgtacgttttattcctctctcagaacctggaaattgttcagttgtttatctcttggatcttgttctttctcatgtttgactatatgataggccaacatgaagcctgttgctatgcgaggtatcaagtccttcgccatggtcctctgcgtaagattcttctcatcagattgttgaccttgatatattgttctgacctgtcctcccttttgcatattattttcatcactaggctaccagctcggacggtaaggacggtggtattgagtttgttcagcctccaccggccagcaagcccggagacaggatttactttgagggtgccaagtacgagagtgagtactcttccacgcacggccttttcaagaagaagagataaggagagaaaagaatagaaaaagagagttaattctgatgataccgtgtctaaaactgatgatgaataaacgattagacgagactccgctggacgtgttgaaccccaagaagaaggtctttgaagccatccgttcgttttcatctttctcttactatcaacatccatctatgcatccatcattaaaaatcccgcatccaaatgctaaaattattattttccataaacgaccgaacagaacccggattcactactctctccactctcgaggccgcctgggtcgacccatcgacaaaggaagcccaccgaatccgaacggcggacgggttttgcagagtcgcaaagttcgtcggtgccagtctttcgtaaagtattcaaaccatctttctgtctatctagattggatgcaaccgcgcggcttcttgtagagagagagtttgtttttttgtttgtgtgagggggaaggtttgtgagatgaaagatttaaagatcaatgtgtttccttatagtttatttccgtccgactctgctttcggttgtgggtgtctgtcctcttgtgtccttgaaagagcgaacgagccgagaagtgaaaagcacgtttgctttcgcttcactgtatgaaatcggaaaattccatcaagatctttgttctgtatgaatcgggtggaggggttcttatcgttctatccctagttggtttctttgtatgactacatcaatttctttttctttttgactcttaaacggaaaaaacgtttactctcgaacctgttcacacacacacacacacacacgcggaaaggaggaacccagaccagttcgaggttagcaacaatggaaaacagagtgcaggataggactagcaaaagtaaaggaaaaaaaaagagtaaagagagaagatagacgtacaactccgacctgggcggctcggatgactcgtcctttgagcgtgtaaccgagggacgagacgtcgaacaccgttccgggggtctttccagggataggagcttggaagagagcctttttttaaaagttcgggttgaaaagaaccatggtatgttagtagtgaagagaggaaggaagaagattaccggggaagaataaaaaagcgggattgcaaaatacagggagagagagaaagaaaaaggtggaagaaagacgaacctcgtgaaggttggggtcaaacttctcgcccgtaggatcaaactgctccactccgtgcttcttcaagaccttcaacaactctgcctgagtcatcttcacaccgtcaaacaacgagctcaactctgtgttctcggccgggacgggctgagtcacatgtttcaatgccaaggtgaggatgtcaattgtcgagagaaggtcggacgcgaacttggagatggcgtagtctcgggccttgtcttgctcgatggacgatcgcctctggaggttctggaagtctgcctgggagtattgaagcgcggtctgtgagtaatgcaaatgcgatatcaccaagtagaatgtttgtcagtcgaccgaaggaatagacgacaggccagccaaaagagaggattagcacaaaagaggaaagcgaagacgcgagaaggaagagaagagaaagcacaagggacgaacggtgagctcagctgccttcttcccagcctcctcgatctttgcctgaagttccttcaactttggatcctcgaccacgacatcctcgccttccttctgtgcctctgcactagcagacgactcagtcttgtccgatccctccacagacttgggagcatcggtagagtatcctctgatggacctcacggagaacgatgcgggagaaggagtgtatgacgagattcgagcggacgaggttaatggtcggccggccgatcggatgatcatcgaaggagtagtggtggtggaggtagcagcggcgcatgaacgggtagccgctcgaaggaacgttcgggacatcatttttgagctctctgaatctaggatgggaagaaagcaagcagaatagcgaggccagaggatgacagaagtagaaagtaggcgtgtgggtgcgggcagaatgtgtttgagtggagatgttgaaacggaaagaattaaagaaggaaggaggaaaaaaaagttcggtcgtccgtcagagatattgccgcttatgtaagcgcaagtctcatctcggcttccggagcgactttaactgggttgtctctttttccgtgggctgtgtctttctttgactgtaaaacggaccgagatgatcagatagccagagaaccaaaacatatgatagaaagagatatgaagagagaagtgaaaagaagggcaggacagatatgacgtccactctaaacagatccaaacactagacaagatcgaccggaaaggaaattatgaaaagaccaaaaaaaagagagatgagaggatgaagagaagatggagaagaaagctagattgtatttaagtctaaatagatccctcggccatcttggcgtcgtagtacctgaccatctcctcgactccggcaagaacggtgaagttgggctgccacttgagctcggcctttgctcgggtggtgtcgggtcgtcgtcgggcagggtcgtcggtggggatctccttgtgaatgataccgactcgcttggtgaaggttcccttctccttctggaccttctcgacaacctctcggacggcctcggcaaactcgaggatggtgaactcgtcggggtttccaaggttgaccggtcgggtctcctcggagttcatgaggaggatcaaaccagagacgagatcgtggacgtattggaaggatcgggtctgggaaccatctccgtaaacggtcatgtcctcacccttgagggcctggatgatgaagttggagacgactcgtccgtcgtaggggttcattcggggaccgaaggtgttgaagattcgggcgactcgaacctcaacgttgtcctgccgcatgaaaccgtaggtgagagtctataggaaaaagaagaaagcgtgacgttagccaggaaaatcgctattattgagaacaaacgttctggcacataaaatggatgattcttacctcggcaactcgcttaccctcatcgtaacaggctcggggtccgatggggttgacgtgtccccagtagtcctcaggctgggggtgaacctctgggtctccgtaaacctcggaggtggaagagatcaagaatcgagccttggttcgcttggcgagaccgagcatgttgagcgttccgaggaaggaagtcttgatggtcttgacggcgttgtactggtagtgggggggcgaagcagggcaggccaagtggtagatctctgagaggagggagcaacaagagatgaaaagccagagatcgaaagatgagcaaacgaaggagtagaggacggatcagaggagacaaactcacggtcgacctcaatcatgaagggctcaaccacatcgtgtcggaccatctcgaagttggggtgtcccacccagtgggagacctaattgaaagcgaaccacaaagttgtgagccaagatgtggtgcgatgaagatgaaggagataacttacagtggttcgggaaccggtgaagaagttatcaacgacggtgacctcgtgtccgagcatcatcaatcggtcgaccaagtgggacccgacgaaaccggcaccaccagtgctatagaaggatgaagaacaagagattttagtctgaccattcaacaagctggaggaagccgacgatgaatgagcacttacacaaggatccgcttcctgtcggcgttgggaagcatcttgacgggagggaatcgctgaagggtggagaaagagacggtgtgcttctcctcacttttgatagaagaaaaagaaaaggaaagaaagagtaagaacggggtacacggagtgcagtgtaaaaactagggtcaactttggaaggaaactaccacatactcgaagacagcgttgttggtgtagaggtcggaggaagcgtgagccttggggttaatgttggacctctgtggatacaagggaaggtaatttgtcagttgaattgtaagaaaaaggaaggctaagatagatcgagtaatgtttcagatctgggatgggaaaaaatagaacgagattgatacacacgaggtaaagcgacctcaaagagtcgatgggaacgatcgagttgaaaccgaactggtcgtgtccaacggtggtaatctcctttccctataggttatcaagacaaccaacgagataccgaagcgaagaagcattgaagagaaagaagaagaaaaaaacagaggtaggaaaaacaacaacaaaacgcgttaggctgaatcgctcagaagtcgctcaaaaacgagaacaagacgaagcccaggatagaaccacttacgtccttaccgagaacaggagtagcgggagcagcagccatgattggaaagatttaagataaagaggaggacgggtaagatgtaggaagaaagatagagagatggggtgaaaggtaaaacgaaagaagaaaaaaaaaaaaaaaggaaannnnnnnnnntcgtttaagagcgggccgcttcttatgcattccgaaaggtccagctgaaacgcgcagcaggaaccgtttggcccgaagatcgatgccgctgcgcccatcccgacggacgcgtcctagtacggttccggacgggattgtctattgggatgtctatcaaagtctgtagtccgggttctggttcggtttgcagtcggctttctatcagagcggctattgactctggcagcagctcggctggatgcgttgtaccgcaagcgaggaacatatcgtccgagacaacgtatcaatcttgtacgagacggagttaggacgggtcggacagactgctcgctagacgattgatgtgcagtgtgagatttattgtctgattcgatgtctatcacggtgtcttgtgtgtggcatggagtgatgatgcattgtgtggtgtatcgtctgatacactgtttgttaggccatccgatagttcctctgtagttccttcctatctggaaacaggccagtcgcccaagtgttgtctgccttgttcttagccttactatacctgacacacacacacacaca

SEQ ID NO: 631 - DNA, 24358 bp, Xanthophyllomyces dendrorhous
acacacacacacacacacacacacacccctactctctcttgtggccagataaagtcatcgaaaagattcccacatattccacagacactgtctctatgcgttgtcccgacggtctcaagccaagggcaactgggtgaaacagtgagtagacggtgaactccgatggagcgattcgccccaaagccagatcacgtgtaaagcactgcttaccgcgtaacccccttaacgatcgagtgttacaccccctcccccttcttcccccgcgtgttccaccttcgtcctgtcctctgcgctcttcccagccccaatccaacttgtacccagacccccgattgtccccaagtttggtccaaaaggaacccccggcaggatgtctgataacaacgagcaacaccatcagcatcagcatcatcaacagcaacagcagcagcagcagcagcagcatcaacaacaacagcagcaacaacaccaccataatcagcaacagagtcatcttcatcatcatcaacaacaccatctaggctaccaccctaatcagcaaccacacagtctgcatcagcagcaacacgtccagttagtcgatcctcaacttcaacagtccttccaatcctcaacccacagtccgcctcaatcaccttcacaccaggcttcgtcccatccggttgactcgcccagcagtctcgttaatccgatagccaataatctgaatcccgactctgggcggacaacccctttcgctcaggcccatcaggcgttgtcggcccagacccaatctccgccttcctcctcggtcgaacccaccgggatcgtcccctcggccaatgaccctttcaatgtcgccgccttttcttcttccgcgcctgcttcttctctgtcagctgtcgacggatccagtaacgtcaactcgaacggcccccaaagcggctctatccaggtgacggccacccatggctgttccaattgcttctctctacagcaaaagtatatcgcggcccttgaatcggtcgccacgctcaaccaccggatcacctctctcatcgaagaaaagtcaacgttgagcgaagaaaaaaccgcgctccagggtcaggtctttcagttgcaccaaggttggtcaccttctcttgccgctacgagctgcctgaatcactgatcacttttgtttccttatcgaccacactctttctcttcatgacttgttttatcgggactcgctttctttacagcccaacagtttgcacaggcccaagctgcccatcaagctcagcagcaacagatcctacaacagcaacagcatcatattgcccaacttcaacaaccgggaccagacgcgtccagtctcgaccccacccatccttccggttccgtcgttgtcgccagcggcaatctcctcgggacccaacagctcatcggtaccggtggtcacgcgagataccagccttcgttaccaatctccatcccggaggacaggttggaaatcgcaagaaagcagtacgggtcgtacgatccgtacaaggatatcgacagagacgaactagagatgattctctcggtcactcccaattggacggcggaccaccagacgaggaaagctatctggtccgagttgaccaatcgacatggaattcgtgagtcctttctggttcccatatacttgtcttttgccaggtatgttgtaacctactcacctttgtcctccttcttctccaacagcggttatgcgaaagatggagccaggagaggacccaaaagaatacgcattggaacgacagaaatcggccgaatgggcccaaatctctcaaaccgcccggtcgatcgcaagggaactgctagtccccggtcgaacatggttcgaccaaacggacgaagcccagaagttggccatcaaggcttgccagctaaaggtcgaacagactcggtggtgtgagaataactggaaggcagtcgtcctgttggattctaggttggtcgagtggaatagagcttggcgggagaagaacgaagatccggcaggcgccgatccggcagacggagatctcttgaggccgacgaaaggtgggagaagaaaacgaagaagggtgagtacgaaggtggggcttgctggtcttcaggcagaactggctgagcaggcggataggtctcaggacggggaagaacttgagatggaacatatcgaggatcatatgcagtgatgatcttctgttgttcgtcaacacatcttttcgtatctagattgtagtatctcttccctacacattccgtatctctacacgtttcgtcctcccggacattcttcctatattcgatttcttcctcctatagtttcatcatccctttctttgcgtttgcctgtatcacatgaactcctccccacgagcgacatatcgccttggcgattataaacttgacctacgtaattttaataagatgtcccatgctgactaatgtagtcgaccgagacgatcatcgctttccttggacgcccaccttaagcgctttcccacaagtgtctctacacatcataactctctcttctgcaaacgttcagccataggtttgtagattacaaacaagaaaacattgatttccttcaagaaagggtaagaattttgttctttctaccaagaagagttcaacgcctggacgaaaggaaggagaaggtgtcctccgactgagacgcggtcgctcgcctccgaacacctccttcttttttactgacagcctttcacgccttttctccttgaccttcctttcagtccttctacatcaccacttctggcagctctctgcaaacttttcttatcccatcatcaggcgcatatagtcctgccatacatccatgttatctggtgctcctatcgatctcaccctatcggatgacgagactgatcaacccgacgatgccaaccaagcaaagaaaccaaggctcgaccatcagactctaccttctctttcgagtcttcaacatccgttagcttcctcttcagagctcccgagttcttatgagtccacggtgacgtctgtagtacttccgaacggtctccccggtactgcgtttgcttctgaatccagctccggacccggattgaggttgccaggcctgcacagtatccctggaggcgatcagggtggaagtatcttcttaaacggacacggccgaccgacgtcggataagcaggtctttccgacgggtcaatggccaaccgatccttcttcctcgaccaacattgcaagcaattccctttcgtctgtttctgccggccagtgtccgtcggtgttcgggcaaagctcgttcacagcgtcgacttcaacagggtatcctcctcaaccagtatcgcatcaacagccgtatcctccttcttttcaagctgatccgttcgcattcaatccgtcccattctcgttcaacttcgttctcaagctcaaattcagcccagggaagtggtcatcacgcgtccgggtttacacccaggaagcaactaccattaccgttgacatcgacaaacccatatgcttttccccaacaaacgtcttcgaaagctgaccgtctagttgtcgcagcgaacgcaagtgaaccgatagatgtcgacagtcttccttcgccacctagacaacatgtggcacccccgccgacagcgcctccgccacctcaaccgacgctgatcggtgtacttcaaacaacagcgttgatcacctacccaatggcctacctgaacccgactgtcccacccgggatgacactacaaaaggagatgcccaaaggagaggttctctttgtgaacaaccaagagtgggctagagtgaaactcaaggggaacaaaccatctgatggaccggccggatacggccacgggtccttgggtgaagaaacagtcaacatatttccatatctaccatccgcagtggcaaaagaaccgttcggagtggtcgcgaaagccacaggcgatgtcatgggcccgtttctgaaaaagggtctgttgagggccgagggttggatccagagaggtactgatcagtctgtaagccaacgtttcctttcacacatatgtatgcgcgtatgtctctcttggaagttcgcgcgtgtttctcattcttcgatcatccggtttctttcttgcttgctcttgaaagaaattttgctcggtcctacacctgtatcttctcacgatccctccgaatatcacatacattgccaacaatctttcaaattcaaatctatacctccaacaccctcaacttccctggcgacctcaatggttccaaaattgcctgtatcataacccacatctactcggagggacgaacgctgacggtttccgaaacggaccagggtcatcggctgcgttagcgaacgcgttggccggtagaggaggaacccaagctgctgctgctagagtggtggagcaacagagatcccaggtcgacgaagtgtttcaaagtctgaagggtggagatgacttagaagagacagatcctggtaagtcgagtgttccatacatctcatcagtaccagagatcaggattctcaactcaacttttctctctctctcttattctgtcgtgaatctaatcaaggacccttgattggaaccccattatacccgcatcaacgaaaggccatttctttccttcgagagagggagaatgaaaaacgtccaccgacaggagtctccaaaaaggattatatcgtgcctgagagaggaagtctctggaagccgctgccattcatcaaagagaatgggaagaagagctcgagcggaaagatctcggcttgggagcaccgggtcacaaaagaggtcgttaaaggaaaaccaagggagtgtagaggtgccattttggctgacgatgtgagctgacgagccttgtcgagttttcatctgttccttttcttcatgctaatctgataacccctcgaggggattctcttttcttatcacctttttcgtcttcaaagatgggcctcggtaaatccctttcaattgtttctctggtagcatcaactatgtcaacggcccgaaaattcgagatcaaacctatcgaagagccttcacctccatcgacaacagggaacaatatcgatatctctcattttgccggcgctgtatacgggatgcctgtcgagctgtcagccaaacagaaagctgagcagaggttgaaacaagaagcagaagccgaacattacgctcgtcggatgaggatcatcgttcggaccagaggaacactgatcgtctgtccgctcactacggtcagtaactgggaagatcaattattggaacattgggcaggcccggtcaccgtgttctccgctagtgcaggcgcaggtgacaaaggtatcaaacggaacggaagggccgcgctaaaagcgcaattaaagaaggacaagaaggagagctcgacagaaagtagtgcgtcagacaatgaagacgaggaagaagccaccctcagagtttatgtttatcacgggaatacgagaaacttggacccggagtttatcgcggacttcgacgtcgtgatcactacgttctccactctcgccaccgagttttccaagcaaagcaggacggcagaagggaccagcacaccggtaggaggtgggagcggtagcagtagcaagaagaaggaggaagaagatgaggacagtgacggagtcatagaagtagacgcgaatggaaaccatgcggtaaaggtcgaggagaaagtgaaaaagagaaaacggacgaaagcaagcttgactcagttgggtttagctagagactcggaagtcacgtctccgttgcagcagatagagtggttcagggttgtgctggacgaagctcagtcagtagaactcatctttctttagctctattttctattccggccaacagtctcacaatgtctcttgtttctcttgactctatagctttatcaaggacgccaacacagtagccgccagagcttgttgctatcttgaagcccagcgtcggatttgtttgactggaactccgattcaaaacaagctcgacgatctctgggccctcctcaagttcatccgtttggaaccatttgatgacaaagccgtttggtcgactttcatctcttcgcctgccaagtttggggattctataggagtcgctcgtttacaggtcattatgcggcatatcactcttcgtcgaacaaaggaaacgagattaccgacaggcaagactctcttggaactcccgcctcgaaaggacgagatccgttatctccagttcagtgaaaaagaacaggagatttatcatcgatacttccaggataccaaggaagactttaccactatgatcgaagacggagaagaaggtcaacagatctctaatatgaattacgtcaatatccttcagaaaatccttcgacttcgtcaaatatgcgaccattatttgttgatcggggacaccaacggagaggaggaagacgtggacgacggcgaggttctggattacgagactgctgctgctgctattggagctcacgggctcacccagagaagagcggctgctgtgatgacttggatgaaagaaggctcgatgtgcgaatgtgtagaatgtaagcttgatctaacctgcttggccgccggtgttgcgcctaccgagaccgaagcagacacgccgtctgcgccggtaaagaagggaaaggctaagaagaagccacctcaggctattatgacgaaatgccagcacttgttttgtaagatccttcctacttcgggtgttcattcattcagtcaaccgagcggaagaaacagtcaagttaacaagtcttttctcgataccttttctttctttctcttcttctctcgacacaggcctatcttgcttcaaaaaatcgatttatgccgcctggccaaaatcactaggaggagttggacgatcctgtccaaattgcacgactggccttcgacttgctgccgattgtatcgagatcatccctcctggtacatcagaagctggctcttcggctgattacattgctgttaaagctccgaagaagaaaagtcgaccccgtcgatatctcgagaaccgatcggaccttgtcatgtcaacgaagatcaccttcctcatgtcggacctgctctctttctctgctcaaaatccgtactcaaccaactatactggttcggaccctcgatcatccaactctacgttcattcaacctttagaagacaatcttccggaagcggccccaggaatgttagtcgaagatgaggacaatgaggatgcaccgaagctagtggcggacatgaatgttcttgcacttccttctagaaacccttcggccgagtccagtccacctgtggtcgacccttcaccgaccatagctgacaagacaacggacgattcccaagaagcacggtctatgccctttgaaaagggaggtgaccacatcaaggaggatcatcctctggacagttcgactgcggctgccaattctaccaatcctgctactactgattctgatgttgtcgttcctgttcttcctgaaagtactcctcaatcaatcaaggagactactttatcaagcacgacatctgaacaagccactacagtcaaggccaccgatcttgttcctaatgctccacctgccgcgccggtgttggaggaaccctatgcgtccgatcttgcttctggaaaaccaatcaaaacgatcgtcttttctcaatggacgtcgatgctggataggatcgaagatgcattggtcgactctgggatcaagtacgatcgactagacggaaccatgaaaagagacgatcgaacgttggcgatggagaggttgaaaagcgatcctgcttgcgaggtcttgctcgttagtttacgagcaggaggtgttggcttaaacctgacagctgctaaccgctgttatttgatggacccttactgtgagtttttccggtttcattgatttttccttacatgcgagtgatgagactaacgggtagatgagctctgtgtgttatagggaatccggctgttgagaatcaagcggtcgaccgaatcgtaagtccatcctcttgtcatttccgtggaaatttaagaggagaatcttatctgtcctgtctttgatattaactcatatcctgtagcatcggctgggtcaatctcgtcctgtcatcaccgttaaatatatcagtacgtgtctttcaaccaaaagacgaatagtctcaaacccacttcgttgacgctccttcatttccctgatatttgttttcgcgcactctctcacttgtgtattcgattagttcaagataccctggaagacaagatgcttgatatacagcgtaggaagagcgagcttgcaaatctctcgctttcgcagacgatcagtaagaaggaactgcacgagaggaggatggaagagcttaaggtacgtttaaaaaaaatcaattccccattctagtcttaaacctcccaaacatcaacgtatcgaacgctgatccaagaaaatattcttgttgcatttacttagacgttgttcgcataaacctattagaaaatcaagatagaacatctatagagccaacttccactgtcccatctcatctgctcactctttatatttcgttttgatctggaatattctctctttggtttagaatttttcttttctcgtcctagagtagtaaactgatataaatatatgtttgagtttgttttcgatttttctctttctcatcctgctttctctgaatgaagggtgctttagttgcgccacaagattgtatggatccgaccttggtcaagaagaagaatgtatataaaagcaagacagaacaccgtttaccagacacagcactgtatgcagaaatgaccccctcgaaaagcgaggaggcagaagagattaccatcaagaatgaaccagtaagaaagtcctctaaccaagactgatcaatcgctgaacctgcggaaccatcaattcgttcaacccaacattgttaaccttgtgctatcaaagaagaggaagaggcacaatgggtaatatttgctaagaaaaaggtttacgtacagccaacaacgctctgtatctgacgtcaggattctcgtgcgtcatgagcgccatcacacgagtttttgctcccatattgttgacgagcctgtaggagaaagaagaaaagaaaaaaggatcacgtagaatgggaagggagaaccgcacggctgttagggaattgtaacatgacgagcctcgatatagagatagcaatgatgttggttctgaaaaaaaatttgactgacttctttccggactcgtagttcttgacatagtgcccaatgtcagcgcatgcaacagctagcactactgggtcatcagaagccttcaaaagatccaccaaaatccttgtaaatgatgaagaggacaaagaatatcgattacaaagaagatcagcctcgaccgtcacaactgaatatacatttgagccgtaagattcggcgatggtttagaaataacacatacttgatgagctttccgtccttctcgttcagctttgtggcattctctttccagaaatcttctgattcatgtatgggcgaccaggcgagatgaccactctcaacctcagacgcatattcgtcccaggttctacaggtgtcaagttttccttgtcaggaagcgttgaagcgtatggaagaaattcgaagaagaagcacgtacgagaggttgcttctggcctccttcaacacatcccctagcacgttcagatcgtcctccagctcggtatcttctcccagctttcgccccttcaagctctctacaaatggagcaaccctagcagccaacatcgccgggacattcacctgcggagcaagggtgatcaagtttcggaaggttgcaagagtaattcgaaggactttttgcttgggcgacgattgagctagcgaaagcagatgcggcacaagattaagttttctataaatattcgatttaatacagacggagtagaagacaaaatgtcagtcaaatacatcctggtaacaaagggaaggacgatgctaaggactgacttgtcgattccttcacaaacttgtctatcaaacgtcaactcccagaaacagaacccgacccagtacatcacttgagggttcgcatctctaacgacaccctgacctgcggggctagccccagagatcgatcgtaggatcttggataagctggaaagtacaggaatggatgtatcctctagggcccagatcgaggatcgaatggaagttacagagagcaggagggcgagtgattgcagagcaatctctttggagtgtggagaaggagctgagaagcagaggatgacatatagatacctgtttgttagcttcgtctcagactatagctacaagatatggaaaggcatggcggacgtagacgacactgagacaaaccttgaagcaggttagccaatacagacagtagagggtgcaatgtcgagtctgagactagcttgggcgagctagagatcaggaccgtgagcagctgggtagccttaagttgaatgaactcgtcagagagagaaatcgctctagaggacatggttaagcgtgacatccctcttataaggtttatataattctctatcttgagaaagaggaatctacttacttgatcagaggagcaaagggaagctcagagctctgggattgaaggttgtaaaataggttcagtcgatcttgagattctgttgaggtagagaagaacaacaccaacatatacaggcgttaaagagatcaactccatcaagaacctcatacgtagttgaaaaaggaacataccaccgatgagatctcccattccgactaagacggcctggacggtatccactctgaccaactttccaagcaagccctcaaacaagccggcatagacttcttgctccttctcaaagacctgttgctgtttggccaagggttgtcggtcgattttcttgaggagagctagttcagaaggcgagacaaggttcgctcgttggtagccctatcgtgtatgaaaagaaaagaatagtaagcgatggaacgtgtcataaaccaaataaggacgagggcggaaggagatctatatatccaaggcttcatctctgccatcgtcaagcaaaggagagggttcaaaagacgcacatcccagggaacagcctttgctctgatcttgctcgaatgttccgagagccagggagaagagacgaggacgatattggacattgcttgatagacgttgagggagaggagcaaaagggagatgaacgtcttcttcatatcgctcggccgtcagcgtcagcttagtcagcatccgcaagacatgttcacccaggtatcagactcaaacggatacccaactattcattgatatctagatgactacgaatagagatgtacatgttggaagattcgtttcacgagtccagtgactagactccgctcggccggacaccgattctcttccagaacaaatcctctctcagtcttacaagctccttccaggtcttctcctcccaactgtcttccttcacaggcgcgctctcttcaacctcaaccttcttctccgtttcgtccagtgaaggagaaggagctgcaatatccgtagtagccccttgttccttatgttccgttgctttctcttccggcaacgccaaaaccggagaagcagaaaccggatcggcatcagataaggacacatccgaaggctgattaggcacatcagacacggcactcagatcagacacctcagaaggtccatcagagatggtcgggatagatagtgtagtcttgataggcgaagcctcccttggctcgtcaactaaggcgggcaccggggtagctggacgagttccagcctcggaaacagctgtcgaggtaggtaccggcggaactgctcgccttgctgccgctcgttttggcaaaggaggcgcaggaccagtggcgacggcactcggttgtttcgaagaaggctgttcaagagaagctctgtttgaaccagtctgttcaagggatgttcgggccgaagcagacccctctacctccttttcagaagcaagtatatcagcggcgggcgtgtagtctactcctttaggacttgcgccgatgggatcaactgaggcctcttccgcattgacagacggaagctcaacaatctcagctggctcttcattgtgggccaactcgttctctgatggagcagcaggagtttcctcgagctgtgtctcggacgattcagcctgaatctcactctcttgagaagtactctctgcgattggctcgactggaagcgattcttgagttactgcttcagtccccatgaacgaagaggaagcaggctcatccgacaagctctggtccggctgagtggggtggacgctcactgtcgtttcttcgtcagctcgatcttgaacttttgcggaagtgagaggaggaggcaattttctagccggcaagttaggtgccaccgtcaatgctttgttcgaattctcgtcttttggagttccaggctggctttttgataatccccatccacctgaagacggtccagatgattttccgaacccaagatttagaccccatgagttgctttttctagcaggcaacgccggtttgaccggctctgcggctttgtcaggtgtgggctgtgtctgactgacatgctccgatctggctggaagtttgggaggaccagccggcgttgttccgtcgtcatagctccacactgggttcataattccagttttgacgaaccgccagagctcacatgttgctcgtagacgatccaacgaccatccctcagctacagggtacaaacttgtcgatttttctgacggggactgtgacacagctggagctatatgaaagacgtagatcggcggatgagaacctgatgaggtactaccaggccggcttagtcctggacgatgtgcaggggagattggacgcgtaaccatggttcgattgaagaacgacaaaccgcgagtttgaggaggagcggcggatgaagttgaattaggctcagcattctgcagaagcggattggccgaggccggggagataagctctccggatagtgcacagacgatatctccttctggtttttgagaaaacacttgagctgttaagataggacatcatcgttagttcgatcccacacttcgtctgcggtaaagaaataagtcacacagacctgctgacactggctcaacaatcagcatactatctatcactgcttgactgattgatttcttgttcaaccagctaactccaggtgcgaagtcaagtcggagtgcaggctcgtgatcctcagtgattactcgagcaaagaaagccatgttgacgaactgaagaagggagctgaatggtggggctgacgaccggtttcgagggcgcatcgatcgaagatgagtgacaaatgccaggaactcggcataaggaatgtggtcgtttcgaaagattggatgaggtttagctgagccgagattcgtcttggtttgagaagcttctgaggaaagtgaaagcgcctgcatagcagactgcatttcccgaacaacattctcggcaacggaaaggttttcctctgcggcaaccagccgagtctctgctctagaacgggcgagtcgttcggctgcgaccattgaattcgcctataaaccagatgttgaaatgaaaatcagactacaaaggcctctatttggagaagatttaatagagtcaaatgaacgcacttgttgaaagagcgaagcagccaaatcatcgacttcgctctcaaccttttgctttccctcttcagccaaatctctctttccttgctcatccatcaaactagcggccaagcgctgcatttcttgtttcacgtttgactgctcaaccagtaagcccgtactacatcatcaatcaagacggcgaggacagtcagtcattaacaggaagacggcaagcactgagtgggacttactccaaagcatgaagatgctcctttcgttctcgttccagctcatcgatttgacgtttctgagcgtctgttgtatccctgatctgaaacaaatcgtcttccaaatcagccattcttgagaaagatgtcactagtcttgtgtgtaaagccgacatgggaatgcatcatcattcgtcagacctgtggttcatgttcttcttgacatcagagtattgaggagagggcctacttctggttcaacatgtctctttgttcagataaagcctcaagctgtgctttcagagaactgacaagatttgaggtcggactgtcgggttcatgcccataagtagcgagcctcgaagcggcaatgattgagttggatggaccatgaggagaagtaatcgcaatatttggaaggttgatggtccgaggtgttggagaactctagtggacggaaggaagaggagaaacgcatgagaatcattgtttgatatgaagaggagatgacaacatatcatacacactcgaagattgtccaagatgtctggagattcttctggccggccatcacccgatacctcaggcaacggatgatctttgttttctggagttccgaagggtgtagacgcagccgagtcggaggcgtgaccgttgtcggagacagactgttggaagatcaagttcgtttcattgcattcggtcggctcaaaattagttttcttacgataaagagtctctatctctcaacgtacaaggagatctgactagagcgatgagagaaagtcgaaaagacgacaaacttactgggcggttttctacaggttcaacctcagactgttgggcagcttcctcgggttctcttgtctcggactgctcttcgggatcagatagtctttcattgtctacgcttttgtcttccttcgaggacaggtctaccgactcagtcgactctcctttggtatccatgtcctgatcagcagaaggaataggaaggctgtcgggcatgtccgttgaatgtgttgggttagaaacgtcctgctctggtgagtggctgtttggagaagtatgctccatgagtttattaagatctgagtcaaagacgagacttgttgaggagatgaaagctaggagataggaagaaggtgaaacaaaagaattggaaagaagatcggaaggagatggttgatgtggatgtgacgagtgtctgtgaatttccatctatcactttcaatccgcacagtatcttgaccttgagtctctcctatatatttaataattctccttcggttgtaagggtacttttctttggaaagcgccatggcaatgatcttatattacatcttcaactgtagatatatacttcacatcggtccaaatgaattctcagacacttctttcctgttcctcgccttgatatctatcagatcctgcgtcgttcgctcgatatctagattcgcctgagcgagcgcagcctcaagctgggcgattgactttcgctcttctctcatcctgttaagagatcgaatcctggaggcatctttcatcgcgcccaaggcaatctgatcgcgtagtatgcaacgatgagttactcgcaagttggaatgactcttgtgaattatgaatgaacctggaaatacgaaccatgaccatctcctgatgaagattttccatccagatcaatttcttcgtcaagtgatcggtcttttgcaatagcgcggctctcaacgcattgaaatcactcggtcgttccacttcggtctcctccaagaacaacttgatctttgaccgaacatcgtctagttttggtcccccaatccgagtcgatggcattgcactttccgtcagaatcatctctatattcttcggtggtaacgattgcaagatatcgcatatcgaatcggaaagcaacgttaacaccgttgcaagagatacgacagcctcatcgatcgttgagattttatgaggcgccgtcaaagcagtcagcgcaaacgaaagtgcttcaggttcgagtctagatgatttggtaatcgttgacggttgttggtcgtctttgaagaaaaaaagacttcgatagtccatgccgttcattgctcggttcaacatatcactcaaagtgcgagcgactgtttcctcttgaggcggattaagtcgctcatagatatcaaacttcatcatctgagcttccgcttcagtaccagtcttcgaatgacggtcagtgtcaggaatggcttggccggctgaaggaagatcatctttaacctcatttgaaaccatcagcggattctctaccagcatagtgatagctatatccggggtgtcaagtttggtatcggtgagaggaggcgaagaagagcggacagattcagagagaggatgtctgactgtctttgcaagtgaatcagtcgcctccgggattatcgagttcacaagatcagtctctacgttcaccagagctgaaatttcagatgacgcgcgagcagtcggtttgtccgatcccaagagcttgaacgccttgatctttcttttcttcccattccgatgaggtgagggagtccgtggttccgatccaaacgagagcgaaatggattgctctacagagtgcatcttcgattcagtagccttcatgtccacctccgtgaccggccgaaaattaactggtttctcaagagtaaactccgagaattcaggattgtctgcgattggcttgtcctcagttctccgagatggttttgacggcgttaatataacagttgaaccaaccatacatggtctcggtaacgaggtaggaattgctagtagggcaggcatagacgatagctgagcgggcgaaccaactctcgaagcagatacctcctttgaagctatcgcaatctcctgaagctccttccgggacttcgttgccggggttgtcacaggttgagcatagacgatagacagaagaggatcggcgtgattcatcttagcaggactggtttcaagttctttcgtggttggcttcataatgtacgtctggatgttccccagaaaaagatagaaacataattccaagagttttctcaggatgtgagtaacaatcaatctcaaaacaagactcttcatagaagaaacatacctgttcaacttcactcatgacaccatcttctgtatccttcagcgctatcttcttgtcatcaggaacttgtcgatcagtcgtacctttcgaacatgaacccgtagacgacgaaaaactcatgccgttcttcatgcgctccccaaacaaatccattgaaaccagttcttctctgatatcaagtttgacgcccagactcaaatccagattcaggtcggcgtccatgctcaaacggctgttacgtctacccatatacgtatgaggttgagctgcgctatggacaccaacaggtttcatacccatcgtcagcaatggcgacgatgtgagcatggtcgacccaaaaggagggctgaatccgttttcggtttctcccgtcaactctacatctcgaagtgtcttgtaataagccgcactcagcggcaggtgttgctgtgaacagtaatcatttggcctgggattgacgaagctagctgttgcggttactttgggcaaaggaagatcactctcttgagatatatcagacgaaactaatacgtctgatggcgggattggaaagcaagcgagaaagaggaaaccagaggtcagtacggacagacgctcattggatgcaattaaagatgtcatcggggtagggaggggtctttttcgtacattgtatgctagaggagtcaaagggaggtaccctctattttatatcatgcggcggggtagtagtaataagggtaaaattgcaaggtttgaagagggttgacgaaaagtacgaggaacatatgggttgtgaggaatgacggaaacaacaggacaaaagaccaagagcggaaggataagagttgtaggaaattaagaattaagacaactgtagagggaagaagaaactattggacagatgacgagagcacgagcttctctctttatccttctcaatccttctcagttattttcttattcaaagcacccctccccttgtcatgaaagacaagccagagtcgttgtacctaccctggtgaccgactccggctaaagttgacggcgagtccgcccttccgctactggcactagcgttcccagctcccgctccagcacctgtaccgttagcgttgaaaggatagttctgaggctgctgttgctgctgttggtgaagctgctgaagaagtctagcatttctagcagaatcggaagtaagaccctgagaagtaaaagggaaagtgcctagcccagacgggtcggccgttcctccaattccagccattccaagatcaggtccgtagttattaggcggaaattcgttgtgttgctgttgttgctgctgttgttgttgttgctgctgctgttgagaagatgtcatcctcatagacatgatggcggggtcttggaacggcatctggttcattccaaggtctattagaaaattcagcaaccacggttagaagaccaaagtacaaaggatacagcgccagtgcatggataagaaaacgaaccactagatcccactcccattgctcccatcccagtcattgaacccatagatcccatgccgcccattccattaatccccatcattccaacacctaacatatctttcaaggtctgagcctgagtcgcacgttcggctgacataacatatgatccttgctggccagggtgttgctgaggatgctgctgctgttgatgttgctgtcgctgctgaggctggaattgctgttgatgctgttgctgttgctgccttgcaaatgccattcggctctctctggtttcaacaggcggaagtccaccaagggaaagatttccattgggagaagacgctgatagctggtgaatccaattagcagggttggtactaccgccgtttccattaatatggctgtttgacgacccgatgccaccgttggtagcagctgtggtcccggaagaagttgaggctgcagcagggttaccggaattcaaaatggggatgccagatccaaggccagaagaagcctgagacttcaacccaagccccggaggaggcggatttgcgtggaaagaggatgtcgaaggctgtctagataaaccatgggatgaagccccggcattggtcatgaagccggaaagaccgggtggaggtaatctcgttgatcctaagcctagagaagggccttgctcttccaatcgatttccccccatgaatcctgtattggacatggatgaccaaggtagcaaagtcgagccatcctccgtatcccctcctccagcggacatgtatcctcctctctcgtcaacactgtctcgtctgggtgaggcaaaccctgacagacttttcggcaatccagtcaacccatgtactggacttctctctgatggccttctccttgcaaaatcaaaccttgatcgtttagttccgtctgccgcttcatccattgaaccctgtccgccatctccaaatggatcgaagttaccaacatagggaacagatgggccagctccaagatccggtcctaaccgccctgcgttgctcatcggcaatgcaaagccaaacggagagaacccaccgccagccccggcaagtgtaccaagaggtccaaatgagtaagcggattcttcagcggctgaggattggtgaggcctgtttcgaggaagattggctttctcgtccaagtgaagattgaatccaaattggccatcctcgaatgaggaaagcatcttattgaggtccggaaagggagagaacagtgaggatggttgagcctctctccgagcagtcatctctgagacgagcgcctgggtctgtgaggaaggatgatatgcttgttgatgcggaagctgctgggtttgttgttgctgttgtatgatgttcgactgaaacgcattctccggtacactttcggatgacaccggcgatgatggttgctgcaacggctgagatacaggttctggcgtagtaatcgcctgatttggtactatttcagtcggaacagctagaggagaagacggcctagacggtgccggtgttggtagggaaggcacggcaggtggtgcttctggcgtttctgtcactactgctgctaccgttgtctttggcgatgaagagacggaagcgggtgtggaagcaggagcagatatgggagcagaaacctgaggcacaaggaccgctcgggtgggtgcaggtgatgcctgcctcgatggtggttgactggcgaacaacgtcaaaccaggaggaggcgcacttgtgacaaccggtgttgaaggagccgaaggaaccgcgggtactggcggtggaggctgaggggatgtaacaatgactggtctcggagattttggaggagggattccactggacgacgaagagactgataatttagcagctgacaatactggcgtccctgccctcgaagctgaggcggattttgagcctggtccctccgagtccttgcctaggccaggaggaggtccagcagttttcgatagagtagcagtcttggatttgctgaccgttggtgagggagcagacgacgatgtggaggccccaattgaagcgagcgagacaacgacattcttttttggcagaatcctagtagaggagggtgttcctgggatttgggatttgactgacgagccatttggtgctggaagtgttgggttgggagggagagaggcaagacccgtaccaggtcgagctccccaagatgctgtacgtggtagtgccgaggctgtagtgaaaaataacaggatgtcagaaatcttgcacagaatgaggttgcgcgtaaggaagacgaaccatctgtcaattcgtccagcttttttgctcgagagctggttgctgttgacatcggcttttgtaagcgctctgtatccttcatcgaatggttgcttaagaaaagttagggtttcagtagaaatgagctatcgttctgctgcttgggagataaacagcgaaactcaatggacacatacagtgtagctaaatcatccctcgtgaaacaatctcgctcgtcgccccagtcatgcaaacccatacaacttgaattctcgcactttgtgtttcttagccagttctcacagtacttggctgttccataactggccctcagaacttgaccgggcacactcggtgaggggaagccatcaagtgcagcaatcgctcgagcagcgtcctctcgccgaaggtaagtgatgtaaattcctacgtttggcaaattatttgaggaaggtgtggaggaaggtggtcgcttatggagaattagtttcgatatcttgccgtactggccgaagtagtcattcgagcgaagagttgcaagttgctatagaattatcaagaagaaacaggagagccaaggggtgaggtttctctaccgatgggaatataacaacgatagttgatgtattttgaaaaagacgaaaacatacctcttctgctctaccttcttggccgacgcccattccaacaacaaacaccatgctcttcacgataatccgcacatctttcagatgtcgtcggccaagagactccaactccttgttgactttggcctttgtcttcttcagagcagtaagacgtttaattctgatcaaaccgagaggaatgggtcgtgtcagctcaaccaaataaatctctgcctattgaacagagctgaagtttgacatactcttctggagatacaggggtaaattcgattccttcttcagtgtattctcgacgacaagcaggacatcgtttattcaagtttgcaatgatatggtggtgacagaaccgacaaatctaaaaagtcaaataatcggcggtcagagataatgctacagtatcagaaacagatagaatgtccaaattcatactgaagaaaaggaagagacggtacctgataaccacaaggacagggcttgaagttgatatctgacaaatccatctcttccatacagagaggacactctggatcctcttcctgtggaaccaacagtgaagagtcggttaaaaagaaagagaggacatgaaacaaagaaccgcaaccattagccaatcgaaaagaatcaacaaagtgagttttgtaaatgtaattggaagataaaaagagattgtgtagaacagaaaggatgagataggacgaaagtgccagcacactgagaaaaaataatctcgcacgccatattttggttcgtgtttgtactatgcacatcaggaatcaagcgaatgcgaagacaattgctctggtagagtgttcgatatctgacactgatcctttcccttgagcaagtagttgccttgctctccggtgggaagccaaaaagtgattttccaacacgaacgcgttatgaagggatgccaaaggctaaaagcagagaaagaaaggaagtgacgaagtgaagaaggtagagctgggaggtcgttcaaaatgaagataaaatgatgttctcttccgttccaccaggataaaacgaagggtttccatatagatcatctctcccatagcatgttcccaagaggaacacagtcggttcgaatgaggtagcgaatagaacagagccaaacgaaatatcaaaacaaatgtgacaaacactcacctcatcgtcactccaatagacgtcttgaaggcctttcagtaaatcagacttttcgtctctatgtgagttagaggacaggacgatccttgagccggacgaagcggaagaaagtatagcggtgggagccatatggagaaatttagctggtgagagtagtaagtgattgaatgaaccggactgcaagaatggaacgaaaagagatagagagacagtcgacacaaagaaggaagggtatatgctatcgttcgagagtgatggtcgttcaaaagatctgatgttgattgagaagcaagaaaaaaggggaacgagaaagagaaggaggagagagaaacggttcgaaaagggcaagggtgaaaaacagcgagagaaaaaaagaaatcaaatttgagttgtcttaagttgtctaagaggcagcggccgtgagactgattacaagccagactatgaagaaggtggagtcatctgtattgagatctctattactttctagagtccggtttcgtagtctttctgtgcactttctgtagtctctagatatgatttctgtagttcaatagatcgattttcactcagttatccacacgtacatgctccatctctcatacgatccctataccttcataccggctatcctcaacttattctctattcctatctttcattgttctgtcccttcttcaagcctttgaatatgtcttcctggttctcttatctcacgccctcaaatacatcagacgccctttcaagtcggcctggcccggctgactcgcctacggtgactcgtagtcctccagccactgctcctgcttctgattcatttgcttaccggaacgaatcatcacaagcacaacccactcaatctacgcctgaagtagattttcaaggaagacgaaacatatatgacctagacagctactatcccaagtcaggtcatcggtttgtggacccacctgttacagatcctgacgatccctgtttgtgtttcatctttcttcatgatctctctcaccatggatctatggtactgatgctttcttttgattgtccaaacaatccagctgctcctccaccgtctttatcaccatcgccagcagctgctccaggaccgaactttccgaaagtaccggaaaccgctttcgagcgcgtgttcaaagccaaaaacccatcggaaccgctaccggaggtcctcatcaaagacccagaacaaatcaagcttgaccatcagtatatcaacactcaggccaaagtaaactgctcggatatacatgctcaactttcagaatgtaaatgtccctaccacggtcgttccttgattgcgtttcatcatttgacagagtactgacatacgaatttctattcttcatcctttctttggggaacaggtcgcatgagttggacaaagccatactttacgcttgaatgccacgagctatctactcgagcagacagatgtatacgcatacaaagagtcagttctctgcttactattctagtcttttatatgcgcgctgattgtacaatctattttttgttttcattttcggacaaacgacaggagcttttaccagctatgaagtttggagaacaggataacactgtagcccaggatcggctgtatgccagattggcggatgatgaaggcagaagactaatggcagaggaggacgaacgagcaaaaacaggatctcagacaagtgatgcataatcttctctttggcttttgattgtggctctgttgttgtatctggatattgtagctaggtatgaaaagtattcattctatacaaaataataatttttccatatgtatgtg

SEQ ID NO: 632 - DNA, 30920 bp, Xanthophyllomyces dendrorhous
gtatgtgtatgcggagggaaacaagtctttcaaaatcctgttaaccggacccatctctctctgacttcaccgacctgtacgcaaacacccgcgctcgacctccttactttgcctccaccctcaccaccaccttccccagacactcgttcaccggactccgtcctcttgaaaacaagctcagcccattcggcaatagcgaggactagcccatgatgggatgtcactagtgtctgtcctgcatcgaggtctctggatgcatctagtgtgacgagcgccaaatccaacgatgaccctaacacactgatctcgtccgcttcttcgtcttctacctgccctcttttattgagagtagatgacagaggtcgagagccgagagttaccgctagctgtagagcttctggggcaatgacggcgaggaagagtgtagagtgtcttgatgcatgtaccaataccatcaacgttgctaagaactttgatagcgacaacggggataagatcattcccgttccagtcgcggacggcgtcgaagacgaagaagaacgaagagactgtgtggtctgttcctggtagtgattccaaaatcgattgatcatcggcaaaatgaagaattcggcagctactgtcgtaaaagaaacttcgttgggcgatctcatctttggtctgcttgacccgttgctatctgtcagagactcctgaacaagtggcttggtcgatctggggtttactcgaagtcgtttttcccgttggaaagattcaatatttgattctgcatcttccctacctcgctcgatcgctagatccttcaattcatcggcaatcctctctaccgctcctcctcgtatggacgtggctgagcggatcgctcggattggatcagatggtgagatgtatttcgaatgtagagcgttcggtagacgtttgctaggccaatcagtcgaggtgaccgaagggagggcaagaacgggtaaggaagccgcttcgcgcgcacccatagcgagcgcagtgagaatagcagatctttggtggagagagtattggttgtggaagtactgctcaatcaacgccctggttgaaagtcatcaaactattttcagtctggttgactacagacacagaagatggcaagtagagaagaggaaggaaaacttacggcgcgacttttcgaggcgagcaacacactaaggcattcaaaattccttgtttcctgttctcaaaatcttccagttcgaagttgtcattcaaaccagcgagggtgaccgctatgaactcggcattctcctctgtggatgttattcagagaaaacagcgatttgtcagataaattcagccatttgtaacatgtgggaaaagagatcgtgaaatgacagatgtttcctacctagttccagtccaaagtctctctttctcctaaccaaactttcgccccacttcaggccaacctctaatttgtccggatcgtctctactgcctaatagctctcctaactgggtcagatagaccggtttcggcaccttcttctttttgggcgcgtacaacgtcgggtcgtcgatgtattcatctagatcggagggagtaggagacgaagatcgagatgaaatccggctagatatggaatgtgatgacgaggcgtagccggtgagagagtcatcagaatcagataggacagtgatcttggaggaagacacctttgtcgatttcttcttttttatctttgatcgagtttcacgatctagttgagatcgaagtctcgacgcagatgcgggtggagagggttgtctagaggattcgaaaggaggagaagacgactgagcctgctgattccaccccaatagatccaactccgacccagtttctaatccctcatttgcccttgtgaactgattccagtcaatctcgacttttcttagttctctacagatcctttttccaccttcgtccccctcccagacaccgaaattcaagactttgtctccagaaggcgtacttctcgagctgatgacttcggctgacaacattcctaaatggcgaatcgttggatctgggtgggataggtagtgagggagacattggagaaactctggaaggaagcttagacggatgatttgaggtgaacgtatagggaacgagcggacggcgagaaggaggatggtcagaacgtctttcacgcataacggattcgcaccacgttcaagatcaatgattcataggttagattaaacacaaacaagtatcagaggggtgaagaagttgagagtgcgtacagatatgttttttgacgagcgagtatttgatgaattgcacatcggtccaaagctccaacactttggacatgaatttctcgagcgctgtattcaatcataataatcatcagtctctcgcaagataaagacaatataaatctactccgtagaagggacaaaccatcagaattctttgattctcccccgacccaaccgatcccaactatcgctctctgccttatgtcccgttctgatcctaaagatgaagcttctgctcccaaaagaaccttttgccagactccctcctcctccctacctatgactagtcccatgactttactagctctccccagtctgacgatttccgaagcctcattgagattgtcgctcgatgcattcagtccagccaagagatgccgtaggagactctcagctgcacgagcgaggtcagagaaagggagcgcctggaagagcttccggtaagtcttacagtactcaacagaaggtgatgaagatgcgatcacgcgcggaagaaggataggtaagagatgagagaatagtgtttgagcaggttggcgtgggttgagggacgaggaaagtccgaggaagccttgacgaagaagacccgacagaatgggggccaactggtcttcaagtgcagaagctgtatatataagagaagaatcagcttcataccgttggcgtactcagacggaacaacatcaactaacggctataacgtccggttgagcttgcctcccagacgagtcggtctatattcaagacgatatgaccgagccaacgatttgagtccaactcttttggaacttccaccagagtacctccttgagtagcattcatcacttttgttggtatattcaataatagttttgtgtagccctcccatataaccacattttttgcgttcgaaccggcgctttgatgaggactgggcgggaagaggacattgaagacgatgggaattggataggatatcgacattacctgaagaaagtcaaggatgagactgagagatgtgttagacttgaaagacgaccgagatgatgatctggacgcttcttttgatgaagaggcagccgatatcgagctgagacgtgtccccaatgcctgaaatccacagagaacgagaacagttcgaaaacggccttctccttcaactaaagacggagagaaccaagtccagataagagctcttccgaaaagatcttcaggttctttcccatcttccaacacattccaccagacttccagcacggtttccaacagaacatgctgaattccgagggcaaacctagagagcaagatctcttgagcgtccggcgatctggaaccaggccataagagtttgggtttgaggtacgcgagttgatggtcgaccggaggtaaaagattaagcagatggagcggttgggctatcaaagaaatcagttcatccttagattctatcggcttagacaacgcatctcggacgtgccggagatgcaagatgggatctgtggacatggtcgactcgacacagaactcggtgtgcagtagattgaaagaaattgggagtgtaggtaaaggatacggtgactaaccgatactaaccctaacacatgacgttcacacaagcattccaacccagcggatcttttcgaatgataccgtcaacccacctaggggtttgacctctgacggaggctatttcatagtataacaagatgggacaaagtctcagttgtctaatccgtagtagagcacaggtgtgatgcgagcagttgacctcttgtcttgaatcttgagtttttttcgttattatttgaggacttgaaagactccatcagaacaggcaaagacggtcgtacaggctttagtgcatacccaaatacatgaatgtgttcctctgagcagtacttgggacaatcatacatacatcatcttcgcctctgttcactctcctcatcagatcctttcgactcttcctctcatcccgactgttacctttcttcttccgtccaagctgacggagaagcaaaagtcgcgtgatgagataatgtggatagacaacaaccaagtgatctgtgtgatcgatcaactgcgataatgcagagcttcaaaccaaagaccatggtaagaagtcgaactacacgatgatcgtgtgaagatgtttgacgatgatgtcctgatttgatcatcacaaacttcccactacgaattgtcacattttttgtaatcaagttttgtaatcttttttcttcattctcctacgtggccatttcggattttcttctccttcgcctccaaacacccatcgtctggatctcgaacactgtaaagatggctgccacttccaaacgggcaaacgctcagcaacaaaagtctttcatcgggaagcctagtgtgtcccatggaagcatgtacgatgctctcaagatagagggttacgactcggatgaggaagaagaggaggaagacgataacgccaaggtcgtcgtctctcagataactgaagctccgtacgttcctctcatcaactctttcttctctcgttgtattctttcgaattggtctgcttcatagatcgtttcattcctgaaggataagaagtcgcacatgctgtcgccatatgaggaataccaatgtgacacgatctcacgtacaaactcatgttcctctcgataaacattatcccttgttggcttgaaaaaatcactatacagcccagccccactttccaagtctgctcgaaagcgactctcgcgtcaaaacctcaagcaatcttcctcttccgcttcttcctccactccttccacccctcctatccagcccgaggagtcatctcagaagccttcttcgatcaacattcccaagaacaaccatctggatgctcctgtgccagcacttgccgcttccaccccggaggtcgaagctcttcaggagatgggtgttcaaaatgacggaaccggtccttctgccggaggaagaggaaatccttccaaggaatcgccctcaacgttgtctctcggcgagattctccacgagccagccgtaatggataaggctgcgagcgtgaaggaaaaggtcaaggctgaggtccaaaacaggctgccatcgtcgttgaaaccctccctatcgaaagaggaggccgcagatgctgcttcgagatcggctgccaaaggtttccatccaaccaatcttccggcctcgctaccgacattaaagccggctggtccgacaaccccgcagaagcggcatcagccctcggactttgtttcgtccgagctcaaggagaaaaagagcgttcggtttgagtcgagtgtcgtcggccagggcgagtcagctgaggatgcagagaagcgaatcgagtccgaaaaggccaggaagaaaaagatcagagacgccggagtcaggacgggtagtactctagccatgatcgccggattcttcggtatgacttgactcttgctctagcgtatagacatatggtgtcggtcacactctcagacaactgattactctgctctgttcacataggtttcttgttcatgggacatccttacatgattgttctcgtcgagatctgtagcactttggtctacaaagaggtcaccgctttgttcggcttgtcagacagtacgtcatatccttctcctatcctgttatcatcgacatctgcccatatttattcttatgttcttcacatatacaggtggttccaagaagcccggtcaagaagggggcgataagtggtccaaaacccttaactggtaggtggttgtgtctacttgtctcatcgaatacatacatcgtgtactcacttctcagttgaaacgcgcatgccatccaacaggtacttctttgccgtcgccaactacttcttctatggagaatccatcatctactacttcaagcacatcgtctttgttgatagcttgttcgctgtatttgcgagaaaccaccgatttgtcagcttcatgctatacgtcattggtatgtctcatcaagctctgcacgcagacaataacttttcttgacgctccattctttttttgacccgaaaacactacataggttttgttggttttgtcgccaatctacaaaagccctacttgaaccaacagtttgcgttgttctgctgggttcatatgtcccttctcgtcatcgttgtctcgagccattttatcgtgaacaacatcgtggaaggcatgatctggtttttccttcctgcaactttggtcatctgtaacgatatctgggcctacatctgtggtacgatactggtttaattggtctcgttgcgtgggctggaatttgaatcataactgatgtttgaaattaattcaaatgactcttgtcaaatacgtctttaggtatgaccttcggaaagacgccgctcatcaagctcagccctaagaagacggtcgagggctttgtgggcgcgttcgtgtgcactgtcatctttgctgtctttgtacgtttttcttcgggtttcatctaaagcttttcgaaaacaaccaaagctgaggtgtacatgtccatgtaatctttcttcaatccaagtggtctaccttcttgatgaggttcgactacatgatctgccctgctaaagacctcggaagttccgcgttctctgggatgacgtgtgaccccaacccagtgttcctatggaggaaggcaaccttacccgtcgagctcgatggctggctccgagatcatgtatgtttttcttttctgatcgttgtcttggtatgtgattcgttacacagagcgactgacgtcccaatcttttccaatattcccttgaaactctacagctcggattctcgttccctacgatttcttacgtccccttccaaatccacgctgtcgtcatggcttgctttgcttctctcttcgctcctttcggagggttctttgcttccggtttcaaacgggctttcaacatcaaggactttggacactccatcccaggtcatggtggtatgaccgatagaatggactgccaattcttgatgggcatgttctcctatgtttactactcgtcactcatccgagtaagtctcctcctccttttctttccatctgtatttatttttcgtgacgttcgttattcctaacgacagtcctgagttctaacctccctggaattttctttttaccataccaaaggtcaataccgccaccccggcatcgatcttgcaaactgttgctagcatgtctgtcgaacaacaggttgaagtcgtcaggactttgggagcgtacctccagtccaagggcatcagatattaaaccgagtttcctctaaatctctcacaaagttgttgaggtattcgaggctcgagggttgaatctcaagaaggagaaagaagaggtagaaaaaagtgaatggaaggaagaaggaaacaaaagcggatggagatcagaagagttagaactggagaagagatggaaagaagagcgaaggaaaaaaaaatcgcgtggatcgaatcatacatgtaaattcgttttctctttcccatctccaatcctcgcatcacgttgtatcacttgcagagagagcatatgacgaaacacagatgagaccacgaaagcgaagcaagaaaatgatcaaatgtgataaatctcatcatacaaaagaaaacaagcacacacacacaaacacacacacaaaaaaaaagaacaaacaactaaaacacaagatggctgatgtataagaaagacgacaaaacaaaacgaaactaaagccaatcctttcttcatccgagttcaaaactcagatattttcgtccattccctcaacgagaatcaaattcctacaaatacttgagtgatctactggcgattgatgacactctctgcagcttcggcttggagctgggcaatgtcctttgctcgtgagcgacggagaacttctctctgaagctcaagctttcgagaactgtgacgagagtttcgtccgtaacacagtcaaaagagaaggagacaaaggatatcgagaagaaaaggtcagaacgaagtatatatgttagagccgaggagaaggcgagcaagcatcatcatctctcggctgttcaaggtagggaaagaggaacaaaagaacagtcgcgaacgtacacttgtagagaaagatcgtgatagacgttcccggcgtatgccccaacacctacagctgtgaaatgacccaaccaagactttagtgggtctgatgaacaagagcagatgttcaggtccgataatcatttaacccggagtagtcaaaacatttgcgaagcacacaaatgacagattcatattgtccaaagagttagtatcgtattagtgtctctgaaaagccgtcgaagccaggcacaggacgtacaaccccaagggatggcaggccgtctaagaaagcttagttgaagcgatcggatggcgaacccagcagcgatgaatccgaggactcgtatttgtctggttccattgatctgatagtcacctgatcggtatgattcgagaccgttgtgaaacgggttgaagggcttagctggaacggtgctaagaccaccggtggtagtactggccatgatgaagaagagaagagagtggaaactagggaatgtaggcgagatggtgaaagagaggaagatgattggagagggatccggcagtatctggccgggtgcgtcagatatttgattagtatttgatttacaaagtgttctgaacagactagtctgacaactacaaatcgttgtaatacgcgactacagaaaagatgaacaacactgtattgatttcattcacttagaaaaacctccaaaattcttctacatcatccgttatcagcgagcaagcaagcatccatcaacgtccaaagaacaacgacaattagagaggtttttcttcaagcaagacacttggtcatgtcaaaaagtatctccaagatggagactcttttgctcaaggcactcccttcttcaatcacctttcccagctctctcctcgaagcagatcagtcaccagtgataaccgatcctgctactgaaacagctatcaagcaggccgccgctcttctccggaaaggagagctcgtcgcttttccgacagagaccgtttatggtctcggtgcaaacgctttagatgggaacgctgtgaaaaagatttatcaggccaaaggttcgtttgtgtgctgatctattgacgcgttattctaccttttggctattgatcctttctggtcgtgtgaagaaccgggcttactccgtgatttccggatcctacaacatgctgtgtaaaaaattcgacgacgtacaggcagaccttcggacaaccctctgatcgttcatgtgtcttcactcgctatgttgcactcccttcttccagcctctcgggtaccactctccaagacatactctcatctgacaaacacccattggcctggcgcgcttactctgttattcccatcgtcctccctccttccatcgatcactacggcctctctctcgaccgtagccatccgcatgccttctcaccctgtcgctcgagcgctcattcactacgcaggtgtccctcttgcggctccgtcggctaattcgtcaggccgaccgagtccgaccagagcggaccatgtgttcaaagacctagaaggcaaagttggtctaatcctcgatggaggaaactgtgaaatcgggttggaaagcaccgtgttggattgtggagaaggaacagaagagagccatcaaggagctgattggagagttctccgaccaggaggtgtcacggtcgagtcgttggaaacttcggtcaacgctttgttcggcgagagtgaacaatcatcgacagattcttcaagacccaaagttttggtttggaagaaagacttccacgatcctgaccaagaggcagctcctaggacaccaggaatgaagtacaaacactatactcctggtgttccagtttacattctgaccccttgcgctcagtcgttagagcaggagaagctgccaagtcctgaagaagctatcttatctttattggacttgaagcaagagtcgacttcatcatgttctcctaatcaaacatcgctgtcttcgtcaccagcaccagtacccgcatcatcgacctcatcgtcatccccatcatcattcagtgtatccccatcgacgcttcctttacatccaaaaattggcctcatgcactacgcaccctcacctctctcctctctcctgacaaatcctgctcatcctcttccatttgaaattcagtcataccctctcggtcctcggtctcaacctgatatcgctgcgcaaagactgttcgcaggtcttcttgaactagaagccgttggatgtgaagcaatctttgtagaagaaggtttagaagaaggtgtcgggagagcggtcggagaacggttggggaaggctgttggaggtaaagctggagtgatcgtcaaagtctgagaggtagagtgcggaaaagaacgcatacatatgtgaggacggagggtgaaggaaggcacgtcaaaacaatctcaagttcaaatagatttttcatagatgtgatgatgtctcaaccaaaccacatggctatgtagtaggcaaggaagaagtatatcggattatattcccggaacagatggatggtcgtcatgtgcatcaaaaagatgcggaccatcagtagaggggaagtgcgaaaaaggacgaccacatgcgtcttatctataaatatcgtttaataatgagacactttattcaaccgacaggcgtcgttgcttccgattcaatctcgatcacacccagcttctggtcttcaatggaggactcaattgatcctaaccgggtcatcagcctttcgaattctacctcagtttctctcaaagcgagattcagactctcgatcttttcgtctttggcctgcaactgaatttcaagggtttcgacccgaaggccgagcgcaactgatggcggatatgattcggactttgatggcagtgatggcgaagagggtgaggacagagtggtatcgatacggtgggattgtttcatacgggatatctcggccgagaaggctctgtaatgatcatcgtcagatcaacgtgagcatctggatcaagtgttcagaggaaggaaggaaaagagaaaaaacgacgtaccgctcttgctcaactaggtccgagcgaagtcggttgatctccttctcacctacccgaatcaaatcgtctcgctacgataattgcgcgagatacaaaagattagccgatggataaagagtaaattcgatgattaaactgtcaatagttgaatgatgagacggacctgaaggacttcctgtttcatcgattcaatgacaacgttctgtagttcccgctgcttgtaaaccgcttgactgaggaaacaccagaaagaaagcagtgtcgatcaatttgccgaacatattagacacaaaaggcgacgttaggcaggtttgtgaacgaacgagtttttctccagagcggtgagcttctcgatctgggcttcataacctgtgatggtctaaatcagatatgaaaacgtttagttcagtgacatcatcggcatgcactgataacaatcgatagactcactcgaattttcggctcagcttctatcagcttgttgttgatttcaaaacatcttgagaaacaatcaagacaagattgttaagtatcaaagagacgtccagtagaagagcaacacaatgagatgctgggccttacctattcttttcatctgccagatctcttctgagtcgatccctttcctcacagacctgctgaagttcatttcttaggggtgagatcaccttctccagctcatcaaccttagcccgagctttggtgacgtttgagttgaatcggtcgttcttcgccttctggttggcctgggtcgtggcgatcgttagcttgagctcgtctcgttcgcgttggagactagatattcggttttgaagagatttatatttattgtgctgccaatcaaggtgacaaagaaatgaagggaagcatcaatgaaccatacgtgatagaaaaagaaaactcatcacagcactcacaagagattgcatttcagattcttggcccgctcggaacacgctatctcgatggagttgttggttgtctgcagaggcataacataacgatagatcagcaatgttccatcaacccaggatggaagtttctgtcgttgatacgcacgggcagtgatcatgtttttgagatagacctctaacgataactcatttctcagcaacaacacgcttcttctcaagaatgccaactctgaaactcccttcgagattcccgtccgcttcatctgtccttcgtctcctctttgaatacgaagttccgttcctgtcttgaccatctgcaagtatgaatctggcaccacacttcctacataatctctattcggttccacgtaaggatcagatcgagcttcgcctagtgaagcgatgaactcgccagaaggcgtaaactcaggaagtggttccgaaggtgtagggttcataagagttggcgcggacacaaccgaccagggtttgggaggcgcaggagctcgtatcaaagtgaccgaggcaacgatctccgaaggctgaagcttgcctatccttttcttgtttgcttcagaaaactcagtggaggcgtcggtcgaaagcatatcaggatgtagaacgattaatcgagcaagtggctgtacaaaacggttagaggatttgttccaacaaaacggcgtaattcactaaagaatgcatcattactgagaaactcaccacacatcgagatgcaaattctctcttatcatatacaacttcccactctttgccatctcgactctgcttcataccatgcgctcgaaaaaagctcgctggatcacgcatgaattcgagtgtactacagggtagcagagaataaagataagagagaagtgaaatgggctggacagatgcgggaggtaagggtagaccgaaggccttgtctatgaaatcctcaaatgagtcgccaagagaccactatgatcaattggaagtttgttgatcgcagaatggaagaatatatgaacttacctaacttctgccaatcagaaagatctctcatgtctattgtagaccttcgtgaaggtaatcgagacacatccggtgaatctgattgggtagaaggtgaaagaggggacagcagcgtggccgaggattcgtcgggtgtgggagatgaaggtctcgaaagcttaatttcttctgaagctggcaaatgttcagaatcgtccagaccgatggctcgaaggagaatagcataaatgtccaagtttctgtgtagacggaattatgtgatggcactatgtgagacaagttgtaaggttgatacacactttggggtatagatatactgacctgtcaatcaacaccaacggagctccactcagaatagtgagaaagatggccagttcaacgtaaaacaatgttgtactagtatcgatctgagctgagatcaggagagcatctaataaaggcgtctgcaacaaagattgcgccgttatggattgggccattagaaaggttgagagaaagatagccgttcggaatcgagaagacacgttgatgaaagcggggtgaagtagattgaacaggctctatatcatcacaacaacgtcggtcagcatagaatttgatagagttagcatacacagtctagaatgtagcaagcatggcagtctgattgccaaactgtgttgaaagaaacataccaagggatctctccttccccaagccaacagacactgttcagcagcaatcaactctccatccttctccatccagggcgactcgtctatcgaagagtttgcatggtctaacgccacaggctgctctacatgatgaattcctccgctcagatagacctgaaggacagtttctcggacttgctgaaccttgggatcatcctttgccgggcttgccatgacctccacgatctctttgccgggaagctccgagagtatagtcatattgtgccagatatatcgagcacgttcctgcaggtatgtttcgtgatgataggtcttatggaaagagagtgttggttgtaggcttgtcgagtgaggtatataaaccaaatcgagatcaagtttgtgatagcagagagagatggagttagtggaaggaagattgatggtctgccgataagtgacgtctgtgaagattaatgggaaacctctcaatcgtcctgacaatatcacatctcgacatcgtctgttataccactctcagcttctatactatccaccgtcgcttctagtcatggattccgatagagaacagatctgtttcgtgacggttggctcaacctcgtttacagctctcatcagtcacgtcctttctatagattcattggctgctctgaccacacaagggtttcgaaaacttatcgttcaatacggcaattctgatcttcctccgaggtgggtagcggggacgcagaatatacatacaacagacgaacggacgatcgaggtggaactttggaagtttagggatcgagtcgaggacattgtggatcaagctgacctggtgatatcacacgcaggtacgagctgagtctcaaccttaacttctcttctgtcttgaagcggattgacatgatatactctgacgcattcatttctggctcgttttccgtttgtaacaaatctatgtaggagccggatcaatcttgacttctcttcgacagaaaaagactttgatcgttgtggtcaatctatcattgatggacaatcatcaagccgagctggccaaaactctctcatccaagagttatctgctggtagcgacgcctgagtacgtcgaataatcttctttcccatcgacatgtcttgagattgaacccttctgacaatatcctgttgtacttctcaatgaacaggtccttgtccagcgtgatatctactttgtcgactgccgcgcccaaacttgtctcttttcctgccccggattcgactcgttttctggatgtcatcaacgaagaactgaatcttgtttaaacccacgtcgatatcttgttgcttgctacacgtacacacatctttatataccccaaaattgtagtctatgtatcttgccgcttgcttacatcgagtccatcaaagacagctcagtcgcatttctcccccaaagtccatgctgatgggtgaggcatgggtcggaagagatcatcttattgaacattttttgagacgagtcaacggtttgagaacacatcccgatgtgtgtcaatgggtatcaaagatgatgatattgtccgaaacattcgagttgcgctctacgctaggtgttgaactgaaggaagacaatgacagctatatgcacgtggtggttgtctcagccacaaaagacgcgtcttggacgatcagtctcactccatctatcatacttgtctcatctatccttcatccaacaaagtctttcttacctgtcctgctttcgatcttggttgaatccagaagaggacttcgggttatttctgtctctctggtaccgttcgccaggctcgttaacggacggtcgtcgggtgtacaaggggtttatgaacaacaactaatccgcgcacggccctttcatcccctgacccaacctgagaaaggaacataggacatatacaacaccacctcctttcactttgatcaaccacacctcagcatatacccttgtttcagttcttctttgttcaattctcgttccgctccctgacccgtgagaagacagttcaatcgacgcataatactctcgacattctcaatataagtctctccgatgtctaacgtccatagacgatctcaaacaggctcgataggctcaatagcaggcgtgttgagcccttctgccggcccgacggagatagctgcagaaggcccaactagtaatgggagctcaaatgaagggaatgttcaagtgggtgagtatatgtgattggtagtgacgtgctttgaagtcgttcctatagagagagacaggctttcacatcagatgtgctcaaagggaagagagtgatatggagtacaattacgtcgagaagagagttgacagaattggaagaagaggagatccgtttgaaagtaatcctcatgaacgacatgggtcattcttcgtacgaaggcgttgccgtattgggtgcgcgacagagacgtcaagttgcagaagaaaccagcttctcagcaaccatgtgtacctaaaaccagttcatgctaacctttattttctacactttcttttccttctcttttgtttcatcgaaacattatagtcctccgaatcagacctaccactcctcatgatctctccaccattccgcctcgtttccagagaatttcccttttcccaacatcacctacctctatcacagtggacccggcaggagccgccgtggcggtccccagttctagttcggggtccaaacgaaatcaaaacctgcaataccactacgacagagttttgggaccagacgaaggccagaaagatctttatcaggctgcagccgaaaggctcgttgggaaatttctgcagggattcaatgtaaccattttagcgtacgtacagacacggtcagcatgtcaatatgtgagtatacactgatacattctcttggattttgattgatgtatccagatacggtcaaacatcatctggcaaatcatattcgatgggaacggccattgataccgctcaagcgacttcttttgacatcacacccgaaaccggactggttcctcgcgctgtagccgatatattcagtcgatgcgctgaattagaaagacaggcaggggggaaacaaaacttcaaatatgaagctgtttgttcattcatagagctctacaatgaggtacatcgtagaatttttgggtgtcttggctctacatcttgactcttcaatctgtctgacttgctcgtacttattattttgatgcgcttcaaaaacaggacttgctggacctactcgctgattctgatccatccagcagaccgcccgtcaatatacgcgaagacaaaggtcagatcatctggtctggtttgaaagaagttcgagtgtcttcaaaggaggacgtgatggccaaccttcgacagggttccctccttcgacgaacgaacgaaaccgatatgaacgctaccagttctcgtagtcatgccatcttctctttgactctcactcaaagaaagcgcgttggcatccgaccctcgtctccaccaccatcatcatcatcatcatcatcatcatcatcatcatcaaatccctttttttctagcacaaacactactttaaccggtgttaatgggtttggactaagccttccatcgacacctaaccgaatgctgcctcgaccaggctcaatgatgggttctagaacaatgtcgcctacgcctacatctagaccatcgaccccttccagtttgccactgcccaaaggatcaggcctgaaacctttgggaccatccattaacggagcagcatctagggtagctagtccggcattgtcaggaccgaaacatacgagaagattgtctggaatgatcaacgtcctgaaagatgaagagggagacacttttgaaggattcaatggaaaagagaaagatagcggagactgggtcactgtgactagtaaattccatttcgttggtgagtctgcgcgttctatactctaagcccatcctcatcccccgttctgttcgcgtctttctcatcgtatctatctcactgactcgccttcgtcttcacacttgggctatcagatctagccggaagcgagagagtaagtcttatcatccacaactgctctcccaaccatatcaatgtcatttccgagctcatacttcgccttacagttgaagcgaacggcggcgcaaggagagcgaatgaaggaaggaatctctatcaactcggggttactagcgctcgggaatgtcatctcaaccctgggagatccctcaaaggcgaaagccagaggagctagtgagattgtcgttcaagttgaattgatttgcatctttccgtttccatcgttgacaaacaaaatatttgttttccaaaccaattcacagcgcatattccctatcgcgactccaagctcacccggctacttcaagactctttgggtgggaacgctcatacgcttatgatcgcctgtgtatcccccacgttagtgtttggcagcgcaagttcttccttccgttctcaatgttgagctgaaacgtctatggctatacacgcattatcttaaacagcgaatataacttgacggaaacgctcagcacaatcaaatatgccaatagagctcgaaacatcaaaaatttggctaaaatcaacgaacaagaggctggttgggatgatctcgagcaccttcaagctgctctaataaaactccgtaaggagcatgcggcattgaaagtcgctgcctcttcagccggaattgctctttctactgagggcaatgcgtctgcctcaacagactctgtcttaacagagggtatcaaatctagtctagcaactgattcttccttcgtgcggctatcaagtcaagtctcggatttgacagagaagaatgcagacatgagtgatagatatcattcagcgatgacagaaatcgcaagattgaggagagaggtcgaagaagctaggttgggagggcatgaggcgtctactggattcgcagagatggttcaaccagtgatcgaagaatacgagaaggcaattagtgggttggaaaccgaattgaagctttcaagagcagctttagtaagccttgtttctttcattttgaagcttttcgagtattggttttatgtagctcaatatccgatgactacgtgatactcttattcctttcaggctcatacaaacgaattctgcaacgaccaagaacttcaaatctccaatctttatctactgcaggctcaggctgacacctacactgccgagcttcgggacagaattcacaaactttctgatcgggagtctttgaccgagatgctcattctcgatcttgaagccaagatcaaatcctatgcggacgaagaagaaaccgcgtctactaagatgtccgagctcgaggatgaagtcgcgcagctcaaaaagttgaacactgataccattgaacagattgctgagttgaaccttcgtttagctcaggcggacgagtcaaacgaaggcttaacaacaaaggttgacaatctggagaaagaagtcaaacgccgcgaggtgatgtgccgagagttggaagacagacttgcatccgtcgatactccgaacgagaacaaacgtcttttggcggagcttgaccagaaaagctctgtcgcggccgctttgcagcaggagctagcagattccattgaagaaatgaagcagcttgggaaagaaagatctcttcttttggaacaggtaaaacaaaccgaggccgagcgacagttgttgcaaggaaagctcgcagaatcacacggtcaatcggaagacactgctcctgctgcttctgagacttcttcttccaagattcccgaaattgtcttgcatggtcaagattcctcgctagacaccggtctcgttcagttgtccaccacttcttccacggtcgatagtctggaacgtcagttgcaagaccttcaggtcacacacgcaacaacattgattgagttggagaccatctccttgaaatatcggtatgtcggtcgttagtcattattcagtcaacgtttcattcactcacaatctgatacctggtgttatagagatgcgctcaaagagatcggcgacttggcgaagcaagtggacgataataaccctatagtcggctcacgcgctatcttccgtcgctcggtgtctggctcctccgtctcctccaatgacccggcgaaggtaccccgatcattctcaagatcaaattcgtcagaatcagtctcaccaggtccttcatctcgtcaacgagttggaggggaccgaggacgagattcggtccctattttgtccgggtcaaatctcaccacaccatcgtcaagcggccagggttttggcttcaggggaagtgggcaacagcaatctatgttagtataaccagagtttttcgttctagttttattgaatttcaaccatcattcgagacgtcagtctgacatacttgtgttccatgttcacgaacacaggcttatgtctccatcgcaggaggtacgttagcgctgatatgagaactcatacgagcgaaaataataacacaattgtaccttcatcttgtctacattggtctagttatcttcatcgcagccgtcgcgttccaactgggccgggatggctccgagcctcctgaccacttccccggtacaaacaacttccgctaagattgagcgctccgctcaatcttttgaagacgaaatcatgagtttgcaaaatgtgagtctattgaatcagaggatgatgttcgacgatactgaattggattggccatgtttccgtgattggttttaaacagagtttgagatcacgcgatgcagagatttcccaattggaaaacgatttacggagccaactttcagcatcaatatcttcctccccagtcgtgtctagttcaaactcagacggcaacgtatcctccgcctcccacacatccggattcacagcgccctcatccattgacgatagcgagcaacaaagatctgtggttaatgagctcatgaagtaagtgcatctcatctgtatacgttttttttgactggagttgatgtgttctgtgcgaacgttcaggtcgatggctcaaaaagacactttccaccgagaggctaatgaatcactgcaggcagaggtggataagctacgtcgtgagaacgcagagatgacagcattgaaccgtgaccaagtaagatatattcattctcagagtttttgtttaagtagctctgaacgtttttttttcttttttaggcattaaatgtctcagcagagcttgaagcgctacgcaaagaactggtcgccgttgaagatcggtctgaagatttgatgaaccagcttgagaaatctcgccatcgagagcaagccttagcatcttcagaagctcgaaccaaggcggagcacgaaaagcacctggcgtctcaatcagaggccgctcgaaagcaggctcagtcgtcaacgtcaatgattcgtatcgttaggcaagagctagctcaggccaaggttgatcatgatgaagataaaattaaacatggttccatggcagtcaaactctttgacgagcaccagaaggcaaccgatgcgttcgaagaaaatatcagaactctgaacaaatcgatacaagcccagaccgcgcttcacaaagtacgtcttatctcttggttgttatattatactgggtcaatcgttcccaccttgactctgtaactaggttgagctggacgcagaggttaggaaacgatcggatcttcaacgacaactggaagagctgtactctacccagtcatcatctcgagctgaaaagatcttgattcagacggcccatcaggaagaagttcaaaggctcgaggatgaattgtctagcacgttcgatactattcgggatttggaggatgtcgttgctgaggaacgaacacaacaactgtcgacaaagtcagagcttaacaggctggtagccaaggtcgaaggtctcgataaattccaacgggaaacgatggatatgatcgctgctcgagatgccttgactgggacgatcgaggcgcaaaaatcggtgctcagtcaacttcaggcggaactcaagcgtggtagtttcgagatgattggtctgaccgaaggacgtctccgacaagatatgatcacaagagaaagactatcaaggtcggtggtttgaaacatgtgacatatgggtgatcatgtactgactaatcgtctatgttgaatcgtcacaggacaagttcaagcaatctggccaatgatgggccgttacagtcggacagaccatcttctgaaacgacaggtcggcgaactttcattccagaagaacaatcgcctcaactcattgagcaactggatcagtgcaaacagacgattatcagtctcgagaaacgactggttcactgcgaatctgatttacaagccaacattgatcttgtcaacgttctcgaggcatctcttgtatgtatcgagttcatttcttcttgtttgtagaagtatgtgcgctcacaagaatgctctccctttgacctgacttagaatgattccgagcgagctctccgtaaggctcggctgtctgcaaacgatctttctaaagaacgagaccgagcggctgaggaacgtgatacgttacgttctctcctctccagcgctcgagccgagtacgtacccctctacctttactttcgccttccttttctcccttgtaccagcattaagaagagctcatcatgtcgcatcacattcttataatctagagttctctcggtgaagagttcaattgacgaggataaccggcgtgctatcatcaagacggagaatgagcgggcggagaaagaaaacgcgaaaaaagagttggaactcaagttgaaggagttgaagaaacggaaatcaaagttcaatgttcgtctcttccctatctctgtcgtcttttcattctcaagacagtcattctcggtgtgcgtcgatctgtttaattggaagactaattttgcgcatgtttacctgttcgttcgttcggaatagtgtttttaaggcaaaatctcatctcgtacgcgtttctaccgggcaccgtgatctttgtgaccgttttcttgtctcgttctatatctttcatccttctctcttcacggctggtaataccatgtgcaacccctcttatctcgatggacgattcataccaactgtcaattacgtcaggcacccattcgtccgtccgaacgaccgaacgaccgaccgaccgaccgactgatttacgatcattctgtatatcctggactctgttatctttcctcttccctctttgctctttttctcttctctctctaagccccctcttttttgtctttattgagttttaaactattacgatgcgcacttcttgatgactgaacgaattgatataacgggaaaaaagaatatagtagagattacatgtatctaagaaagagcgaaaacaatccgaggtagtaagtagaaggaaacaaagtgagacaccataaaaagacaagaaagatgggaggggggagaagaggagaggacaagaccgatagatgaaagataacgaaggagacgagatgagatgagatgagattaagaaggaaaaggaaagttagaacagaaaagattaaggacgttgtaagttggacgaccaggccaaacggacgtaacgtgtcgaaaccacatgccgacagcaaaaggtggatgaaatgaagagatcagatagtatgaaaaaagggagatgataggagtctttccggagacaattcaacatgagacgaaaatcaaacgaaaataaaaagatcaaagtcaaagttgaaaaaaaagaaaaaaagaaggataaagcataatctatataaggcgattggattggaagaaaaagaatcgaaagaaagagagaaagaaagaagaaaattgaagaaaaacaaaagtgtccacagggcgtagaattcaactcgacgttcgctctcgtcgatcgagatacatcggcactcggcatctggaccctcccggggtcccagttctctctccgactgctactcaaagctcccgttcataatcaggcgtgcgtaacggctgaccaagcatcgggattgctcgtatcgagccttttgcgatgtctggatccgagtctggaaatgtcggtcggtgtggtggtgagtatggttctgttggtggttctctattgtgtgcaataaatcgaggaagtatttttttttcgtatttttgattagcctcagagaacaaggaaacaaatgaaggagaaagtaaaaatcgaaattgatgaacgaacgcgaaatagatagcactgctagcaggatatcccaactctccgaaatttccggatccgtagatactgactcctctcccgttgataccgtcctcgccggagaagccgtcctgcccgtaattatcgacaagctcctcggcatctgcgaaactagcgtttccgtcctcgccctctaccgtgctttccggttcgagatgtgatcgggcttgagaatactgggaggaggtcgagggaccagtctggtggccgctgttgctaccgccgacatgttctgcctggaaagaacgatctcgttggtgggatacggtgggaagatgttctctcgacggaacccatctcggccgtggtctggtagagatcgacgtcctggtcggcgattcttccgagctcgagcccgagaacgacggcctcggctggaaatcatcagcgaccgcggggccgccgctaccggagctggcttgccagctttcgtcaccttcactagaagcaaacctcgagtcgtccctcgggaaggtcggtcgttccaacggtccggtctccagctctggctcttcgtcctcttggacgatgttgaaaccatgcggataggaagcatcgccgaatctcgacaacggggaagcgatcgaggtgtttgatccgaaattatttgacgacctgatgaacccggccgggccgacagcattcgacagcgaattggtagatgacgaggccgagggtccgctggctgctactgctgctgcttcttcttcggcggcgtccgcgaaggtggacgatgtgagatctcttccttgctcggtgataggccgagggggtcccaaggagtcggccgggagcggatctctcgaaccgacgtcgccactcgtccaacggaagctttcggaggactcccaactggctctgctctcgctatcaacaccgtcgtcgaacgtggtcgagtcagaatccgtcgggtctgggggtgaaccgggttcgacgggtccgagcggttcgggaacaatgacgatcgagtccgaatggaccaggtttccttgatgatcgaacgcctcgtccgagtagatgacacttcgaccggaaagggttctggtgaggaaggagctgacgagacctgaagaatccttagcgatcatggccttcgggtcctctgtctcaccggtggatgcgaacaagccattcatgacgtcgagccgccttgctccgtcttctcctagggcgacggtatgaagaccgttaggagtgggcgtcactctggatcgagtggatccaaggggaagagtcgggataggtgacgaggtcgactttcggttgttgctcaccgcaaatggatccggtccgaggtcaacattggtcatttcgccctctgcgttcgtaccaccggttcccgcggctgccgcagccgctgccgctttcgatcgggtctttctctcggtgtccaacgcgtctttggaggcttctactttttttctagctcgtcttcgaatacagcagaatcccaagagacagagcaggatcaaggcgacggcaccgccgatggcgcctccgatagcggctttagctcctgtggagaggccaccggtggaaggatctccaagaacagtcgaggtgggggaacccgagttagtggtagtagtcgaagggacgacgttcgttccgataagcatgaggccgagactggcctggccggccaaaccggtactcgaatctgtggcggtgaagatgacttcgataaggtcgtagtctgccgacccggggggtacgccgacaagagaacctgaagacttgtcgaacgacagccaatgctgggcttccacaggggagacctgggcggagagcgtggttactttggagtcaaaggacgactgattcgttaggtgtggggggacagagtaggtgaacgagctgttggcgaccgccgttgtgtttgcgaggacgaacgaggagaacgggaaggggtggatgtccaaaggaaggacggagaggtaggaagcattagtgctgatggatgtcaaggtgataggcaaattgatcgggaggagtgttccgttgatgtagcccgacggaggggtccccgagagcgtttggttggtacttttgggaagagaaagtcgaagtatagaatggtgtcagcagcagagcataaagagcgaaagaaaacaaagacaaagacaaagacaaagacaaagtcaaagataaggaaggaaaaaaagaagaaaaagacaacgactcacccatcaaacgaaagccaatcctcgtaaccgacgaggtcgaccgaggcgacgacgtcttttctgtcgatagtgttgtcgtccaacctgaggccatctatctcgacctggtgtgagagcggcgtgtcggcgagacctaacgcggtctgcaggttgtcgatgagatccaaagcgtgtgtgccgatctcgatggtgagggtgtccttgacgtctccgaagccttcttgttcggagccgaccagaacgatgttccaaacgccttgggcgagaggggccacgccgttaaaggtcgcggtggtattgtcaaaagtgagccaggcagggagagttgtcgaggcggaggtcatggcagagtagtagatcatcttgttttgggtagacacaacggacgagcggacaaagccgagagagaacgaataagccgggtggatgagaacgccggtggtggaggcgagcatggtggccgacgagactgactgagtgttgttgacgagctgggaggccatagaccgggccagataaggcggtgggctagcaatagtggtgaggttgaaggtggagtttgtggagagcgtgccctccgaggcggacagggtgatattgagcgagcctatggagtcggtgctcgaaggttcaccgtagaagacgaggtcgagtggatcaaattggagccaggagggaaggttgtaggtggtgtaatttaaatcacgcgtcgaggccgaaagggaagaggtgaaagtgccgggaagaagagtgaagttgaaggcgtggttgacgtgagcgatgggaggcttttgggtttggattgggtagacgagaacgggagcaccggaagaggtgtcctgtgcgacgaccgacctggccatggacacgaccgacgcgaccgcgatgagccaggagaggatgaacatgggaagattgacgatcgagtaaggaaggggagatagaaggagaggacgacctgaagagacctgggctcttgaggatggtgtgaacgcgggtgaatctatgagaattcaagcttcaagctcgaagaaagagaaagacaaagacgcgtcccaaggaacagaacagaggaaggctatagaaaggatggtgagagaacagaaaggtgaccactggacggatggcaaagagaaaggaggaagaagaagaagcaaagagaggcgagttagtgaggaagctctcctgagtgggcgattgttttcacgcccacgcgtacaaaaacacacacacacgcacacacacggcaagagaacacactcaccaagcacctcacagacacagatacacgcacacgcacacacacaaagagacgtcgatgctggaacagacactggcgggtcaacttctcgagtcccaagacggagggagaagtgaaaagtgaaggcaggcgtgggcggaaggcgcagcagaggaaaccatcacaacaagaaggtgtcacgtgacgtgcacagctgttaagcaggctgtgtaaggggccgggttacagggttacgcaaggtgactgtagttgactagggatgctcgaggcgtggaggtttaggcttccaggctcagggaagagaggatgaatcgtgattgaatagcactggtagctactaggttatttaacaaggatcctaacttgaagaaccacatcttgaaggagcgcgcacgcgatccttttatgtgttctagctacgatgaagtggcaaccaggtggccactcgattactaaactacaggattatcaactagagattatcaagcaacagatcactaatccatatcgctaatcctatcactaatcaagggaacgtagctgagaaggattatcaagcgcataaggtgaggagaaggagcataacgaaatggaaggcttgatgaataatggaatgtgagcatggtcacgctgtcgtgtatatgttacctaactctggttcctgacaggctgtgtcattcaatgtggcaaggtgcccggcatgtatctcctgggggaacatgcgcggaacacatggcttgtagactgttcgccttgtaagagcttgaggttctacctttgcgctcgcctctttatgagttgttcgcgttttgttctttcgatgtcagcgtagatcaagtctttcagatgtgctagtcgctagaacgctgtgagcatcagtcagcggcgctgttcgttcatagtatcgatgacagcgagtatatatgggggttcgtaaatcatcagacatatatagatatacaagtgaactcatacagacgatctctcagtctccgcaagaacatgcatccagccctcgtcagtatcagtagggcaagtttgagccgtcgtagctcaaaaactttcctccatgagactccctagtagcctcgttgacgaccttgaggatcgcttccgcactttcctcaaggctgatcgtttgatttgcaaacggattctctttaccatcaggaaacagttttttcacgaccgcatcaaacatatcggttttgacggtacctaatgaagagaaggaacgaagaaagaaacagtcaagtttagatattttttttcctctttccatctaattggagaagcgtaagcgcgcatataaggagaccgacctggatgcagagggaacgcgataagtccgaagtccttgctctctagatggatcttgacggttgcatagttgaccgccgctttcgatgtgctatatattccaaatggcttgtcgaactgaggagccagttccaaggatccagcgattgaagagacgacaataaatttggctgcaaccttcgaggcccgaagaagtgagtagaactccttgtagagcacaacaggtccgaccacgttgacttcgtagtgggcggtccattgcgcaggatccgactcgtgcacaaattgggcagcttcaggagcaccaacacctgagaacgtttggtggatcaatacaacatctcgtcagtaactagtttcaatcagagtagctatttcagagtgttacgccgtcgaccagacaacgttatgcattcacccgcgttggcgatgatgacatcgactctgccggcggccttcttgatctcctcggctgccttgtggttgctctccgtgtcggcagacacaaggccgataacgttgatcttggcctggctgctctttgcgagctcgtggagggcagtcgccttggcaggagtccgagccccggcaaagatgacgttggcagggttgctagcgagtgctttgacgatgctgaggccgatccctcggttggcgccggtgactgcagaggcgaggcaaggtgagacaaggcgtcggggatggtgtgagcgcggtgcgagaagagaaacccgcagaaaggcaaaagagacgtcagaagagaagtcagaagagaagcaggtaagaagcacgcagggaagcacaggactgaccgagatatacggtggtgtcggacatggctgcagaggtatggcttgttggtatgatccgagacttgacgggtgatgagtgatgggtgataggtaatggacagtgggtgatggaacaggttgagtgacggaagacaagacgagcagagtgacggatgacggccagatgtacggtctcgttatatatggttgggcgtgttgagacgatggcccaatggtcaacccggtagccaactctacaagtctggttgaaatgtcgtccgggcattgcttacagatcaagcgacatgagccggggatcagtgcaggacccacgccgagacagatcggtcaaaggacagtgcttattcaatcacattcggtatctaggatttatttcgggtgatgctcggtcagttctgctcatccagcaggtcagcatgttctgtgatcaccgagcccgactctgtcgtgatagtctggggacccgatggagcagactgcatagctcagttgactacatgcgacttggtcaaggttgaaaaggcgatcgtcgattaagagttcgtctttgggcgtggccggtgctgataacgggacgggcaacggtatagatgacttgtcatgatctcgaggactgacggtcagaagctgaagctaattgatcaagttcaacgaagacaggagcgcaggtaaacaagattgatagtcagtacaaaaaacggggaccaggttagcagacgatgaacaagagcatagacgagggattcaggattgatatggactacgctgtgtctagcggaggaggtctgtcttttatctgctctatccggttcaaagactactacggtacatgctacatcatgggttgcgaccaagttcttttcagatcacaatccttataccggacaatcatgaaggcgtagccatgcagattcatcgatgattcggtggagaggagggatcgcccaggggccagggcagggggagggagagggtgtgcagcaggtgaagcgcagtaacaagcgctcaggcacagaactttaatccgagttccgaattccccttgattaggaacaactttgctggggcggatgtgcctatgacaggaacggatgaac

SEQ ID NO: 633 - DNA, 22183 bp, Xanthophyllomyces dendrorhous
aaagccacaaagggactgcgggcgcccttaccagcagcctttctctgggtgttcctgggcagccctgagtgttcgttcggctgagcagaacacactacaatacacacaaggacagctctctccttgcacagccctgcgatccacctgccaccctgtcgatcaccccaccgctcttctgctcttcggccgagctgtagtcgctgcctctttgccacatcacgtgatatatcaaacacgtgaccatccttccaatcaaccttctcaccatccactcgatctcactgctctctcatgtctttgctcaccatgtgtcttcgtttgttttcttgcgctcttgctgtttcgatgcgatattctctgtagtgatggagctgctagtacgcgcaagttcgtactgagaatcgtatcgtaagagggtcatcgttgggccagaatacagactccaatacagtcccttcttcataaccccttccagtacctctggtgatgtccatcgatgataacgcatgccaaccgtgaaacaaatcgaagcatacaccgccagacccaccaacaccatgtccatactgttgcgctcttctaccaccacctcgctagtcaatcctgacactcccccagccgcccaacaaacgcagacgaaccgagaacacgcgggtggccacgtgggaagcacagctttccatcggctccctccctcgccgcttctccccggagatctctaatctttgagttccatcaatttcctttttctcccccccccccaaatttctgtcggaccatcagctttttctttcttttcccccaaagtcttttcccttcttacctctaactcgttctgtttcatctctttcgctggtggttctcttcctcctgtcatcgacccatcgattgatcgttcagtcgtctctttaacccttcttgcctttcctaaccatgcctcgcagattcgcagtactgatctactcgggaccgggagtgtcggctacatgcctcgcacaaaccactcactgcttctcccggatgctctcccagcactacaccgtctcacacctcacgcctcactctctcctggcggacccatggccagcatcctgtgcgttgctcgttctgcccggcggaagagatctgccctacgttgaacacattggcgcctacgggaacgcccggatcagagactacgtccagtccggtggctcctaccttggcatctgcgctggtgggtactatgcctctgcccacgtcgcttttgcccccggagatgccgagctagaggtcgtcggcgaccgggagcttgccttctggcctggcacctgccacggaccggtcttccccgggttccagtatggcactgagctcggcgcccatctcgccaacgtaggcgactcggatgtcgatcctgccctccaagcgacctgcctgtactacaacggcggaggtcactttatctccccccttccggatggtgccatgcctcccggtgcaactgtgcttgcaaagttcgttgatcacccagacaagccaaacgccgggatcctcatcaaacacggtcagggaaccgtcatccttctcggctttcacccagagtacaccctgctcacggagccactcaaaaagattctcgcctccatgccgaacggcctaaaggacgaagagcacatcctcgccgccgaggaggccagacttgacctcgtcagaggctatctcgctctcctcggtgtccatccgcccccgccgttgttgcccaggccgataaccagcactgacggtgcctccgcatcagacgacccagccgtcgagtttgatctcgaacacccgacgaagccgttgccccaggttctcatgacccatccaaagtcatccgccatcgtccagtccatcatcgaggcgctcagcccacagttccaacaaccagaagacgatcttcccgaaacatcttcacatcccacctctgtggcttccaccttggactaccaacctctcgtcctggtagacgccaacgatactctccatcactaccaatcctccaatcatccttccatcaaggacctcattcattctgttcggtcaaccccgctcaccccagagcaggccgccaacatggacgacctcctggtcaagcatgtcgttctgtgcgactcgcctgacgaccacaccaaggttatcaacgaaagatggacacccctctggaactggcctgctttctggaaggagctcgatcgaaagagacagccccggcggtccggtgtcgatcccaagacctggagactaggtgacgcaatgatgtatgccgaggcggtcaccagtacccaaaccatgctcgacaagtaagttcgatatacaatctgattgcgcctgtcgtacatacatcacgcctggtacatatctgcaaagaacattgagattttcatacgtcctaccttttaatcattttgcagaaatcccaaactgctgttggcgctgcccaccccgatcatctcgttcgcgagctaccaactctctggaagaggcagaggaggcaacgtctggctctcacccaccggctgtctccagttctccaccgtggtctctcttccctcggcccaagcccagaaggtcgtgttcgtccaatacctgatggctctcgcaatctgcaaggcgctcgatcccgcaccgaactgcgcccgggacgaaggcaaactccggatcaggatcaagtggccgaacgacgtgtacgtgatcaccgaaaaggacggaaaggaggaaaggctcaagctgggtggagtcttggttcattccaactggtgtggcggtcaattcaagttgatcattggtgagcttcatctggctttaaaaaaaaaattaaatctttgtccttagcttgtcatcttactaacacctcctatcgtctttaaaaggctgtggaatcaacatccttaacgagcgcccaacaacctcgcttgtctcgcttgtcaaagactacaactcgaaaatcccggccgactcatccgaagaacccatgcccctacccaccatggaaagctgtctcgcccggatcgtcgcccagtttgaaaccatgtgggacatcttcctccagagtgatcgtggcgggttcgcagagttcatcaaggattacgaagaccggtggttgcattcgtgagtgtttttcaagtcctggtggaagctagccatcatgagcgtgttgcttccacgtctgacgaagaacaatctgaatttatcctcctacgcagagaccagctcgtgcatctccagtcgaccaacccgccgacggccgtgcggatagagaccatcacgctcgactacgggctcctccggaccaggcccgtccggaaggttgactacggaggcgagtacgacgcattcgaccggctgagtctcgcaaagaagaagaaagcgccagagcccgagtttatcgatctgcagccggacggaaacagtttcgtgcgttcccgagatcttctcttgctttctctctttctttcgtccaatgttccttttttgaactcgtgctgatcttttctgatccctttctttttattttcttgtggctgacactttgatgatcatctgtgctggtaccgaatctaggatatgttggccaatatgatccgaacgaagtaaagaacatgagaatgtgtgcgcgtgtatgtgcgtgtgtgtatcgagtagacttatcagaaatgagcatttcaaattcaaaacactcgaggtctttgttctgtcggtctcatcagacgggacggacccaggatgatttccgactgtacatgacctcgtctgactcgatagcccttctcttgataataacatatattccctctcaagcgcgctacaaaagagggagaaaaaagagtatactgtacaaagagtataacacaacactaagcgcaacagattgaaaggaaaatgaaaagcggacagctgctaatcatccagatcggaattcagatcaaagtcaaagatctcgtcgttcatctggggtcgatttgtcgaaattccgttcatcaagtgagacggcaaaccggactgtaatgtctgtccgtcaggcactattcgagaggaaaaagaaatgcaaagaagagtgaggactgatcaggacgagaagcaatacggcagcaaggcaaatgggcatgggaacgaaccttcagaagtgacacctacgacccccaagccctcgcccagcccaagtttccctctccggagcgtcgactctggcgggaaaggcggtcggaatattccactcggcggtagcgacgggtcgaacgagggcggggcggacgtgtagggcgcgagagacgaggcatatgcgagcaccgtcggtggatcttgtttgtctgtacggtgaacgatccgttatcaccagatatcaacacggtgcctacagaagatgacctctaacacacaagagagaacacagtgggcggaaagacgaacgagtgaaagctgtatcgatcgaccgaacgacctccttcccttcttccactagttctctcaactctctcctcccgctctccatctcgatcaacaccttcctgttcccgacctccaaccgttcgacctccttcttcaatcgctccaaccgactccacttttcttgatggattcgagcccgttcacacagcgtagctagcgatccatcgagcgcggcgagctcagaatggatcgtatgcaacggtggaagatgtcgactcgcctgggttgggacagatagatgcgaagctgctgctatcaagtgaggcaagagtgagatttgacgagagatattgtcgatcagcgatgtctgaacagagattggctcggacgtctgcatcctttcctttcccaaaagtgattcgcgacagtcggtgttgtatgtgttgattgtcgtcgtcgtcgtcgtcgtcgtcgatgatgaggaggaggaaaagatgatggttaaacattagaaaaaaataaaaataaaaataaaataaacaaaatccgaaatttccagattgtcaatttatttttcatccaagaaccttccatcatccggtgtgcaaccacgtcccaacagcccccttacattacttatcaatggagccgacaccggggaaagacgttaaacccaggatcccttctgcgtcgtcgtcgtcagcagcggcagcggcagtgtcagcagcgaaaccgacgatcgtagggaacaccgtgcccagaccttcggctacaactgccactactagcaccagctcgactggtcctgccgctcaagctgggaaacccaagatgatgttcaagcctgttgttcccgttcgaaaaagaaccgagtatgttcttcttttttctatgagttacctggagttcctcttgcttcacccttcgtaccgctctgtcacgtcgtcgggccggatggaagaccatagtgacttcattgtcgtgcaccgcaaaataaggtaaccaagactgaaccggacatgcacaaactctttcttcaaatgaaccaaacagaacggcggctgtccctgaaccgacggcctccatccggacgaatgaccgaactcgaggcagaggtagtcgaggtggatctggagcgtctttcagagggagaggcgccgctagttctgccagaggtggaatcgcacccatgactgccagtggagtgttctccatgggtccaagtaacatcagttgagtctataatcatcatttatgtcttttcttatcttgcatgctcatcatttaatttcctttgcttcgctccgcttctctcctctttcggacattatcccctgacattacaggaagcaagaaatccatggtccgaacgggtcattcggcaggaagcatgctcgagcccggccaagcaccggtctataaactaccagaagacagaaaaccaaacttggaaggggaggaagaatattctgatcaagaacaaggagtcgagatcgttgacatggggcatctggagagcttggatgtcttggctccgaaagggttgaagagagacccggtcagatctagctcgaggaaagaaattaaacgttcgttcgaatattctcactctcctcatcctttggcatgtagatacttcttgccttgttatatctgctgatatgaacatcgaatccagaacacatcaaaggaaagaacagagcgcccgataccgatcgaatggacgtcagcggcgatgaagctgacgagttggtggacgagattaatctcggtcaagccttggatctgagcgagagtgaagacgaggaagaacacagtaatgttgctggtgacttcattggctgggatgggcaacctgttcgtctttctctcttcctttttttttctaccgctcatcttgcttttctagcttctgtccttcttgggtgacaatatgaatagagctctgacgatttgctacatctttcactcgtcaatctacacaggttccaccagatcagctttactttttccaattcccacgaacattccccacgttccttccccttccactttcagatccctccagcgccgaccctctcaccacctccacaagcccaaagaaatccagtctagaaacctccgccaaagactctttagatgtcgacatgtccgagaagaagcctagtcgagaagcagaagtaaaggaagagaaagaagagaaggaaaggatgcctgagggtcaggtcgggacgttgttgattacaaagaaaggaaaagtgaagatgagactgggtgatggcttcttatacgatgtcggtctctttgctctttttctttcatcatcgtttcctctaccttctgtcagctaatcaagtttctgacctcctcctttttggaaacgccttgctcgatgatctcagatcaacgctggatcccaccttgactttcttcagcaattcgtcaatatcgaccttccctcaaaacgggtcaccactctctcttcttctgctcctactcctcgattcatcgctacgcctgacatggacgagctacttcgactgttgtccgaggagggtgatgcctcgtctggtggaccgaacggaaagagttcgaatggaaagagaggaaaaccaaagggtggattgtcaaagaccgaggtggaaacagaagaggacgggttgatgacatttgatgcgggaagtgatagtgaatgattttatagcttttcgctcgatctcggatccctgtgtttgtgaaacatcctgtacatctttcttgtgtgtctagtccctctatctggggtacacgttgacatccaacgttgaaatttgggtggaaaaaatacatgcaatgccaaaaacagttcgtccttcgccatccccgtcgactcctctgatatgcgacgcatcacgttatcggtctgtgccattcacgcaaacgaatgagtatggacaaagatgagtcagttgggggcccctgaggaggtctctgattgaaataaaaatcaactcacaaaactccataacgtcgtcgcccttcctgactgtactcttgtaggattcttcgaagtctaaaggcagaattacataacggttcttcctcaccgctgttacatgtgcaaaaaggaaagaacgtcagcccaatcctacgtgccttctgaacaatagaggggggagagaaaacaacagaccttgcaaaccagctccctgacaaatactagcaatctccgccgatgataacttatctggtcgctggacatctatgcgtatgccctctcgaggtcacggttagtaatcttgcccactaaagtgacagaactcaagtgaggagaaagagcacgaacaatcttccaggtcgacatctggcgccaagttcatcgttgatgttaccgtctggaaaatcaatcgcttctctcgcctcgaagggttcgggaattcaatcttcctgtccaaccgaccgggtctcaacaaagctggatcaagcgtgtcttgtctgttcgtggccatgataacctatttgatttggtagtactcgatagtatcagttacgattcaacaaactcgagaaacaatggagtattacgcaccttgacattggatccctggtcaaatccatccatctggttcaacaactcgagcaaaatccgctgaacctctcggtccgctccggtctgagcgtcgaatcgctttgtggcgattgcatcgacctcatcaatgaaaatgattgctggtgcattttctcttgccaaccggaagacatctcgaaccatacgaggtccctatagtacaaagaaggcggctcaatgttgagcaagcgttgaattgcacctggaagaaattctagaaaagactgacctctccaaggtacttttgaacaaactcggaaccgacgactctgatgaaagaagccgaggtcgagttcgctactgctttcaccagcattgtctttcccgttccggggggaccgtaaagaagaacacctctaggaggatctataccgatctttttgtataggtcaaactatgaaagaagtggacagtgggatcgaaaatcagaagaagtcaggcgatagcggcaataaaatgttaaatatagacccacctcagtgatggctaactcgacagcttctcgaatttcctgcttttggctgtccaatcctccaatatcggagtacttgacatcgggccggtcttctgctcgcaaaagagtgattgatctacgtgttgtatgcaattaaagtccaagagtgggtattgcgatcagcatacatggcccgatattgacattcgaacggcagagacatacgaatcagcctcaggaggcaggatatcaaccaaactgtgagaatgcctgtgaagagccacagaagatgacggcttgagaagctctcggtcgagcgttgataaaattcggaccacatagtttgatcctgtcgagccatgtattaaaagcatcgtccaagtcagccagcgttgagatgaagctgagataagtataggtgaccgacctgttgtgcttcctacaattccgtacttctcatcgatagcctccaagaattgaccgatcaccagaggaacggcctacaaaccatgggagaagaaagtatatgagcatgtaagaatgatagatggcaaagaagtagcgaaacagagacactgccgaagaaattagctcgtacctggatacgtttaacttcttcttgagctcgaaggagctcacgacgaaggttgtgagtctcgtagatgatgtactcctggagatagcaaaacgtggaaccggaaaaggttgagcattcgtggagtctgaggaaacgatgatgatgatctttggctccctctgtaatactctacatcacgcttgatcgcacgcccttcgttgatggaagcgtgaaccaagataccaccgtcaccattcattcaattgtgttgaccgacatcgttcaaatgccaactgccacccagatgtcggcacccaaccatacggagcggcctgaacaagtaagaacgatcgaatgaagcactgcaaaacgaacctcttggagatctagaaactcttcatggccctcaagtcgcttccactttgcgtaaagctcctcgtcctgttgaggaagtgaggcgagcaatttggatttttcagataccactgcaggaaacgttgggtcctgcttggacagctcgatgccaatctcttccattatatgcttagtttgatgacagttagaaggaaggttgaatggcttgaggtgttgtgtattcgatgcgagatgggtcggaagggtcaaacgaaaagacagagagatgttggtgaggtggaactcgagacactaagcctgacatcaagccagcgcgagactggcatgagtgccgagcctctaaatgactgactacaaatctttgtagtcacctattagagaaagattgtaatgatttatggaacgagaagaactacaactttttgtaatacgtccattacagaattctctaatgacgttctaccttctcaccatcacaagtacatacacttcaaagctgacctcagagcatactcacaaaactcatcgagagcacatatagacatctttgctcactatcagtcttttgggagttgcagttgctacagtttcagccggccttggtatgtctctcttgtctaaactgtagagagaactagcttgcaaactcatcatgttgctttcatcgacgagttggtgaacagtcctcgtccgagttggtcgtcagcacaacgcatcttgaccgaccatcgggaacccagcacttgtacatggccgcatgcttcggtctaacatcccgcctaaaccttcgctacactttcccttaatatgcgccgtcctattctgctcgctcaagttcctttgcttctcttcgtctactttctagccgcccggtcaccctttctgccctcgtcgacgcaacttgcgtcatgggcttgtcgaatgtcttggatgtccccatcctatatccacataactaccttcgacaaaaccgttcatcccatagccgataaatacaagctctttctttacagggaggttggttgggatggagatcatacagtgcgttcgtctgctatcttctaaccatgcgtgtgaaagtccttgaactcaactttgatttttcaaactgtgcaaaccaatctacaaaagccggacggtcaaccagtcttgtacataccagggaacgctggttcgatgatgcaagttcggagtattgcttcgtctgcctctcgtcagtactggactgggcccttcatttcaaacaaagcgttcatcgaaagaggaatcaaaccacttgactttttcaccggtcagaacccataactctttacattttgtgtttcctgagccacactaaacttgatcctctcatctttggaactcagccgacttcaatgaagcgctttccgcttttcacggcccgacgcttctgtctcaatcgaattatgtagcccaggcgattcctcacatcctctctttgtatgatcacttgccctcttcttctcggccgacatcagtcatcctcttgggacactcgatgggtggagttgtggctcgtcaagccacccttcttctctccgacccatctcaagttcatgtcatcttgaccctctccacgcctcatagattccctccggtctcctcggatcacactatgcagcagatatactcctctatcaattctcccgtttctcattcattaaacgcttctctgatctctgtctgtggaggatctgcagacccaactttagcgtctgatgcatgtgcgcttcctccttctggtcataacgaccgcgaagatgaaaccaggttgggggtctttacaagtgggatgattgggacttggactggggtcgatcatgaggccatggtatggtgtcatcaggtcagatcaaggattgcccggttattgttagagttcggcgtgggacctatgactgctagtcaaaggaaagaagtggcagtgaagtggttggtgggtgaaccgacaaaggctaatgatctcaaggctcaccaagatcaagacctcgtgaagaagagccttccttcgacagtcattcacgcgggcgaaagattcgaatctagcttatcttcttctcaacagacattcctttaccgcatccctccaaacagcacgacgtttgatctcttgtcaacctatactatcaattctatcggcgccgagtcttctccatcagctcgtatctttcaatgtgtatcgtctgggaaatcgcccatcggtgatatatcattaagatgcgctcagcttcaaacaacaagactcgaacttataccgccgtcaccgacggaccgagctgcattcctgcctggagaaggaattgacgagaaggagggtatggttttctttcagggaaagttagacaggtcgtccaaggagaacccaggcgatcgatggatcttggttgaaacagacggaaagggatggggcgtgcattcttttggtgaaccagacaaggaatcacttcacgtccaaaatgatcgtccgtggagtatgttcatttttctcatattatacttctcactggacgctgtttctgtctccttgatgtttgctgatcaccgaacatcagagtttatttttgggggagttgtgatcgatcacttccagcgcgtcaatagcagattacatcgacaagtctctctaataaatgccatctctcactctttacttgtctacaaagtgtctttctctgggccttcatgcacatgtacgccataggctttgttttgatttccctctgacgtcgtatctgatcagtcttgttttatcatctacaagtggaagcttcgcctcttttccggcccttgctctcacatcatacgatttcatcacatcgtttcaaccacgaaaagtccttctatgccgatccgtcagccgcacctgtctatcttcactctcactcggcgggagtacctttctcatcttcctcatcttcgggctttgtcctggatctgtgggaagacccctcttctcggtgtgttaaagatgtctatggtagagtgaacgaagatgacgagcgacttgtgtttgtccaaattgatgtggaggctagtctggggagagtagcattaaggtacagagcagcggcactaggttggtcggttggtgttgtggcatttgtgatgggaatcagtcttcagcaattcaggtcgagtggttcgttctttcagcgatgatgtgcttgtcgcctcagtcattctactgacttcacgtgggatgatcatatattgcattcgcaggtgtatttccttcattcgtagactctatgtctttcgctatacggacctacaccgttcatgccattctcgcaattatttcccttgcctcaattcaaacaactctctctttcgtctttccaacatctcagcgaacctttgcgctcctattaggtgtgccagggctcatattcgttccgttccatgtagtctgcttgggggtctcaattggtttggtaaatgtgatgctcggaattctgaaagggtgcatttggctcggtgctcgaggattgaatatctggaaaggaggaagagaagccaggtgaggcatactgtacttttttgtacgcgagctcccccggatatcaattctgatgaacaaatcattataccgcaggtcgtccgagaaaaacgatgcatctttcacgatcactcggttcctcccgatcatcgtccttcttggatcggtggtcatcgtactaccttaccaagtcgcctttctggtcctctacctgatccatttccaaaccacgttctgttcctgctccctcaactcttcggtcaagactgccagttacgatgtctcatcgacagaatcggaatcggtttcgagaagtaattttcatatttccctgcttttctttatgctttggcttttacctctcaacggggcggtcttgatagtttgggttagagattttatgagtggttgggtcgaatggggagggcccgaccgttcaatcgtaggtttgatgggatgtttgttgatcgtagaggtttgcgcgagaggtgggttcttgagaaatgaggccagaaagaggtttgtcccctgattgtcacaactcatgtcctcaaactcaacgctgatagacaacctacatgtagcctgctcgttcaagttctacagatcgggttcttccttctttccgcatgttcgtttttgattggcagtcaacatactttccggctctacagtctgtcgaacggtctcttggcgctggcggcagtagcttgtgtatttacaaaaagagcacctgaggtgtcttgaaactagattttatgtatatgtacaaacaaacgaactatgaatcatacagcgatcaacgaatgtaagaggactcaccacgaagtagaaggcatgtgtggcagacatcgatggattcggatatcgccgactgtttaaaccgaaactcaactgataccctcgcgagccatacatcgatcatcatcttccattcaccatctgttgccaatcatccaatccacttcgtttacatgtacggcctaaagcctttcatttttattgctctaccgatagcggcatcggccgtaactcatcaggatgaacatcgattgattcgaggaggagtccctcaaatcggtcgactgcaacatctgatcaatgttgatgagcaagtcaacaatcggccctctgcgaaatcatgggacgatgcatcgctgtgagtcttagcctgttcaatccatactcaaacatagcaaatttatttgaagatatgatttgtcctgataatgatcgtctgtaactttggggcgaatgaacgaatgaatgagcaggcaaaccgttttgtccgctaccggagctgtgggggagaaggaatttcaggctcattgtttttatcagccagtctctcattttatccctgaaacagacgatccattctacagggatgcagtaaaccagactttctgtcaaagatactggtttgatctggaatactatcagcctggaggaccggtgttcgtgctagatggaggggagactagcggggcgaatcgattggacttcttgaggacgggaatcattcaacggttggccaaagtatgctttttccgtttattcatcccttgtcttccttttatgtcacatccctcagctgatgctgccttcaaacctctgtatacaggaatacaacggaatccctgttgtgcttgaacaccgatactatggttactcattccccttggggcccaagtccaacctatcaaccgactcgcttcggttcttgaacaacgaagaagcgttggaagactcggccgagttcatcagaaacgttcaattcgacgggattcatgaagatcttactggaggaaagggtaagaagacaaagtggatctactagttcgtccatttctcgcttcatcctccttcttcatccatcgacttcatatccgaaccgtacaaacacaggcttgaagctgacttgaccgttcctatagcggtgggagttacgccggtgccagagcagctcatatgagaaaactctatcctaacgaggttttcggagctatcgctagttctgccgtcactcacgcacaagtctattaccctggtaggctcttgtcttcccctcgtttactcttcattacccctagttggtccccaaggctaacaataattttatgataccgatccaaaattatacagaatacatggacgctattcgagtttggggtcctcctgaatgcgtgcgcttcaaattttgtttgccatcgccacatgaaaattgcattactgatatattgtacttttatcaatagattggtcacattgaaactgttgttcaggcagttgatacgacgctggaccgtgcgtcttcatcgaagaaggcagctcgccgtgctcaacacctcaaggctcagtttgggcttgaagatctggaggatgacgagtaagcgccctttctctctcttttctaagattcctcgagatatcacacagatgtacagacaattcggttgacctttaccatataactcaataatttcagctttgtttcggtcctttctgagcccttgggttattggcaagcccggaactgggaccccgaacttggttccctcaagttctatgagttctgtgatgcgctcaagaacgtttcccttggctccaccgaagttgtgaaggaagttttgactgtggatgagttgattgcgaactatgctactttcatcaaggtattattcagttttgttcctcttcggtttttttttctttgtaggcgagcctcgttagtctgacgcggagaacggatcgactgtgatttctatagaaagagattcagtcttgccctgagaaggacgataccgcctcagtacaaacaggaaagaaaaagaaactggacgtcgttcaggtgagtccactttccaatcatcgaatgaaaaaattcattttctcgataaccatcatatgctgataatcatacgattgctcgtttcatttctgcatggtaaaagtgcttcggaacacacgatgatgccaagttccaagatgttagcaggatgcagacttggagagcgtggtatgtacccgtttctttctccccaaagaggtcgcgtctgtttgactcagacccgaatgagttttcattttcatctttttcaggctgttccaagtatgtactcaatggggttacttccaaggcgctcgtaagtgaattttaatcattttttccagcatcatgatacgactaataagacaacacgatggatcaacagctcttgaaggacctagaatcatatcccatcggatcaacttgaattacacatccaagatctgtcgacaagtaaggtctttcactttcctatattgatggctcatcgtcattaagctcatcagtgttcgtcatgtgtccatcttcatcaggccttccctgctggagaactcatgactgtgcccgagtggccagatgtaagcgtggtaaacgatctaggggatttcgacctctctgaagatcgattggccatcatagatggggactcggacccctggagacctgcaactcctcaaagtgattacgcaaagaagagggaggatacagtcatcagacctgtcaaacttatccctggtttgtccttcattcaagttttttttttccttaggactaaagagctgatagaatctaccttcatcttttcgatttctttcatcgggccaatgtattgatagacgctgttcatcactacgatgaggtgagctgagatacagccaatcttctcctaatgattgatttccctactaactaggcgtttcgtcccgtgtttgtcagaatggacttgcgaaccccgcttttgagccagagcgtatccagaaagttcataaggagatgatcgacttcgttggagaatggttaaagagcgatgattgatcagcctctctgggtatcaggcgttttgaaatagtatagtctttttggtagaataatgctgaatgaatatgctcttctacgagaaagccgcaatgactgggatccaaccagtcttactctttgaaaccaaacaaatcagaatgatagttgaacatcatagatagaagagagatagaatgttgttgccagtcggagaaggccgacagttcaagtcctcaatttaaacttccatctcttcgcactttctcttaacaccatctacgagcattgatcctccttcattccgatactaacaatgcaaccagccgttatccctgcctcattcaaggcctttaacctggctatgatccaacttgggtcgataacagctaataaatcagcaaatttaatccatgcaaaaaagatgatcctccaagcgatccgaggtcaggaaacggtatctgaaaacgcggatggtcaggaaaagatcgatttggtgatgctgcctgtaggtcccttctatcaaaacttcgccagcttttctctcgaagtgagagattcgattgggagatgttaatttctgttgatccgtcgatgtctttaggaaatcttcaactcgcctactgagtcctcggcttatcgcaagaacgccgagccgattcccacaccaagtcctttatctcctattccatcctcacatctcccatccattgaggaatcgcccactttacatgtgtgtaaacgataagaatcctgttcattcaacatagatatgttgctcaagttggtgaatgaatttttatccgtctgaagctcagatgttatcagaagcagctcgagaacaaggcgtatatatcatcggagggtctattcctgaatgtcaagatggagaagaaaagctatggaacacatgtacagtatgggatcctcagggtaaacaacttgtttcgctttctctctgctctttgttacttctcttctttcttctctcaacattatcatttcctatctttacgaaatgtataggtaacctaatcgctaaacatcggaaaatccatatgtacgatgttgacatacctggtggaatcaccttcatggtttgtttctttctgagttcttaggcggttatatgctcgcgaagtctgtaatctcatctttgttctaatgcatgtgtatgtctatacaggagtcgaaaagtctttcgccaggagacaagataactgtttttgatactcgtcggtcgaactgcagttttcactatcatatgttgcatccacgctcggactcactttgcttagtttttttttctcaactaccagcattcggaaagattgctactgctatttggttagtttttgctttatgttattttgactcaaacaattctctgatctggattatctttctatcatcaatagtttcgacatccggttcccttctctgctgacctacattcttcaggtccatcccgacgtatgcgccttcctgcttccaagcgcattcaacatgacgactggtccccgagattgggagcttcttcagcgtatgagggctgtggacaatcagatttacgttggaatgtgttcaggagctcgggatactagcgcgcaggtcggtttcttctagatatgtctctgaaatttcagcacgatgttcatcgctcaacaagcgccatgcctttctttttcctcaatgaaccggatatacgacagtacgtcaactatggacacacccttctcgcttcgcctagaggagacatcatctctagcccgacaccttcagacgaaggagagtcgatcgtattcgccaagttggatccgagtgtgatgagatctgtgagggagggattgcctctctggagggttagtccttcattctttgcaacctctcactctgttcttgtggagaaaaactgaacacccgtcttgataatcgtaacttcttggtttctctgtttttattcctatcaacttgaacgtcaaaacagagccaaaagtacaatgtttacgggaaactagaggggggcgataaatacgcttagggagacaatcatggcatgtaaccctaacagtatttctcaacgcttctgtgcccacaatagcattaaacccaaccgtgggttttttctctcgtctcgctcatcatagcatcttgtaattattttttgtagtcatgacgtttactatcccctgttcgtagcgtacgtaagatcaactgatgtgtgaaaattaacccgaagtatgataaggtcacatgagagggttttctatatcacatcaacgatggaaggaagcaagcaaaacgaatgatgaattgaaaaacaaatgaacatcaagatatgaaagttgataacaagagtataacccaggaataagaaaaggattgaagaagagaacagagagtccaggtaggttgccaagtctaagctccatcggcacctagatggaagcaaaatataaaagacgtcaaaatgttgttgatcgaagctcaagacaaactggcaggcgatggttgtagaacggaagaggagtcacttaccggaatcgtttgtgaactgaatgtgtttcgtgatatcggcttccgtcaccgttggtcgtgtctgtgataatgatatatattgcacgaaaaaaaaaacaaattgagtacagggacatgaaccgatcaagcgaaaagaagatcagaagatgaggaacacggaccgaagaaatagctctcaagaaatccttcattcccaagattggttcttgcagttgatctccgtccacatcactccatgtcatctcctttgcttttggatctcccggagaacaaggcgtaagcttggtgatggttttttccggatcttctgccgagggggcttcaacctgtatagacaaaaaatcgaggcaccaattcctgataaacaaacatgtacatccaacagtgtttcgctagagaaaacaagctcaaaagacagacctctttaaagtgggttgcactcaacacttttctaacaggctgcattagcgcgtctctcacgacaacagcgatgtccgatccagagtacctggacaatgatagagtcatcaatgaacggcgtaagtgacggcttgagcaagagcttataccagtgctcagctgactatatgaatatacaaaccctttcgtctgatcggctagttgcctgtattccttctgcgtcaaatcgcaaggagtcgtgcccacattgagttcgaacattcgctttctggcttccggatcaggtagcggaatgtagattcgtttctcgaatctatgattggaacaagcaaaggaagcgaaattaacatcagaccggacaacgtataaggatatcagagagtggaggacagaccgtcgcttaattgcggggtcaagctgccacgggatattggttgctcccaagataaggacacccgtctcgtcgtttccaactccgttcatctgcaccaggaactctacagagacaaagatggcacaaatcccatcgaaaacatcgaccagtcagaatgtatacgattggaaccggcgaggcgtaaggcgagagaacgacaacctacccgtcttgattcgccttgaggcttcactctctccttctcctctcgttcctgccagcgaatcgatctcatcaataaagatgatactcggttttgcctctcttgccatctggaacaactgtttcaccaatctttcactctctcccatccacttgctcaccagatcactcgagctcacactgaagaacgtgctttttgcctcggttgctaccgcttttgccaaaaatgattttccagttccgggaggaccataaaggaggattcctttccacggagttcgtttgccagtgaagagatgaggaaacttgataggcaggatgacggcttccttaagggattcctttgcctgctcaagcccagcgacatccgtccatttcacattcggcgtctcggacaagattgcacctggattagagggagcgtttgggtaagagtgttagtgacaagctgaatcaagaaattcttaccagagatggagtgcgcacgtactgcttagcccggctcgaagtttctttgtctctgcatcatcctcgtcatctttctttcctccacccccacctccgttcgctccggctccagccgacttgcccgacccatccgctccaactccaacccgcgctcgtttctcgtcggactttgtgaggtgctctttaagtttttccgctcgatcaagatattccgtgaactttttacgaatgagctctttgagcttgtcgttcttttcgtctgttcgtgaatgtgtaaagaatatcaatcacccgccgcttgaaagagcgagctgatgtgaagagagaagattcatcctacatttcatctgaacaagacaaagaaaatcaagaagatttgagcaaagtctctcttgtgaatcccagagcacccgaacagtgtatggatatgatatggagttcaagacttacagccatcataaagtagtccagcgagttttgatacctgaccaacccatcgatacaaagatgaacgaaacgtatcagccacaaccaaagtctcatcatctgaacgctcttctcgcctacttatgagcaacgctgctcataactcagggctgatatctccaaagagatggagctaacccctcgtggccctgagacgaacaccctgtttcgctttcttgatcgaagaaagcgaggggaagagagacagagcagatatgcgacagagggaaaagaagaaaacatactgcttgtaagcttcctcatagtcctgtttgacatccgcatcaatagctttctggacgatctcgattgctttctgtggagtgatatcgtttccaccgtaaacatccaccaacagtatccgtatcaccgatatcatcaggtcaaccggaccggagttaataaggtcagcattatgaaaaccaacacagaaatctgagcgaaatgaaaggacgaggagacacaggtgatgatcgacaggcagggatagaagacgatgcccttgccagtccaggctgaacgaatgggtagcgtagacggggatgaacaaggaaaggactaacgtcgaggaaattcgagttggacgacatgatcgctcgattgtattgagtaccaaggtagcagtagttgttctggtctatctacgtccggtttgaatgagttgatagaatccttgtctgcgaagagagagatacacaacccgcgttgttgagagtagatcgacagatgggagatttcgaaagaaagcgggcgagatgggagacgaccgacaattgaacgacgcgtgtcaaaagactggcgcagataaagaaggccacctagacctcatcattcttcatactgtttcccttccgatatactatttgagatccaaattacattatcatac

SEQ ID NO: 634 - DNA, 31171 bp, Xanthophyllomyces dendrorhous
atcatacaatatatacgtctatgcaagtagattgttgtagagggtgtggagatgaggagaatatatggagaacgatgacatatggaaaggatgctttatgcctcctggaacgaatacacgtcgcttcacctgactgtttctgcacttagatcgaccagacttccgtcaaaaggagagagtctcccctccgagacattcaactttttcctgagcggctcactcgactcctctactatgatgagttctggtgataggttcgatttttctccagcgactatctcgacctcgacctctacatcaggttcgacaagcgagtcaaacaacgttcgtttcagatgagtcatagcctcctcgattgatggaagcttacgatgtctgatggtcgtagtggatgagcgagaggcgcctgaagatgaagatggttgcataggaatgaacacaggctgttgggggcgcgagcgagaactgcccagatcggcccagtcgtcggtgaacggaagaggagcaatcatcggccgaggagtgttcaggtgggagctatcaggggacatgggtctggaaccatggccattcaaagtagcaaacgtgctcatgaaggagcgtacagagcaaacactcgctcgagatgacatcgaagtccgtcgtgaatcaaaatgctgttgcgaggagcaaagagcttgtcaggattgcatgattttctcaattatcaagagggttcaaaaggggcgcacgtatgtgtcatacagatcttcgacctcgacccaccaagcgggctcaccggaatcgaacgaggacgcatccgagaaagcgggcgacgttggtctcgatatctttataaaatttaaagagatagaggtttgtattggacaccggattacgaggcatgaagagaaatgaaaatgagattaaaaaataaagacttaccgagctagctcgtctttgcatacttgggcgtaccatcgggcccactttcgctacgactgggtctgacgaccttcgctctacgataaagctttcctgcctcatggagaagtgaaaattcaaggctgaagagcgacgatcggaagaatgaatggtgtgggatcctaatcctcaaaggttaattccaaggaaacagatgcttcgacaagattgtgtgaattagagtatgatatgattcgagccgatgtattgaggaactcaaagagaaagagagagagagagagagagcagatacggaccgagatcaagaacgagaaccaagactctccctctcttatatgcgaatagcaaatccctcgcccccaatggtttcggtgtttgacttgtgttggcatcatcaggctatcctgcctgtgtatgcatcagggccgatgtgaagaagaggcggagggttccttgcttccgtttagctgttgccctgatcggtccaggggagcagagcaggaatggataatgaacgacactcagcactcgacggcggtggtcaatcagccggacgggccgacgggcggatgttgtttcttaggttccttccgatcgtccctttttaggataaggttcctggtcggatataaattcggttggagtgcctgaagattatgtcgatcgtgacgggttatgtatccgatgtgcctctgttgagctcgaccaatatcaggtgcctgagcttgccatcctgacgacaaatcggttgaggtcataggaagcccagaaacggagtgagcttatagccgttcgacgtaatctctgtaccttcatcgaccatcagtgtctgggtcgtcatgagtctcatatttgttgttggtgatgatgatgatgatgatgatgtggtctgaaggccgggtttcattgctgttgtcatcataaggtaacatgtgcaaggtcagcatctgttcgacatctcaatggtcagtatgtatgggatcatccatctgaggtcagtgtaggtcgtatcgtcaacctgtgtcgtcagtctagagaggttgtttgggcttgttgggaggagtaaagaaatcgcaatgctcccgcctgaatctcatctcttgcctttcaacacaacgcctatccacaatcattcagcctgccttgctttcttcgttcttcacaactcacacaaacacatacattagatgtctcatcttgctatccttgctcgtctcgaactccttcacgcatctactcttcttcgtctttccggtcgaccggaaagatcgtcggatatccatgagagcatcgatcatccagacagtgttcttccagtgaccgaagattccgatcaatcgaccgccgaggaagcatgggacgaagtcgcctcgctactgaaagttctcggagatggtctcagagaaggtaagtcattctctctgcctgattatggatacgaatggtttctctgttcttgggactgatcttgcatctcctcggctgtacatgcacaatgaagaatcgctaagaatacctctcggcaagacctcgcttccttcgaccttggctgatttgcttcggttcgcacttgatagtccatcaacaacggcttctgatcggcttccatccccagtacctggatgtcctcaagggaagaaatctcaagcgatcgtagagatctgtcgagtggccggaaacttgtgcttcgattgtggttggtccttgagctttccattcgcatccgttcaactgatcgatcctaaatgcactcaggttcttcttttctatcacaaatccaaagatgaaaacaggtcgattcttctagagtattcattcccacaaaccctaatcgtcctcattgcttccatcgcctcaacaatagattcaaacgtgaaccttgcaaaatccgcgctaggagcgcttctcaacatatcacttgatcatggtccgtttcccctctatatctttgagccttctcagatgttcttggatctatgtataccaactatgtctgctgcacgctttagaccagactcagactgctatcttgaacatggaaggcgctctagaggtcttgatcaaggcagctaacaactgctacctacccgacccagtcaagggcaacagcagtgcggacaatgttgagcttcggagagcgatctctggatgggcatggcgggttgttggagaaatctcgttgctcggtaggtgttttcgcgctgatcaaagagatagttcaagctatactgacgaatctcctcatctccttctcctcaaatcttctgacctgaatcgatagaatctgcctcgactgtcctctccgctcaagccgaagctctgttcccacacctggttcttcccatattaacctaccttcctccctcttcatcgcccgttccgttcaagccggaagacgttcttattctcaccaccgccacccagatcattgaggctaatactctcgattccgagtcctggcaacacacgctcgctaactcgcgcgcgtctcaatcagaatcttcagttgactcttcacctgctccgggtccatggtctattcaacagaaagggagagagtcagagaaagaagaaatctctgtgtggagcctgatcttagatttcgtcgagggtgtctacatcgctcccaaggaagagatcacggatcaggaggaaagagaagagcaagaagaagaagaggaagaagagattttgagcttgggtagcatcaaagggggattgatcaagagcatagtcgccgtcgctggctcggatgaattggcagaaagcttgtttgaggcgcccggacgaacaggattcttgggtcgcatgaaatccttcttgagtggagggaatgtacaggaagacagagaggatctggtcatttgtacgtgttcaatcttgtttcttcaatttggcaagcatgatgttcatcatttcttaaattatgttacctgatacaggcgcggtattgagtcttggaaacctcgctcgatcaggtcggtcttcttttccttgtttttttttttcgaggtaacggatcgtttcaagctttggtcaaaaagattaacatgaaaacgtgtttgttgtaccgccaaacaagacgcgcgatgcgcctcgcttcttgaaccatcttcttccatcttgccctcaatcctacctttgatggtctccacgacggacatcaaaatccaacatggacttggtcagtggttgaatgttgtctgataatttgcgtgagaagtatgttgaccgagtgattcttgcgcttcctacgtatacacacttcagttggtctgcttaagaatctggctgtctgcgatcagaacaaatccattctaggtgaagcaggtgtaattgaacaaatcatccagatgaaatgtctgcaaccagaacgagacacagtcagttctgtacagggcggagcaattggcgtgttgaagaatttggcaaagaataatcgttcgtaatatttctctcatcttggaacgcctgttgtcgcgagttggaaagcacctgcatatgctgacatcccatcatatacgaatgacacatgggcctcaaaagtttcaaactcccttcgaatcctctcaccgccatcctcgacagacgaagccgctctttcctccattcttgcgtttaacgcccgaagtgacgatttcagcctccaagccgagtcggctcgagttctcgttaacgtgatccgaaccctactctcctccccacacaccattacttcagaacctaaaccagagtctaaaccagacaccaacacaagcacggacgaggtagagcgagtgcagatcgcaagaggagtgttagttgagaagaaagacgagatcacaaaggcattgatcgggctgatcaagggtgggattggaaagaagtacgagatactctgcgcagagggtgtaatggcgctggcgatgttagccggtagctcggaagccatcggtgcgttcttcttcgtcatccttaccttcttcttcctatgacagaaaaagccttaggtgattttcgtttttctttgggtgaaaaaatcgatagccaaaacaataggggccgctcttctcgaaccgatatcttcaacatctcctcgcgccgaatcaagctctatcactgattcttctgaatccagttccacagcaccatcagctgtcgcgtcgacatctgtgtcgaaaaactcagcgaccctgcttgatgagttggctgttcttctttctcttcagccccaacctcaatcaatttcttcggaggctttcaccatctcacctgcgttgaagggaaatatcagcagcctgctcgccatttctggccgagctctttcctcagatggttataccaagggtgacccgagggagcaatttgggaaggcgttggagagaatggcggtggaaaatacaccgggggggatggctgatgtaaaggagaaggcgctaaagattctccgtgattgaacgatccaaatgaatgggtaaaaccaatcttcatacgaatggattctatcatttgagtacaagtctctgatgtatcttaggtatgggacatatataagggacaccatcatataattctctatcaaaaagagcgtgcacgtgatgtagaaggagatgctgaaataacatgaatcagttgctgatggccgcatttggatctttcataccaatcagatttctgaaccaatcggtttggatgaggtacttggaaatcatccaaagattgtagcttaaacctatcacctgattccgagatggaaagatacatgcaaatgatcagcataatcattctttcttgcccaagaaccttcgaatttgaaataaaaacaaaaagaagaagcacaacgtactgagatgagcaacgaagtccaaacaaaagccgttacctctcttctacgtcgttcgtgaaaggcccttatctcgccaaagccatcatccatattctcgatatctccttttcgaaagattcttcgatgatattcttctatatcaacaaattgcagtcttttggccagcctggaatctctcaaggcggtgatccgaatgcgctgttgttcatccttttcgtctagaccaaggatctgctgttttatttctgaatgatatttaccaggcatggtgattgagcccctcatcggacttcaagctacgcagccgataaagtcgacatccactcaccgaggtcttcagttggcctagatgttctttgtcccattgggtctgttcttattcgtgataatgtttgcgtgtctttctggtgtattttatgaactcttgatagatgatctcccggtttatgacctctttatatcttcttgattgtcaatgccgaaatcaccatttgcgataaaattcggcacgagctcaaacccgctgatcgacgtcatgaactttatcttgccgacgtctcaaattcatcttcagctccctccatctagatatcgacaccttggttctcttgaactcgtcgttcattcttcgatgcgctcatcaacttggtcgagattgaagaagcaggaacaagatctacctttcggtctgcattaaatcaagggcgtatggaaattttctagatcttgactcgagctttcttgtttggtttcttcttctcagcctcatccaccaccgtcacctccacaccctgctcgtcatcctcttcatcctcactgtcaaacccgctgtcgctttcactatcggcctcgagctcatcgtcaacgatctcacccatcccctcccaaacgtcaccttcgtctccgtcttcgtcctgctcgtcctcctcctttgcatcctccaacgcgcgtttctggtgcgcagataacggtttgatgatccgtccttcgtcggccaagacgctctccgagacgccccaccctcgttcggttccctcgggtagaaggactggaccacccgtggagccccccacgcgagctacggtgaatcctttttcgggagtcgctttagggttggcagggagcgggttcgtcaggttgatagagatcgttccgtcttgagctagagagagtagggtgttgggggaaggagttgatgagagcggtaggagggatgtggcggttgaagtggagcctaagaggtttgcgcgcgagagagagagagagagaaagaggagttcgcgtgagctgattgtaaaccaaagagaagacagggcgagaagaaaacggaaaggaaacagaactagaagcacaaagaaaaaacataccagagataaagtaaacgacacgacctgtccttcggtcacaaagtcctactcgaccaccacctgccccggtctcaccgaaccatatctcgttctctcttccttctgcccacgatgagacgattgtaccaacaccacccgttccacctgaaggggggatgactttccagtcagacgtaggttttcgttgggctcgggggtcgtaagatcggatgtgtccggaagacgttccggtagcgataaggggaagagaggaagaagcagaggaagaggtatcgttaaggtaggtcaggcagaggtgggagatggcaggtcggagaccaagattgtcgttttgaatcttatgagaagagagaaagcccaaaagagcgagatgtcagtggccaagcagcttgcgagtaacaataaaagaagaaaatcacaatccctcacgttttttgctcgccaaacctctccgggcaagagagcctctttattagcctttgccttcttcttatttgtctcttcggtcgcctttcgtttcttggagtcgactccatccaccacgggtttttctgtgaacgccctttcggtatcccaaagactgacgtcgacttccttacccgcgtacgcaaagtgctggccggatgctgtcggcctgagtgccttgaggttggcgggcagccgacgagtctgaacggcagcagacaggtcggaggtatcaaagagggaaaggtatccttgtgtggtcgagtgaagaaggttgttggatctgataggttcaaacccaggacgcgcgagttcggatttcaggagcgagcccatacaaagacgaaacgaggtttagacaatgaaccggtcgcatggcgacgcgaaagtaacagcgtgcttacgtgggcaagaaatcaagagaaagatgtttgttagcgggcttgatggctgatgttgtatcgtagatcttgacgacctcaagcgaattccgtttcgatgcaggagcggatgagggtgagggcaggtcgacgagggatatgcatgatgtagaatgggccaaggcgagctaggatgacggaaccggaagaagctaaacgagatgagcacgtagagccgagaagagataagaagaagagaaagaaacaacaatcaccaattcgccatcctgcctgcctcgagagacggccaacgtctggacgactcctctgatggaagatttcttgggttcttcctgcttttgaacaagatccaaccgacggacgacgggattgaaatcaccgtgtttgagcttcctgtggttcatcgacttgtagggcaaactgacggcaatcagcgagccgggaaactctatcgagccggacagaaaactggaagccatggaacctgtttgctttggattgtgagtgttgagcgcaaggacggtaagaaaacagcgtccaaagttgatcggggaggatggttggggctttggaaatttcctggctgttgccatgacgaccggccgtggttacaacccatcacgccgcccgactacagaccgggactagagaatatctcgaggcaactagggaaagttgtagttgacgaacgaatagagaacgcgcgtagtatgtattacaggcagactacaaaaaacgtgaatcgtcagaaacactacagatcagagtgcatctttaatagagactctcgagaaaataatagggaaaaagaaaacgcaaaaaacactacaaactcatcccactcgcactacaacttcaactacaactttctctaatcgtttttcccaccacgcctcatcccgccctcttgttccggctcggaacttcatctcccttctctaccccaaacaacatcgacctaacaaacagcatacacatcgctttcaacccattctgttctgttctcttgcatccggatacacatactcgattcaatcccgatgagccgttaccaatctacaaagcaagacactgatctcctcgtggccctccaggatacggtcattcggacgccatctccttcaggcgaccgtggttttcaagagtcccagacctcgcccagggatgccaagtaagtgagctgttctgcgttctttccgtcttgttctttcgtctttgcgagtggctctctgccttcatcatccatccttcgtgctcttccttctcttcctgcttttcctgttcttcctgctcttcttgctcttgtttcttctcgcttgccaagagaaataaaccgtttgtcgaatctgtcggaaaagaataacaaacatggtggcatcccactcacacacgcgtcacacaaatgtcaaaccactcaccctcgaccgaccgaccaaccaaccaaccaaccatgtcctttctgatacgaacctcatcgattcgaaacgttggaactttctagaggctgtcccttcctaccaacagagacatcatgtcttctatccctgtatcccgcacttacaagaatatgagctgggctacatctctgtcctgtcaaaaatctatggcaaataaacacaacctttttcaagttactgacccagccgtcttctcatgtcttttggtgtcatctttccttcgcctttgttgtcacttccttttcatccttctgcccgaaacacatcgtccaacgcccatgtcagctctcggcgaactcagcatgatcaggcttcttctcagcctgtctcgaccaccaagacgtcgtccaaacaggcaggttccggccgatcaaaggatgatccgtttgcagatcgaccgagcgaaaagacgaaaaccagcaagcccaaagctccggtgcccccaagaaagagtcgacatgcagacgtgatcgatcgactggatcccagttccctgtggggtggaagtaggtccctacttttgacttctggcttcttcaaaagtgataactaatcccaccttcccatctcctgtcccgtccttgtatagcaatccatcacgagtccgcatatgatgccgccgctccatctcggaacaaggctacctcggctacggctccgatgcgggctttcgactcggctggtcaaccaacaaagtcgccaagcgggaatgcaaacgcaaacccaaatctatccacccttgcttcccacactctcgctcgtatgggatccgtcaagttcaacgagaacgagaagcctgactcggccaccacgcccacaggtgtcctcaataataacgatgacacgtactttgtctccgccctaggcgtttctggctcggagcccgcaactccttcggcggaagacaaggataggggtggtgtcgtaggtagaggcctcagactcatcaggtctaggtctcggtccagagaaggaaaaggtcttgtcggaggcgaacgacctggagcgattccgggtatcggcagcatgcccgctgaggaagattactacaacgctcgagcaaagcatcagaaaaatgcgttggcgaacgcatggggagtcgctgatccagagccatttgaggatttcggtcatatcgtacgtctttcagtccttctagataaaaataaacttggagtttggagaacttggtcgtgttgacagtgaatgtaccgctttctcgatccaaaggcaccgggagagccaccgaaaggagagactggacttgcctccgcttcgtcctccatctggaacgggatggaatcccactctgctagaacgaacgccggtggttcaagtggactttctcagaccgtcaagcaggacgtcgattctgacgaacaagaaacgcttgatcacgtcccaactgccggaagttacaatgcaaggaagaccaacggacatcagttcactcagtctacaggtgccggtgtgacgaggacaaagagtcttattaagcgcttcaaagctatggtctgtcctatgacatttttgagctgatttctttcctcttttccttcgtcgatccagcctctgaccgtcttatccttattgttttgttgctactcagagagagaacccaaacgtaccggtcgactcgaattcgtcgtcccctcgatcggaacatggtcctccgtctcctacggccggagttttttccacctctctacctacctctgccggactttcttcttcctcaaccgcccaacagtcgacaaaccaggcgcctgcattccagaggaaaccaagcttcatgaacagaatcggtcgatctcattcaaactcgtctcctaacgggtctggctcctgggcggggtcgggatcgggatcagggtcaggagagtcgccaaacggagttagcattcctttaggcaaagaagtcaacattggcactattgataactcttcgactgcacactccccgatccctccaaacaccatcaccactactactaccactaccacaggttcagaccgtttgacaaaagacaaatctcttcctcagactcctcgatctgatggtctgaataattctacaggcaacccattctcagacccgaaagagaacagacgacagccatcgtacagcaatacctcgagaaggaagcaagaaagctcggcgacctctcatacgagatccgctccgcctccaccggcgccgatcaaccttcctggatctggatctgatgatcactgggatctcccttctgcttcttcgcagggaggtgtttcaggtggggaagtaaagggtgctgggttgggccgaaaggcgagtttgatgaagagagttttgggtagaggttaacgagttttgaaccatctcctttgttgggttgagaattattactgtctatcgctgttttagaactgaactttgaaccgtatgcttttcctatgcccctcgttcatccctccttctttctctgttcttatccgtccatcaactcttgttcatttacatcattgtgaagttccacaaatgtttgtttccaatccaattttctcttccctttgtcctcaatcctacctacgcatcctaccggatccctccaacatcatcaaacttgggatggccatcctgtcctgtctcttatcctctccttctcatcgaacactttgttttatcattttattttgaaatcgaaatgtgactttcagcctatgtagcgtcttttttcttttcttttcttttctttttcctccatcttttcgttgactccgtcatcagtattaacggtgtgaattatcgttagggtgcggtgtgtatataataaactcaagatccaatccgttttctggcttccttctgcgtaatcttaaattttcattcgattcattgggaaaaactctagcgaaacacacagatgacaggctatcagaaggaaaaaaagaagatgggaaaaaatgatttagttcgtctcgttccgagatttggtccccctcccccccgtttgtctacttgaacgcattccgcaccgaaaacacagaagaaagttagaggacgcttggataagaaagaagtgagagaaaggactatcgatacatgacgcagaaattgttcgaggattggctataaaagtagattaaaacgtataacaacataagagattaaaacgataaaaaaacatcaagtcctcgggactgatgtttacatggtggagatgagttgatcgatcagtcacgagtggtcagcggcgcgcccagaggcaactcggtgttctcgtatccgactgcatctcgggatacaacggcatcggtgttggcgttggtaggagcagaggtggggccgggataagtggtcgtggggtacgttccactctgagcgtacccgttttgaacgaacccatactcgtatccctgaggttgggtcacaggaacgacttgtttcatctgagggctttcctggaaccgaggggcgacgacgccgttggtgacctgatgaccctccaccggggttcccattcctgttctcgtttcggtagtaggagcgtacgaagttcgggaatccatgccggcggctacacccatcttctcaagggatgattgttcccatcgctccaatcgccgcaggtatcgaggggaagtcttcgaggcgggccagagatcgaggagaagagtgaagaggtatgcatcaaagattaaactaatcggggtgcgacatcaagaaacgagtaacgagaggtcagtacgagggaacaggagaacgatgattcctaagataacgaccgtacgcgaccgtccattcacagatcgcagcagcgccagtgattctgttgcatctggtgatggctgaaggagaggcgctatagtccacaccacccgaactatcgacaacaagtaaagaggaagaattgttaacatgaaaagcataagacaggcatgtgatatggaagcgacctaccagatcgaatagagcacaccgaaagtgatggcgacgctgatagctgcgatcacaacaagcatcttcaacaccgagtttctacaaaagcccatgttcaccaatttctaatcagcactcagagatatagtacacgagaagaaaccggcgagaggtttgaacagacctcatgagatggggcctatcgggatggccttttttgaggtaaaagatctctaaagattggaagactgcagaaatagcgacacagaggataaagacacaggtggatgtcctgagatgccccattgagaagaaacggaagatgcggtgagtgaaagaaacaagtgacaagatcaaggagaaatgcactcaccaatggacggtagagtagttgtaggtattgaaggccgagaggacaatcaaagctgcagcacccaaaattccaaatatgattgccaagatatctgcaagcaaggagaaccgaaggatgattgattagcttgcgggcatagagcaagataaccagagctgactggacataccaaagatgacgatcaacttgtttcgttgaccatgcccaggaatcctgtccacatgtcgcagccatctttcggcaaacaaactgagaacatagagtgcagcagtgacgacgcagattccaatgaacagcttttggtagactttgaacccgaagcagaggcaaacgcaaaggctaaatatagggatggcaagagacttatgataagatcagaggatgggacttacttccaccgatgtctgaaataaattggctgtggacgtgggttgtagtggagaagatacataaaaggattcgtcagcgtcgacaaccgcgggagaggatggttgggaccggagaggccccgttgcaagacaaacgaacatgtcggcagagtcctcctgatatctgggtgttccactcacggcccctagaaatcataagagaggcgaaggaagattccagcgcatagaccaagattcaatgagtaaaccaggattcacattacggaaatggaaagaagcacacgacttacagagtgacaccaaagcaatcaatccggcgagccagaccaacgcggatagcagcgggaagatccagtattgtccgtaagccgtatgaaagaggaaaggcttcttttctcctgcactattggttggcctagaaagcatgatcttgatgtttcctggattgtaagttgatcggaaaggtcaaagaatggacggagaaggccaaggaaacaggaagccaaatggttaaactgcaagaagaagaagaaaaagtctttaaaggagaaggtcaaccgcggaagcgacgtcactctctggtgcgcagccacatccgcctctccgatcgcccacgtcatagaggtttttccgacgtggtctgtgctcaacattgccagacggtaatcaagtaaccaacgtaaatggttacgtgaatttgtgtgcggtgacctcggtgcaacattgcatgacccagcggaaagcccatcgagaccagaacatcaacttatacggagagataagtaaccacgaaagatagatagaaggactaaggaagtacggacggaaaggaaaaccatcaggcaacagacgagggtataaattagagttgacgatcattgaggactggtttcctataatggatacacgacgaatgatttttttgattttacagattaagaagatttccagagcaagattgcaatctgtccgagatagaagtagacgaagtgtttcgtttctgatgatgatataataagttgagaggagtgagtatatgaatacccccggcgttcttgctcatgacgttcgacacaaacaccacaaaacgtcactagatctcatatttgtgaagaatacataccatgtgtgacgaaggagccgtagctagattgaagtatcaacacaacgatagcaatatcaagaaaggtttgtggtgagtcaatatcaaaatctctcaatacgttaaaattcgatcttccagactacaagaaacaccacgttcttgacggtctgctagagtcttaggaaacaaatttgaggtatcctctctacatattgctggcttttgatttgcagatatacaggtgatcgaatgaacaaagggaaacttacttctttccgaccacacagtgccacgtgctcccataacgcctgtcgaactccttcttcacatgcatcgcaatatccttctcgatgttgtatttctccaaagccgcactggccacatcaacagcttcctgttgcatctcctcagacatgtcaacgtttttgatgatggctttgggtgaagacatggaaggtgcgcccactccaccaccggtgggatttaaaccacctggggaagcagtctctcctgtaggaagagtgagggagccaccaccaccaacttttgatgaaggagaggtcatttgcacgtctaactgagatcaagaagaatagcgaaggagatatcgaatgagttgtttcacaattagaagtgagatgacgaggaaagcgagggcaaatagacaagataggcatcgaaagcgaaaaagagtcttgtcaacaacgcttcggattaatgccctctctggttattgttcaagtcgaaactctaggcgtgtccagtacttacaggtagatgagaataacttgaaaaaacgcccagatgagatgagggcgagaagaagagaagtacctcaaaggattcgatgaaagatggaagatgatcgaatgaaagtaatacttgagatgaaccaaaaggcttttgtcgtgactgcgcgccgaaacctttcatccttttgtctttttcgccattcatttgacactgacgataaagcaattgagaagggcagacgtttacagtataatgctggcgagaatgaacgtagagatattaaagaaaacagaacaaacaatcaattaggagcgtaaccatgctttgaagtaaacaggattctaatcgacgaatattagcaaacaagaaggtattttaagaagagcatggatggggcgtaaatgcaatagacaagatgatagcagagaatcgtgaggaacgagaagtaataaggatgtgaaaagacggaaatatacgtgcacaaagtaatcaattgaggcatccgaatccatgtaagaacgagaaaagatgagagagagaaaaagtatgcataaggagagataaaatataactgagtagtcatcaagttccgtagccaagttctaatcagagaagaatcactcttagtttcatcgattacttgacaacaactgattgatagattttggattgttagaaaaaagaactcactcctaaaaatgttgtctagatctttcattgacacgggcttgacgagactattgttaaaagaaacaatttgatgtcatcaaacagagaaaacagaggatttgacataacttcatcaatgttactcactacccatcaacgccacttgcgaaagctcgttttttatcgtcaggggtagccagtccagtcagagctagaatcttcaacctgttctgatagtcgggttgatttggatcattcgagactgaagatgttgatcggacatgtaacgaccgtcggtcagcttctagctgccttattgctttggtagcgccaattcctacaggcacaaagaatatgagttcagagtaatgttacaagaataaagagccagatgaaagtgatgcacggctgcgaaaacacttaccatccaagacgggcatttggacatccattaagcacacatcgaagaaccgatcgggttgagatcggaacatgttaacaccttcttgaccattgaccgcttccataaatgggtatttctgttttcgtttccgaatatcaaggagagatcagatacaccaacattcagaaactatttgctgacttcaaattatcagactgatagacgaacccgtttttgtaagtatgcagatagcacccgtcggttgataacattgtcctaatagagtataagagtcaactagcaggttctaaacgctagaaagaaaggatctgacaaacctcgacgactaaaactgaaggggctttcttaactcgctcatggttcaactggatatccccttcggaggtagtagccgctttgagcaccgctccacctccccctacgctgatgatcgaacctggactactaggcgtcgactgctcatcttctgaatgttgaggggttcgtctcgagttaggaattgaaggattggaagagaatgcggatgagtgtttgatggcgagtggtaaggcggtatccggctgaaacgttatcgaccgaggagccatcattggccgtcgaatccttcttcgatgatctcgctcctcttccgatcgtcgacgttgaaggaaatgtgcaggggatacttggtgagccgctgccatcatggctccagacgatccaaaagccccagaaaagtacgtcacttcagactcatctaccccactaagcgctgttccaaaagaaactggaggagaagaacagttcgatagacgatccgacccgcttgaactatgcgacgtggctgatgattgattgaaactgcgccgtccccagtgagaagttgtctgagctcccatatgagagctagcgagtgactctgtacatgcctgcaaagcttgagcgaccttggacggaccagcaggcttataaacaatatctagtcaaaatatacatcacgaattgattattagtaatcaatattataaaatagagaatccaaccaaaagagggccttacgagcgaaaccaccagcagcaacataagcattcaccgctcgattttgttcaagtgcgccacgcgaagttgtcaagacaacaacgggcctatagatgtcgttttgagcgaccagctcatcaagtacgataacctcttcattgagcaatatctaaattaacaaaccgaaaaccgaattagctacacaactattcatccagtggagtgagggatgagcttacaatgtcacccaactcaagatcagatgggtctcgaatttcaaatgccaggtcttccaaatagttttcgatgacatctcgagcgagactttgccctctatgttccggagagaatccgataagtgacacgctgtatccatcgccaaattcaaagggtaggttaggcgggccttggtcgcgcatcaactcggcttcgaaagacactttgatctcagtcccaagaccctccgaagacctgattgagatttttacaaaaacaagtcaatgtatatcctgaatattaagcacgtgaagtagatgttctaaccagacgtccacttttccatttacggactgaacgtgaacaagtagaatcaatagggaaatacatcaaccctcaatcagatgaagaggcgataacaaaagtgcttactggagaagacacgatggagttaacgattgcgagtccaactgtcaaagtcagcccgaagaattgttagtactctcgaaagagcaatattgatgagttgcaatgttttgatgactaacgtcctgttcccgtatgaagagggttttcttgactgaagggctggaagagttggttctgaaaaccgattgcaaaggcgtataaatcactgacttcatatagagatatcatataatgaagactaaccttcaagaattcagagctgataccttttcctgtatctataacagcaagctcaagagacagaacattgtcctgagcatttggaagctcgcgaagagtgatgaggacatagccatcctgaatttcgatcgctagtttggtcagttctattcttcacgagagcgacgattcatatacaccaacctgagtgaattttagtgagtttcctaatcatcatcaattaaaggcatcgcaaccacggttagcgaacgttatacaccaacgataatgacaatatagaacatgaactgacctataagattcatcaaaactcgccgaattccactcttctcgcacttgaccttccaaccttgaggtcgatgtccgacatcaatgatacactatttgacgaaaatacatcagtttagcatacaaaacatcaaaaggcgataataggagtgaacgtgcctctacatgattcactagcttgtttgctggcttatctacttctaagaaagcagttatagacggcggagaataaacactaccaatcccagattggtccaacataactcgagcagtggccgaaaaccaacatccttcgacagtttcttcgatgagcttaacaaggtcaaccctagtaattacggcaacatgtaagcatatttcgcggttatacattgattgataaacatgacatactcagtgaactgaatattattttccgcattgcttttcgttcgcgcacttccgctcagtttctatgcaaaaccaaagaagagggtatcagacccggttgaggaatcaagtatagagatgaggtggcagctcacagtgaaatcaagcctggtttggttgtagaaggatttagcattcatcagttagttccgtgtatatcaccagtccagccaaaacagctcgatcaacatacacatgattgacttgaaatatttgaggaaagagaaataaccagatcaaaatgtgagctgagatcgttattgacattgatacgattgggatttgaaaattgacaaaccggtttcaataagggaggtaccacatgcttgaaccgtctgacaatgcaagaaaacgggtcaaggctcagattaccagggttgcgcatagaattgagtgaaactcacttgaagataagacgtttgttgtggtgtcaaatctgtgtcggaaagaagttctcctacggatggttgaagtgcgagtgaacatcaataaatcaattttcatcaatcaaaaaatattagacacacaacttacctgacacaagaattccatgtaacggcgtgcgcaactcgtgtgaaatgttctacagtggtataagaggaaggagttaaattcggatgaaaacaaattgttcgtgtatctgataatctgttaagcttaccgagatgaagttggctttggccttgtcagccaacgtaagtcgtcgcttgagaacagccgagagagtgatcagaccaatcgctctaagatatttgagctcataaccctcgagaaattccttggcagcattcttcgtgtatgcgcagactagaccatgaatttgattatcaatagaatctgtgtttagcttttgagataaaacgcagttcagtggcaaggaaatcgagcgggactgaccaaacgtgaaaggattcttgtcgatattgaaaactgggaccagcatagcatattgaattctacaatgccgtttgaccgaatgtgcgggagaacttcagctcgcgaaaacattgctgatgacgtgagggacaaagacaaacccagaaggaagcatgcttctaaaccatgatggaagaaccctctcgaacaccttcccattcggattttccttcaaccaagccgccaatttttgatgttctactgcagacactggtttgcctctgcttggcggaggcaatccgttctctgctaaaccaagaataggcaaacatgggattacctgatcagaggcggtcacgggctcagagtaattttgaggtttctcctctccgggcgtcacgtcgccttcctcgtggtcttgatgagagggaggagcagtctgcatttgataaggatctgcctggaaataaaatgaattcgttccgtctgattggacggtctcaaccagttcgaatgcagacaagtccaaaaccattgcgccatccacatctagggtcttctggatgagtttcgcagcttggtcgtaaacctgcacacaagacaggtcgtaggttgattttcagtatgggtgaaacagatgggcataccgagacaaatgaaaataagttctaccttcgtcaacgctacgtcaacagactctggagagacatccatctctacacattctcgagtaaacctctccattgaatcctgaattttccctcttcttctcaaatgcagcttatccctccaaagctctaattctcgcatactgcgagtcatcgatcacgtgcagttagtagtgcccttgactgaaaagtttcagaagctgagatgacttacacaacagcggcaaactctttaagaacatgcctttggcgaggcgcgaatgaatcatgcggcttgtcatcaatgatacagagagagcctgttgttaaaatcagaagagagtcattagcttgtttgttagatagcatgatgagtatgactgtgatatctgctaaccaatattgaatccatctgatgttcgaagtggggcaccttgatttataaaaaaattatcagattgtgtggccatactcaggatatcaaaaagaatgcaaatccatatatttgttgagaggaaagagaagaacttacctgcatagaatcggatattaggatcaccgatcacaagcgggttccgagcaaacctccagtctttgaacgtgtcaaggatgatgagcggttcgtgcgatctgtcgaggacaaaaatcagaagtcgcgtgaataatagacggtctgagtgagtatgaatgtaattactgtaagttaatacctttgtagaatagtgtgagcgcagatggagataccccgaccggcacgatcgcgtcgcatgccatctgtcaaagataatttaaagcatcagcaaaagtccagaacacagctttcaagatctgagcgaacgaaacactatcacctactttcggatttataccattgctcatctgtgtcgagcagagtaatcagaacgatttttgtgttgaatactagcttgacgagatgagtaatgcggtcaaaattgatgtctgtccagtaaatatccaaccgtggagatcaaagagaatagcaatagtcaggtacatggatcgatggtttcacgtctctcaacatgcttgaaaactcagcaccaaaagtgactgagaaaaagacaaaaagacaaaccttgtccggaatgtaggatatcgtaacggtagagtgctttcctcctctcagcttcatctggtggcttcggtgcacttaaatagcccagctttgtaaatctctcctcctgaggagacaatttctgagccccatcgtttgcgacaaccggcggataattacccagcatgtttttggacgcttgatgaatctttcgatctccatccgacttagcggtaaaaagaggaagcctggtgaatccagacgaaggaacagaggaagatggagcaggcgaaggtacgctcatctcagaaggagtaaatggttgagaaagaaactgtttgagggcttcagaagtatccgaggctttcaatgattcggttgaaccgtccttcggactgagttcgagttgagaaagttgctggtggggtttgtagaacggaaactcccctccggacgctgtcgatcgaagttctcctttcttgctatctcctcccttaccgaatgttccggtgtagctgtatcctctacccaacactgttcttgaactgttcccactccctgtgctatttgggccgtcatcgccgccaacagaagacgcgacactccctctacgacttcccgattcgctacccaggcccgaagtagcattcacccaagctcctacggattctccaaagtaatcgtcttgtcccggatctgaggcctttcggcgttccgatgcaggtagcggggcggttgccatggggagcgggagtgttcctcccactaacgtactcaatggagaaattccctccccaattacacctccattgccaggcccatcctcagtctggggtgttgctgggatggttcccaaattgccaaacgaagccgtcctaccagtgggtaaaagaccacctgaactgacgctccacgagaaacccattttggaagctttcctaggtcgatgaatattggaagatgaatcgctcgcgtaagacgtgctgctcgaagaatctaattcacgaagcggatcgacatgttcgtgttctggagaaggaagcgctaaaggagagagatgagatgaagcgccggctaaacggactgttgctgcgaattcagcgttgtgcataaacggtttcttctttttggacaagaaagccggctcgacatctttgcttctaatggaaccaggaggctgagccatttctatgattcgatccgatccggtttcaaaagtggtgctgctagcgcttggtggcggtttgtaggtcggtgtaaccgacttagaagagcttatgaccggaggagtctttgcttttggaggagctggagagaccgaagatggtggagcggaggatgaagaagctctaaggttggctcgagacgtaggagactgtgcatcttgcatcagatgcgcacaagatagaggtggatttggaatcttgtaggctgaatgtatagaaagtgtagaataaagaggctgtcaaccgaaagcttggaataaccatgaggggaagtaaagaactggcgaaactaaccatcccatctaccgtgccgatatgcctcgttgaatgattcccaatcccaagcatcatagctacctgggttaggcttagatgatgctgatgatgcttggtcaaagaacgatattggttctgctgaccatttttccttcagcatcgcccccgagtcatctgggctaggtctacttccctccgtggtagtttgaccatgtgttggaaaggacagaccttgttgaatagagtcccgaagctcgatctctacacttctatcatcgaccgtccgactgcttcgccgtctgacttcaccaagtccttgatcttcacctttcttcggttcgctcatttcaatgctcacacttcgatctcgatcgtccattgaaaagcttagcaagctttccgtgagatcattcatctccaagtcacttcttagaagactgtttgttcgagcaggcgaatccgtgatttgattcttaaagacagaagactgaggaccgagggattcggcgtctgcctctcccatctggttatcgtagggtgagaatgacctgggttctgagcttggtatcgacagcatatgactcaggatggcatcctgactatcaactccagtatgggcaattgaggcagtatattcagaagaagacggtgacaaccttcgggaagacgacaagagagtcgaaggagtagatgaaggcgattgcacaaggggcgtggctgatcttctgcctgacgctcggacatgagcccgtggcccaggctgagtagctcctccaccaggcgtaacaggtgtcgagtttggcgggtatgttgtggacatcatggatgaagatctggacgagtcctgaagattagttattgacgttcgtggggagagtgaatgattcggatgaattgttgacgaggacgatagagctggcgacagcccggcataggttcctgtcgactgagagggtgaggatgaggatggaacgacctgatgggtcgagtagactcctgtagaaggcagtgagagtgcgaaatctgtcggaggcatcgtcacaccctctgttcctgccggaacaatctctaccggtcttcgcaagctatttccgctcgaagggaagtctgctctgttagtgggtggcgatgacaccgtcagccgagtcgtcgaagcaaacgagcgaagcagggtttgcactcccgataatggtcggctggatggagaacgagatcgatgacttcgatccatgcaggcagaagtcgccggattggaagcagccctcctggatagcaaagttggggacgaagttaccgaatccgccgaattagtagatgatgagctgttggtgatggatataggactgttcgaaattggaagagaacgatctgttgggatgtcatcgggagtcatgctgggctgagtcgtcctatcttgagctttttcccttcctgatgttgatgatatgctatgtagttggtgtcgtctggcttaggaccagctttggatagttttcgcgttgtaaccctaacacggggaaatatttgtggagtcgacagtttgccccgagctcgtgtcaagctcggttaatcagcaactggttcttgatgccgacactataggcttgttgtcaaatgaatgcaacgctgaacatggtatatagagcaaatcatcgatagcaatataccaggagcaaagataggtgcaaagataagagtgacagaagtaatatagtgaatggaaggattgagagcatatagaaacataaaggcacgacgagccgacctatgaaaggttattgaactacgatgatactgagacattctcatgtgtttaccagagctcgcatcgctgggtaggattcatctaaaaaagcacattcgtcaaagtcagtctttcaagatcgatgtggattgaagccattggagaacagatagtgatgcctgttcactagataaaagagcgtacctttgaacccttcttacactggaagacctctgcgaacttttcgaaatttcctgtgataaaaaaatagatgtataagaaactttcagccattgactgcgaataatcaggtcttgcaagaaccgatgcttacgaagagtgccctcaaccctatcataatcaatcagaactcaacattagttcatgagaattcacgtcaaatgtaaactagatatgcgtaccggtataagttaggcgcatgtgggtcacttcgcacttgagccaccaaagatgcaggcgcgacatttgcagcccagattcgaccgaacgcgataaagaacaattgttcggaagtgtagggcaacccaggcagagtaatctccttatcgccctgcttgatcgatgcctgccaagcctcgtatgcaattcgcagaccagaatctcctatcgcctccccgttcgtgttgttccctttgacgtagaccttgtggccttcggcatcaagcacgtaatactcagagtattgtttcgcgatactgtgaagattgcatttgagagagaacccgagtcaattcaggcatctctaaaaagctaaacaagaaaagagaaaccaaattaccactgggctcgctctctgaatgcatcgacggtagaattcgtccacctaagtaccaggatgctcgttcagagcgataacacgtcagttgggtagtcctcatcaagcaagaatatacagctttcctgcgtaccactgtctgtatcgaccttcatagtcatactgagccccactgttgtcgaacgcatggcagagctcatgggcagctaccgctccaaatgctccatagtgaaggtacgaaggcctgtagagggactcaataaagatgctttagcggttgagaacagacattgaagcataaccagatgttaacataccatttggccgaaaagaagggaggctggaggatgccggctgggaagacgatctatggaaaaatcacgacaaaaggctctgttcaacaagacgtagaacacaatacagatgataaatcccaatttgagtgatgtggcgcatacctcattatcagcaggagactcataagcattgacagcttagaaatgtacgaatagcacgcatatttagccacataacttttagtatacatctgtatattcaacgtattgacttactatctgcgttcatcaaccaagagtccctgtttcgcaacactccgaactcaacctgccattgcctgattttatccatctcgtttactcggacaaagttaccgaggaaatcacccttgttcaatactagtcggctgtagtaccgctggagcgacaaaggtgaggtggtgttgggatagagaggatatctatatcacgaacgcaactcagtctttccagtcttctcttgcttctcgacagcatctataggcgagaaagtagatcaaacagagatggatgacatacccgatcttgggagtgataacgtcggcttttctgacagccaaccgagcactctccttgtccatccatggaagtttaacaagcttcctcttgaaggcatcgatgatgttaagaataacatcctccttgaaaagattaagcaatgggatacgtcagcatgtcgtgagagactctgaaattcaagaccttggtggccacgtacagccttgttcttggaatcgcctgtgaacgccttcttgacaaattctgctccagccaagtgaccaacagccgcggaaacgtgattcaagcagactatagaagaaatacgacaagtatgaatacagtacgtcttgcgacggccaatatgagcgagatgctaagaaagataagctcaccttcctctcgctctggccggttgccctgtttgactccggtgagagtgttcttgagcttctcggcatcctgtctgatctggacgttcggtccgagataggaggcgtacgacctggtatgatgacgtggcgaattgattcccaaactatttagaagagaaactaaagatctccctcccgcgcaaaagacttacatagcagttctaatcaagaaatatccttgaagtacgatatcatcttcttcctcgacaattttcactaccttcttcacgtaatcttcagaggtcaatacaatcttctccgggaactttctcggtgcaaaactcgaaacgtaagacctcaaatcgagccattcaagctccttttcgagagtttcaaacttgacgggattgtaagatttggacggatctcccaagtattcaggctccgcttgagctttagcaagcttcttctccaacgcgagaatacgtttagctaagatctgggcattcacaggactggacttgggatcttttgaaggcggtcgttcatcagatggttcatcaggaataaccccaggaaaggggaacgggtgagggacagagggccaaaattgcggcgacaatgatgactcagatacgttgtataccgtagatagaatggatgccatgacctcggtatagatatcagtgtaagtcttctcagcgtagtactcctgaagcatggtggatagatatagtctaggcatcaggtacttgaaatcaagattttgaaaggttcacaatacacaaagcatgaccgtacctttgcaggaaggccgagaccatcttgataaagccaaagaatttgcttttggggatcatctccaatatctccttcctgattcatatacaaagacggtatgtatgtgggtcgatatacatcagttctagtcaactagtgaaccagacagttcctcgacaggagatcgaggtacttacgttttcgaaactgaagagtgagtcgattccctttgagtgcaagtaggacaacactttggtcaatttgtctttccttctcttggcctcttctttgctacccttcttgtggtcgtggtgcttcggatggtgctttggttgatgatcgtgatgatgctttgaatctgtctcgatttcctgggcgtcaaagactgcatcatcctcttcctcgtgatcttcgtcatggcttgtgtaaacaacagggaagagagatttgatgtcctcgataagaggaacgaggggataatacgatagtgcatcaagatgatcctaaaagattcaagagacgaaatctgcatcagctatgttcattgccgacacaactggatatgctttggtctgaaaagtctcttacctcagccatgcagtcatcaaacacagtcttgagttttaacaggttacttcgctcagcttccttctctggattctcaaggtcaatctcttctgaagcctttaagtgcgtcaagacatcaagcaggattttctgttggtttcggcatgagcataatgatttagtttaagaatgttcatcgacgaaaatgatattgacaaggaaagcctcgcttacctgattgttcttagcgacctcgttgaagcttccgtatttacctttgctctttggcaatgggtttttctcgagccatccaccggtgaacgcgccgtaaggatcctcacaagggtcgatcgacgcgtctagagcttgcaggatcgatgaagaaagaagaatgcaatccggagttaaacagggggtctgtgccgacaaagagcgaagaacaacggaccaacatcgaacgatgtcaataaagaatacgacaagatatgcacgatcgttgaacaatcgatcaatagactcacaacaggaggaaggggaacttcagtaggcgtagggacgggagccggtccaacaacagtggtggtcgagatctgggtagttgtagccgtagctgtagcggtagcggttgaggtcccataagaagtcgaatgtctcgtctttgttaccgtcactggcggttgattctggatctcatggagcttatgctgtgacccagagaatagcccaatgaatatagctgagagcaaaaggaactgtgccatgattcggagggattcataaatagatcttgatcagttggatatatttgccgcagacggcttgttgcgagctagaaagatggaagaagactaaggaaccactcacgagcaaaactaacaaagccaacaatttttccaagagagtcaactctctctgagggtcggacaacctcttccaaaaagatctccgaggaggatcgatgtccgatccatcattgaccctcgtgagaagaggagacgattcttgagatgaatcatgagcgatcgttcaagcggttaacaaatgaacctcccgtagagatgaggaacacagacagaaggataaagcttaccaagatcggtagatgggcgagctgtcgcttcggccatgatattttcaagcaattgtataaagctatgagatcaatctgaagagtggagacaaggtggagatgaagaaggacgggatgggttgtcgtcgacgaggaggaaggagatggaaagcaatcagagcgtggccacgcggccaaattgttcaacgctcttctttcggtcttgagcgaagaaacaacaagattgctcattgtgctcatttctcttttcacgcagaattcgaccatcatgcgattgaagattcatcaaaccaagcaacagaaatgaaagataaatccaagtcataaaccccatcattccttgtctccctacagccaacctcgtatttgtagagaaatttatcatcaggtatatctcagacaaccgtcaaagtctctttatcttcctcttcgatgatcgatctctcccacatccttcgcccttcgtgcagcgtcacacttcccagcccaaacgcaagcaccgtaccaaagtcccggagactcaacgcctgcgtctggaagaccccctgcaggaaaggcagatagatcaacccgagctgggcaaggaacgagatcgagcatgtcaagaagagcatcttgttctggacaagtcggcagctcaggcccctgttctggatagcagatgccaggtcaaggaacacaaacgtcgtgaacgtctggagagacagtccgtcgagcacaagatccggatggggtgtgtcagtagataggatcatgatgcacactcagatacactgtcccgccaaccagaccacaaactgaccatagtctgatcccgtcgagatagtcgcccgtcctgggtttcctgaaggaacatgtacagcgtcccgaccacgatgatcgccgccgagaagaacaccctggcaaacagtcgcttgctcagaatcggcgcgttccgaggtcgaggaggtcgcttcatgatcgccgggtccaccgggtcgacgcccagagcctgggccggaggacctagagccagccagccaacaacacagacaccaagacccagcggtaagcagtccgtcagcgctggaagaacaggtgcacgaacaaatgcaagaatagatgcaagtacagatgcaagaatagatgcaagcacagatgcaagaacaagtgcaagcacagatgcaacaacagaatgataaaagccaacgaaccgtc

SEQ ID NO: 635 - DNA, 1841 bp, Xanthophyllomyces dendrorhous
catcaaacatcaaacatcaatcatcagcacagcgttcatggaagtagcggcatcaggtgtacagagaaagcacgacagaaagacaacaactgaccttcctccacagccggcaggatcgtcgcaaagttgtcgtccaccaggatcacatcggccgcctccttggcgacatccgtgccggacttgcccatcgagatcccgatctcggccatcttgagtgcaggcgcatcgttgacaccgtctccggtcatggcgacgacctcgccattcttctggaacgcggagatgatcatcatcttgtgtttcggggtcacccttgcaaagacactgatcccaccaaccttctcctgaaattgtctttctgacattccatccaggtctctccccgtcagacaacttgcacttcctggctgcatcttcaatcctagtgtcctggcaatgctgatggccgtctgttcggcatccccggtaatcatcactacatggatcctcgctagctggagatgagcgatagcatcggccacaccctttctaggcggatcgagcattgcctggaaaccagcaaacacaagctcaccgccaccaccaggagaagggctctcaaagtcggtggcggaaccaattccgtaagccatagcgacaactctgagtcctttagaggcgatttcggaagctttgttgagtatcgcgctcttgacagtcgcatcaagcgaaggagtagatgagtcggagagatagtagaaccgacatcgatcgagaacagcctcgatggaacccttgaggtaaacgagctcctgtgcgtcagaagatgaggaaagcttcccagagacagccatatacttggcatctgatgagaatgggacctcgaccattcgttcgaatttctacaaaaacattgatgagcaagaccagacgtgttatgatgaagaaaagaatccagaaagagaacaccgaaggagtactccttatgaaattagaagaaagaacgtacacttcgttgatcttcgaaaccaaagacttttagaacgttcaagatagccacgtctgttgcctgtccaacgttaaggccaaattcgttttcgaatgagttgttacacaagttcccgatctgaactgtctttcgaagagcgggtgatacatctcgaggaggatgatggtcgtcgaatacagttgtctcgtcaacagtgtagatggtagtaaccgtcatctcattctttgtcaatgtacctgagagagccagatgaagagcacgatagtcagcatagacaagacgcagtaacgcaatgaaagctcaggagatataaactgaccagtcttgtctgaacaaattacgcttacactgcccaaagcttccacgctaggcaatttcttaacgattgctttcctgttggacatccggagaacccccaaagcaagagttacagtggtgacgataggtaaaccctcgggaattgcagcaaccgcaagagagactaagagaaccattatcgataatatatcaacgaagaatatacgaaacgagtcgcgcaagccaaggcagagagaacttaccaccgatagtgaacatttcaagccatgaccgtttctggaaaactccgatgagaatgattattccaatgataccaaacgagatgattgaaagctttttggccagttcgtccatcgagatctgcaaaggggtccgtttctcctcaacctatacagcacattcatgaaataaagcttcagttgttaaaccacggttgccgaaatatttatgaacatataacatctacttacgtcctgcatcattgagaagatcactccaaactccgtcttgctccctgtagcaacaactacaccag

SEQ ID NO: 636 - DNA, 476 bp, Xanthophyllomyces dendrorhous
agcatcgtgtgagtcagcatcgcgcaagttaccagactcagccaacgtagctacctcacagtgcaacgccgtcggccagacagcgacttcgccatcgccttcgacatcgccatcgccatggactcacctgcgttggcgatgatgacatcgactctgccggcggccttcttgatctcctcggccgccttgtggttgctctccgtatcggctgagacgagctcgacgacgttgatcgcggcctcgctgctctttgcgagctcgtggagggcggtcgcgctggcaggcgtccgaacgccagcaaagatgacgttcttggggctggtggcgagtgctttgacgatgctgaggccgatccctcggttggcgccggtgactgcagaggcgaggcgaggcgaggcaaggtaagataagacaaggcgtcggggatggtgtgagcgcggtgcgaaaacagaagcacgcagagaggcaaaagagaa

SEQ ID NO: 637 - DNA, 52186 bp, Xanthophyllomyces dendrorhous
catcatcatcatcatcatcatcatcatcatcagcagcatagttgtcgccttgaatatgtcttccccaccgcgaccatcggcccctaaagcgcctgtttcaaacttagcaaaccctcctcgagctcctccaggtcgacgaacaccaaacccaattttgttcttagggattggcttactctcgtggttcgcattcactacggtcgtcaataaacgggtggaggagaacgcgttggctggagggtcgagacctcaggctttcaacccgttaggtgcgtcaactctttttcatcaagcttgttgactcaacgtgtgtacagcgaacggcagggagagatataatccttgatatacagatcggagagattctttgagctgaagacaataaacgggagttgactgttcaaactttgtatttgctcttctctcttatcttaaccaaccattagtgtatagtgagaacatggagcgagatccgacctttgtacctggggccaagagacatcatgaatgagcatgttacctctcaaatgtgattttcataagatcaacaaggatttatcacagggtgttggggtgaacgttttgaatcgatcggatgtgaggacagtgagagcagtcaagctcgaacgtcgacatcatctcttctcttgtgtaaatatgtgctaatcagctgagaacaacgttgggaggattcactgttattgatatagagaataacggacaatcaccaaatctttttacagtcttatttcattctgtatgtgcatctggcgggggtatgagagagagacgttctttcgactttttccgaagtcttgcgccaggctgtctatctcttctctttttctctggctttctatcgactgctaacatactattcgcctaactgaaagaaggacgagaaacaacactgacagtcgctggtggctggttaaagcgaagaaatcttgcgaatttcttcgctttatgccttgcaccttctcaagtgtcgtcgctttctcaagtataccatattctagaactgttaaatcaccatccatacatgaataaagctatacaaatacatcctttcaagcattccgaatgaggccgtatgtcttccaaccgaaccaaccagctgagactactgtcgaccctacgaagaagactgaaacggcgatcatttctaccaaaagagatatatagtccttgccctatttgtatcattgcattcgaaatcattgaagaaagggccctcggtttcgtatcagctcggaactttcaaatagaaaagagtcacaaaagaagtaaagactgacgagttgcttagccccggcttcatccttcccgatccattcctccttaaatgctttctcatccaaatcctttgagccatctgttctaggtcgatacacactctttctcgctccaagactcatcttgaccagccggccaagtccctcttgggagacgcggatccgcttagcggaccatcgggtggaggggtataccgattggaaatatgagggatatgctagagcgaagagtgtcatgtgctatattgaggtgacacataaggaaaagagtaaccgttcgacatataagatcctctactcatcctgaagtagagagagcgcaaaggtccggcacagaacggaacaaaggaaagacgaaccagtttgatctgaccaagccatcctccaaccgcgttgactccaagccgatcacacaactttggaccgaccaagaacctagtcaagtttgagtgataacccaacgttgttcttatcggcggactgtcgctcatggcaatcaagatcggcatggtcggtggaggcaacattctctcattgaatggacatccagagagcgttgtgtttgtgtcactaataacagtatccgttacacattttaatcccgaattagtggcagtcgtagtggttgtagtatcatgggagtataaggcagagggcgcattgggtgaagggaatatatgacagacgacggaggcgaggaatttgcaagagggtacgacctcggtgaaatgtgacttgagcaagtctggtgcgattcctagataaaacccgatgtgtcttgagattaatcaaaataaaaacaagtccggaaaccaacggtcaactttcgctttgtcttgatgaacagtgtatatcgagaggatggactaacctccatagacggatataatctctttccgccggatcttggccatctcgatttgtcatacgcatctttcttaagcaccagacgggtacgaccgcaaagcctgctaacgtgcctgccatatcttccgcattcaatggcacgtcgtcatactgctctgtgctactcactggtccagtctcgtcctgttccttgttctgggcgcttaaccgagacctctttgcccaaagacgttgacggaccgttccatgcaagagtcggactcggacagaggatttccaaccttcaccagcgagaggaagggaatcgaccctggaggaggaagcgcacagtttgggaggcagaagagatggaagtccgcgccaggttctctgcacattgtgtttcttgagatcatcggatgcatcggacgggatagctatgctgttttgattcgagtattcgttcaattttattttggtatgagtataacgtcttcgtagactaaaggcgggagcaattgggactaacgggcacgacatgacgtccaagacaaactgagcagtctcactcaaccgttcacgtatcttggctgatgcttcttgagtgattggcaagtagtccaacccatcgtgtgtggtaggtgggatcaaataagatgctcgatgtagttgagcagtgattcgggggctgagcatatgtgaaagaaattagcagaagtcaaagtcagcaagtaagaacgagatagaactcggatagaaaacatccaagcgactaacgcagagaacccagatgccaaagagaaatgaagtagagacgcaaagattccacccgctgtgttggagccattagggaacaggaagaagagtgagatttccgatttcgtgactatcagccagttcaccagagatagaaaggaaaggactcacaattgtgccagaagaaattctgacctcgttcgagctcgtcttccgtgacaaccagctcatcgggaggtggccttgagacctcgttccatagctttatagctaacccggggtttccttcccgctgctcctcatccgctttggtagccaagaagaggaggaggtcttgatttgccaaatttgaggaggaaagtgagctgagaaagtcgtcgaccggaggatcggccatgcgtgaatatctgtttaaaagacagaatctggttctaatcaaggcttctggaacggaatgaacatcatggttggatcggtcaatagaaagaaacgaaccgatcgagctgggaagcagacagacaatcatcgtcccactcaaacaaatgatcccaaaactcgatatgatctccagctttaaagtgatctgaatcctggtttgattgcagatggatcactttcgaggggtccaccgggcgcgagaatggaggaacttggaacggcatgtgtggatgttggggtcgatgtggatggctaatgtggaagagggctagtccgatcattttctaagcagatcatcgaaaaatgttaagataagataaaggattcaatcctccacttgatcgggatgacgttggtcgtctcccttctttgccagccatttcgtaacaaccatcttgtctaccctacacatacacacacacatacacacccactaacaaaatcatcatggtaaagcctgaatcagatgtcatcaaagaattcaacgagctcgtcaatatgacgcctcaagaactagaggattggctcaaaaccgaggactctcaaggcgccggctggcacaaccgtttgttcttcttttacttcttttccttgttcgtctacgcgtcataatcttaacccatctctttggcttggtgatctcgaccttctttgcacgccatccatccgtgtgtgggacctgtttagccgactcggctgtaggagaagggaaaggaggagaagccgtaggacacgaatctggtcgacagatcatccagatcttgaagtctaatcctgagaagaaaccagatgggtacggaaaagacgatgtggagcatatgagacgggttgtctcttactggtaagaattttctctgtttatcttccatagccaaaatagagcgtgtacacgatcagatggatgggtggatggactgacttccagttgatcgaaacttttgattcacagtaaacgacacaaagcaggggaatcaagcgggaatagctccaaatcagaggaagaactgaggcagacgaaatcctacaagtctctcaagaactggtttgtccttcttctttaattcaaacattgtcgctcttattggttattgtatctcgtctctcttgagaccctgtcgactcaacatccgccttttctccctttcttcgaactctgtttccttggcgaactacgtcgtcgaacaatgcctcttcaataaaggggacacgatctcttgaaatctcaagggaagaagaaaccggctcattcctcgtcgtctccggccaaatctcctcccaagaccaaacccaagtcccagaaaggaagtccttcgaagccgtcttcgaaacagaacaaacctccgtcgaaatcaaagacacccaccaaagcttctggttccggctctggatccagcaagaccgaggagaagccgaagacgccaaagaagagtcctcagaagcaacaacagaaaacgccaggttcgagtaaaaagcctgccgggaaagagaaagcgactccggagaaatctcctctcaaacagaagtccgagaaatcgccctccgtcagacaaacccggtcatctgataaaacaaagggcgacgagaaacggcaggccgaagaaggacctacgaacgagcggtcacccaagaagaccaggaaggagtgaagtgccgaaccgtcaaagagaggttttctcttgtccggtggtcgcttcgtgatgcgaggatatgcggtgcgaggataattttagctagcgtgtttatcattgtattgtatcgatctcgatgtctgttcacaaggagccttggtctatttctgaaaagagtctaaagtatgaattgaccatataggtcgtttgaatatggggtatatctagaacgaatagtacgtagaaatgaattcctgaaagtagaattacatgcacggccaccaactgaacaatgatgggaaggaggaagggatacgaaagacttgatgcagaatacgaagagcatacaactgattgaatgatgatgatgatgatgattgtgttttcgagatgaccgtcgtgggagtacaagatagagatgatgacgacgagaaaaagataaaagaggcaaagaaagcaagcttggacttttatcatgctccaaagttccatattcgctttgaaaaaggagaagcaagaaagaaacaaaaccctcggtcaactcccagctcatgaagaaggatgttatcatggaaggaactcacaacttctccatcttcactaccactcagaatctgagtatccgtcaaactcaaacaggtcactgcctcccgatggccgacgagggtttgcgagcactttccgtcttccctagaccaaactgagagaaacgcatgcgataagcaagtcagatgtgacggccggagaataccagggagatgaccggggataggacaagagctatataacatacctttgatggttcggtcatgagatgaagaaaccactcgaagagggtccgcatcgactgaccagacaccttcgactatcgcagtccgtgcacaaggaatcaatcgaaaatcagctacagaaactttacagttttcgtgaaaacgaaaacgaaagaccttcaaagaagaaaggagactgactgtgtccgaaaagcgtctttttcgtcttgccagtctcgacatcccatactcgaacggtgttgtccaagctggccgacatcaacaatgcctgtttttcatccaccctcgacctagctggtttcgtgggtttcgggctattcgaagggttagatatcgagaagtcgcccagaggaggtgtcgacattctggggtctgttgggtttatactcgggtgatgagccatcaaatgcggtccggccggcagggagtgactcggcgttccatacacccccaacgggtttggctcgtagtgcccacttcctctttctcttgaatctgccgactgtttcgctcgcgcagcagtttcttcctcctcttcctcctcgtccctatcacggtcaacgatgcacaacctaagactttggacttgaccgacatgtccttcaaatattctgacgcagtccttggtgttgagatcccaaagtcggatggttccgtcatccgagccagaaaagagcatcttgccaggatcgattcctgtggacgtgacaggtggaggggtaggggcggctgtagaagtcgaaggccaatcgtgggaaaacgaagaagcagaggacgaagtcgagccgtcccaaaggacgacggagtttacccagtctcgatggcctcgaagggtaaaacagtcgcctgttcggaaattccagatctgggggccgaaagaaacagttagtatgtgtgactatgaagagataagacaggtcggtcggacaagaaaaataagacataccttgatggtggagtccgcacttccactggcaagaacgttcttgtcataatttaaagagaccactccgtcggtgtgtccacccaacgtccggatacagacacctgtgcgccaattccagattttcatcgtgtggtccatgctaccggtgataaggatggcctcatcaaactgaagcgccctaatgcctctggcatgacctctcatacagagaacctcctttccactctcaagatcccaaactctggccgttcggtcgtaactaccggtgatcataattcctttgccaacacctccgctagcaaactttgatcttgatttggatgcatccaatttgaatcgttcgccgctgaggacctggaggcacatgacgccatcggtgtggcctttgagcacattcacggtataccggcctttccgccagtttcgttcgatcgtcaggcgttcggtgtagacttctttccacggtctagtcaacgttctacatggaccgaacggccgctttggtaggctggcgctctgggaacgcccaccagatgatggcggaggcgaggtagagaggccgcgggaaaaggatcggtctgaaggggtagctcgtttgtgagaagaagacgagtcgttagcctcgtcttccgagccgggagagtcccgcttggctcctcggggagagaccgggccggattcgatctggtgaaggttggaaggtgacggtggttggagagtggagggggtggtgatacatgaagaggaagaggatgagttctcgggaccagcgagttctagggggatatgtggttggtctagatgatgatgatggtggtggtggtggtgatgttgatgtgaaaggtgatgcgagtggttgtcttctagcgaagtcgcctcaagagcgtgaatggtaggagaactgggagcagagtcttcgtagtgaccgtctatttctaaacgaagccttcgcctttccagcaatggcaatccccagccgcctgttaagagaagaagtaaaggcagaggcagaggtcgcgtcagcgagaacaacgaggcaacgagatgtttataaagagcgaccgatcgattgacatacactttgtgcatttccgttctatgtgttgggcacacatgcctctccaaagaaagtcgtcgtcggccaaacttcgccaatgtttgctgacctgaacggcttttccaagcgaaaatgcgtcgaggtaggagagaaccttgagggagacttctctaggaaacaaatcgaacgggtccagacggatgagatcttgaacctgggtagatagaagggagagctataggcgaagtgaaccgcataagagaaagtaagaaagaacgggacactcggaagtcagcacggaccgaggtacaaaagtgaagaggatcgagaaaaggaaacggacctggctgaaacaacacatggtcaagagccctttaagaatgatctctcttcttgagtgattcgagctggagaaagtggaccagacggcgttgatggcttgacggtctgcgagcggcaaggcgtcgagggactaagaacaaagaaaacgacaagcaaagatagagttagaaccaagagatctcgatcagcatccaattggacagagttgaaacagagaagagataaagttaaaactcaccgcctgtaggttagcgttgataccctcgtctgccattttctcgtgtctgatgaaagacagagagagagagagcgagaggagaagtggaggacatagcagtttcggttgtcagtcaacgattcgactttctttcccagcctcaaccaacaaaggtgaacgagagtaggaagaagggaacagggaaaagtatgaagaaggatgagaaggaggggtgggccagggaagagaaagttgggtgaacaggaacgagagatgccgaaggattatggaatccgagaataactccccacaaacgacgacgaccagcgaccagcgaccagcatacatccactgaacctgcccaagccagcgtacacacacacacacacactctctttctctctctctctctcaaacatacttgcagtcaaccacacatatggaagtgggagagcaaagaagatgacccacctaacacatagcttctttcctttacgaaacaaggcaaggtccggtgcctggtcgtcattttcggcgtgggccggtgggcgttcacacaccgagtcccgaagcgagggcacgatggacattgctaaaggatatgaatgtgtcgatgggtgtgttgatggcaactctatataaggggaagtggtggcgttggtggtggtagttgagatgatggagggatccatgatgttaaaaccggcagtggggcatatgtcgtcctcaacggcaaggagaacgaaggagggaaagaaaaaaggtgaaagaataacgcaaacacgcaagaagacgcgatagagattcaacggagtaattgttactattgaatatgaaagtcttggttgaatctgtaatggaagtgtagtgtccggtatcgagattccaaaattaacggaggaaagctcgtcatctgtcgctcatcccatcagccttgcgccatcgagcttgactgtttggccattccgccatgtgctcaccttgtgttagtgtatatcgtaccctctgtgcgtcagcacgtgtatccttctccttatgcatcagtctgtgtgagtgtgtgagtgtgtgagtgtgtgagtgtgtgagtgtgtgagtgtgtgagtgtgtgagtgtgtgggtttgagtgtgtgtatgtttatgtttatgtgtggttctcatcttttcagtgtgactcatatctgcttggttgtatatctctgcatgcaactccttctctgtggagattatgggaatgatgtacaatctttcccaagaccagtccgacgcagtgtatctcacttcaactgatctaatcttctcttctttttcttgtctcttaatcatcacattgagaatttatctagttccgcaaaacccacccacggcttaggaagcctggatgccatccacagcctgactaaatgagttcaatcacctgtctacgtcttgccacattaacgagcacagcagtggtaacatgtgaccgtcttaccctcctctaccctctatccaccttcagagtcacaccagtcacacttggcttttttttttctgcctttttttttggtcaacattttaaatctctcacctttttacaattcccaaagcccaaactttcatcccaactcatccctcactctcgacctcacccctctccccttctttgctcaccatcagggtcaactgattgacaggatgtgagtgtgcttgctgtcatcgcggtcttgtccacttccgagccgtctcgttacagaccggaagggtcgactgatcgactgaccaaactcgttcctggccgcctcttacgtttcttttcactaccacatgaaacctactcgatctcctttcttcttcctcatctctctcttcatctaggttgacattcgaaggctgttccgctatttcgtcggctaagctcgctaggctggtcgcaacgttgcaaaccgttgagccaaagatcaccggtgcttcctcgacattcattcacctcatcgatgtctcgtccacacaggcacaggccacccttgcggacgaggcctccaccgaacgacacattctcgatgctctcctcagatacggtgataccctcgactctacccttgatccctcccatcaactcactcagatttggatcgtccctcgaatcggcacgctctctccctggtcgtccaaggcgacagatatcgcacggatgtgcaacctggcctcccatgttaaccggatcgagcgaggtgttctcttcaccatcgcctctgacggtccaatcgatgtggcctcgtttacatctaaagcaagcaatctccttcacgacaggatgactcagtcccttctcctagagtccccacagagcgaacagatcttcagccgctccgcccccggctcgctcaaatttgtggacattctctcagactctcagcagcactcatccgctgaggacggtcacacctcccaggtgctctcccctatggatcttctcctaaaggcaaacgtcaccctcgggcttgcactctccccgacagagctctcatatttgctcaaagcatacacgtcacttgacccgccgaggaacccgactgatgtcgagctctttatgtttgcccaggtcaactcggagcactgccggcacaagatttttaacgcacagtggaccgttgacggaactgtcaaggagaactcgctctttagcatgatccgaaacaccgaaaaggcctcgaccgttgacggaaagtccacaactatctcggcttattctgacaatgcggccgtgatcgagagtgcgtccgaaactatccggatgtttgctccttacggatcggatgtcgatccggccacctccctctctactccttacagtcttcgaccggccgacgcctacccaatcctcatcaaggtcgagactcacaaccaccccaccgcggtttctccgttctccggagcatccaccggatctggaggagagatccgagatgaaggcgctaccggtagaggttcgaaaccaaagatgggtctcgctggtttcatgacgagtgatctcaacctagacggttggcgaatgccttgggaggaacaggaggatgtcagtgaagatgacaaggttggcaagcctgcccacgtctcttctgccaaggagatcatgacttccggccctctcggatccagtgctttcaacaacgagtttggtcgacccggacttaccgggtaagtccttcaaagctcgttgcgttcatgtcttattccccgtgcgcgctaaatcccatcgtcttctatcttcttcctagtttctggcgaacgttctcccttcccgttccttctgccaccaacacctcagtcgacgctgtcgagatcagaggataccacaagccaatcatgctcgctggtgggttgggtaacgtccaagctgcgttcgccctcaagaagcacatccccgccaactcccacatcatcgtcctcggtggacccggtatgctcatcgggcttggtggaggagccgcgtcttctatgacgtctggcgcgtcttctgccgatttagactttgccagtgttcagcgagagaacccagagatgcaacgtcgatgtcaaatggtcatcgacgcctgtaccgggcttggcaaggacaagaacccgatcgagagtatccatgatgtcggagccggaggattaagtaatgcgctccccgaattagtccatgactctgaccttggtggtcggttcgagatcaggaacgtccttgttgatgatcccgggatgagtccgatggagatctggtgtaacgaaaggtgagtctattgtgtgcctgttcatatgtatcatgtttttccagactgatagattcgtatgtttcgcgttatttctactccctcttagtcaagagcgatacgttcttgccatcgctcccgatggacctaacctcgctacgtttgaggctatctgcaagcgagagcgatgtccgttctccgttgttggtgtggccaccgaggagcaaaagttgatcgtgacggaccgactgctcggctccgagcccatcaacctcgatatgcccatccttttcggaaagccccccaagcttgagctcgaagctcacactgtccagcccaagcgaattgaatttgattcttctctcaagtcctacttgccctcccttgattcgggagccatcctcaaagaggctatcgatcgggtcctccaccttccggccgtcggttcaaaatcgtacttgattaccatcggagatcgatctatcaccggtctggtcatgagggatcagatggtcggcccgtggcaggtccccgtggctgacgtggctgtcaccagggcttcctacggtttcgatgacgttctcgagggagaggctatggcgcttggagaacgaacgccgttggctttgctcgacgccgccgcttcggctcgaatggccgtgggtgaggcaattacgaacatcgccgcttcctcgatcgagtctctgacgaagttgaagttgagtgccaactggatgtcgccggcctctcatgctggagaaggtgcaaacttgtacgcggcggttcaggctatcggtatggatctctgcccagccctcggagtgggtatcccagtcggtaaggactcaatgtctatgaagatgaagtggacaaacgaacaaggatcttctagggaggtcacctctccgatgtctgtcatcatcactgctttcgcgcctgttaaggatgtctctgccacttggacccctcagcttcagaccgactccggagagaccgtgttggtgttcattgatcttgctaagggcaagcagcgactgggtggatctgccttggcacagacgttcaagacgattggatcgactcctccggatgtggaggacgccgaggtaatcaagtcgttctttgccgccgttcagacccttaaagaggatcacccagagattgtgctggcctaccatgaccgatcggatggtggtttgttcgcgagcgtagtcgaaatgtgtttcgccggtcgagttggagcaaagatcgacctggacgagattgacagcggctctggtgaaacccctcttgaggctctcttcaacgaggagcttggtgcggtcttccaggtctcgaaagacaaattcttcgaattcaccgaggtctttgactctgctggattccctcacaaggatattcacttgatcggacgacccaacatcgagcatgccgaccagtccatcaagatcatccaccacggctctcagatcttctcctccaccagaggagaacttcaacagaagtgggccgagacgtcttaccgaatgcagtctgagcgagacgatccggtcggagcgaagcaagagtttgatgccatccttgccggacccgaagagtctggtattcgatacaatgttaccgctccgttcttgcctctgatcgacacgccgtcgtgcccttcgccttcgccctacgcgaattcgccgaagccaaaggtggccattcttagagagcagggtgtcaacggttatcccgaaatggcctgggcgttcgccgctgccgggtttgaatccgttgacgttcacatgtcagacatcatctctggcaatgtctcgctaaagaccttcagaggacttgccgcttgcggaggattttcctacggtgatgtccttggtgccggtaacggttgggcccaatccgttcttcttcactcgactgctcgaaacgagttttcggcgttcttcaaccgggaagacaccttcgcactcggtgtttgcaacggatgtcagttcttctctcagctccgagatatcattcctggagcagagaactggcctttgttcaagccgaaccagagtgaacgattcgaaggacgggtatgcaccctcaagattgagtcggtgtccgaaacctcagtgttcttcaaagagatggaagattccgtcctccctatcgccgtcgcccacggagaaggtcgagcggtcttcccgtctaccgcttcctcctcttcctgcatcgtacctgctcgttacgtagactctaccggatcgccgactcaagtctaccctttgaaccccaacggttcacctgaggggatcgccgctgttcagaccccgaacggaagagtgttggcaatcatgcctcaccctgagcgagttgttgctcgggatagcaacagttggttccctagggagatgaagaatgaaggccggaacggaatgggtccctggttcaggatgttccagaacgcaagggactggtgcgcttaagcctgttcttttctgactttggttgcttctcttccatttttttcccctttccgttttacttgttgttctacccgatggcggaaacgcgaaaaacgtttttttcttccctccaccaagaaaaagaagtctacaacatgcaaaaaaaagccgacaatagactcaatattctctcataattctcattttttttgacctcggttctgtttctcttaactttattctctcttggcttttctatttcctatcatttgcctcttctgtttattcggatgtccttcgttccattttgtgaacatctgagtcgtcataaagagacaggaaagaagaacaaactaaaacaataaagaatatataggaaaaaagggggaaagaaagcctagttataagatgaaagggcttgatctgtaaagcaaaacaaatcacacgaaacaagaagataataattgagggtggagtaggggtttggtgtgggtgtaagagatagtgaatgagtcaacggaagaaccacaacaaagagatccaaccactcttttgtaaaggattttgattttctttgaatctagatcgggctaggtagggagagtgcagtgcgacgagagaaagagaaggggagcgagggaaaagtaactctaagcggtgattgccggggcggaaccttcgggcactacgcaaacaaaaaaacgaagaaagatatgaagcgcaaaacgcgtggttagttagagagcaaaaaggcttgggcagggcagtctatgagatgccagcgcgtgggtcgtctaatcttctgatcattctctgtctttggtcctctttgttctccctctgattttcttgtccccaattctccaatcgatgcggttgatttaaatgtgacaaaaataaagagaaagtgaaaaaagacctactttgcggcatctgaggtcggttcatatcagtgaagaacatcttggagaccacatatccagcgccttctatcacacccagcaagataccacaggtcactgctcccacagccgctcgtttcggtccctctagtttgcgttcgaagcaggtcgatagatttatcgataggaaagcggttgaagacacacaattttgagacattcgtgccatgacatgaacgatgttaagccaatgtcagtttcgttatttttctctacttattcttcttcttcaggactgagaaatgaataaagaaaacgaagaacgcaccccgacaggcgagggttcctcctaccaagaatccagagatgatagcgttccaagcatcttcctttccacgatagtgttttacactgcagtcatatgtcgagaagagacctatggagaggaagcacacgccacgaacagatgagtgtgtgcttctgaaatacaatccacatgaagaagagaacgacggatcagaaatcattgagactaacctccccagataccaaagtttcctggtaaagaaagagtcaaatcgaatcaaggttaattatagcgggcctaaggtctaagcagaactagagggatcatgatatcactccgaagaagagaacagacctccaagaaccggagcacgggccttgacggccgaaagcgaaccaactagtcgggatccctagagtgaaaggacaagtcgaatcggcacatcaaacgcaatatagaagataagaaagacggatacgagaccagaacaagcaaagtttcgcggtggattcttaaaaagacgatgaaataagacgtacacgaggagagtttcgagctcccttgattgagtgccagatagctcctccggtaagacccatggcgctgattgaaagagacggaatgaaagagtgtacgtgtgaatatgaatgtggatgtgaatatgaatctagaccaaaatacattctacactcacaaggctcctccaaaatcattgagaatgacccaagggctagattgtttagtcggatcgagagaatgagacaagacaagcgtgaaatgacaaaaaaggaatacagagaggaagagaaaaaaaaggagaaagaggaatgtcggcaaaaaagaatcagtcccgtctatcagatgaataaaaggcatcatggaaggacacgaaccatggatctcgagaacgatcactgtgagacatgataagaggatgtgaacttgaagttgtgagtgtggtgttgaggatcaaaggtcggtggaagtgtcgaggtgaaggagagtggaaggacgagtcggtgaacctgaagagaggtgagtgatctgtaacctgcggttacacgattgttcgaaaattgatcgtgccttttttgtcagggacgtcatctgggagataaacccctgtaaccttctccttctcctccttctttgttgcacgtgcccctccattgcatcaatgtgcaggtatatagtcttccagcacggacgcttctagcatatctttattttattttattttattctacctttcttcttgtgtgtaatcgtatggatctgaggacgatttacaggacgggatacctctgccacccctatcaaagtctttcaagcttggattctctgttaccttttgtatacttgtatcttgatctatataaattctgttctttcagcctcttcgccttgtgtcctcgtcacaaccgcctcagcaaatgatcctgagcttcctccttaccaggcacatttcccgtctggctacgatcctcgtaacctccccgctactatctccactctggatcgaaacactttcatcgtcatgatcacgtgcataactgttaaagagcgttatctgctagggatataaaactcagtgatttggagagtaatcgagtatactggcttgagacaagggtggacactgagactcctcggcgcagattttggagatgtaagtgaagccgaccagaccgtcagcgcgccactgtcgattagcctagagactcaagagttatatgtcgattgcgcaaagcaactgtccatgcccaaggagaggagtagagtagagtgtgtaagctgacctcttatcttcttaaagttgtttttcgactattcgatgctggtttcatcttgaaatgatcataaaacttcttgcttaacgttgatgctcaacgacttgtccatgatccactttccctcgtcaccttcgacgtctcctttgtagcatctctttctgtggacttttctattatgggttactcgatggctcaagagtttgatattggactactctttggggcttcactgcacttcttcttccgaaaagtacgtctggcgtctgtttcggtcacatttaggttctgtggctctcgttcaatccttgcgactgactcgtttgcatattgatgtagcttatgtatcactacatcaacatccatctcgcaccccgcatgccagaacgtccgtagatatgatcgtccaagctttgcagaacttgtcttgcagtggaggttctttccaagagcttagcagtgaatttttctttcgtgatctagcttcaatacttggtatattccggttcacaagtatacgatgtccttttcatccttagagctcaacggaaagtttgtcaaccgtgttacgagtacaatgcttgcacgcaagaagagatcgtgggatatgtcaggagcgcatgtgccatacagctacatgcaactacatacagctatttctgatctaattcatacactcataaacctccgtcttcttttttattccctttttgacagctatcgactatagtctacgtagagatatcgtcaagactctccgtttcacaagatcataagataactggtctagcgcgttgcgctcaattgaagccgtcattgataaatgtgacgagcttggccgtccgatgttatctggtgagctagagatcgacattgtgttttgttttgtgcttctgactcagtaggtttggtttggtttggtttggtttggtttgtagggttggtaaacttttatacggctaggtggttgcataaaatgaattgtgtccggcctatgctaggtaagcgcgttgttctttgccctttttctgttttgtgaaacagtgggttgaatttgagttctcttgatctctaatctaggttatgcacatacgagccggcaagcttattcacaggccaatgcccttgcattgtcgaggctggtcacctccgagtttgcagtctctcttgcgcccctcaataaagatatcaacggcatcaagttcctagtgacttggtcgcttcatgcatggctcgaccaccttcaacctttccggatctcgcgccgctgttatcttctctcggttcatccgtaaaacatccgctgggcgaagagaatgggagcgaaatttatagtgaacagttttcaccctcagagattgagaacctgacctttgttcgatcgagtctagtcttggcccgtgaaaaggtatccaattgagccttatcttcccaatttctatgttcgatcctcaccgatatatgtatacacatcaatcatgctacaagaacctgatgcgataagtgtgtattatctttgatccggtatttgtttggactgtgcgctgatatatatttgacaacaaagtggttaaactacttcgaattctcctccaagtaagtgcacttattcttcttcggtcagactcgctacctcagtcgttccaagtcccatattcctggcaaaggttctgtgtcatgtgattgcgactttcgaaagctcactgactggtcgacacggaagatatgcacatcatcgaccagcagttgagggtttgagatgagtttcttcaagtctatgaattttgctcaatattgtttgtctcagtagctaagatattcatagatgagatgaagacatgagatgaagacaaaggaaagataacatggtacgaaggacgatgtcatatgggagagctctcgggcgcacagatgagccaggagcagacgatgagcatcgacaggaattagcgttgacaggaaagaaacaggaacagcggtcgacaagtgttcagccgtcaaagggaatttcgcaggcacagccggttgatttcagggcagaacacgagcaggcacacaagcgatcgacatctcgccctgatgacgttctctcaaggcatctccagccgccacgtttgtgttcgacatgaagcgcaggaggacggctcaggccttggcaaagtctcgcctcgcagctgacactactgccactgctactactactactactactgccacatgctcagcctgctgtcaggttgggaactcaaggcgatctaaccacctctgcccgttttacatccctcgtcagagggtagagattcgcgccaagtcagcggtccctatggtgtcacggacggtgaaaataggctttggttctttacttgcctttgggccactggctggcccgatcgagtcggccgttgcccggctaggaaagataacattcgacgcgtctcgccttctcaatatccacatgtcgaaggtctgtgcggatggaggggagataccgaatctccccaatacaatacggctctatcttcaggctgttggtttcaacacgcgcgaaggtaatctgcaccaaggagcgccaacactgaacgaagggatcaaccacatccgggacgcctctttccctgctgagcaccagttcacagactcgaagtgagtgatctctttggtgatgacagtgatgcagctggctgtgaacagggactgactgatttgcttttgtcatagataaatgagcaaaatgatcgacttcaaagctcagtcgtggaccacggcctgccagaaccatgtcgtcctgaagatgcctcgtcgggctcctcggctcgtctcttaatggccggagacaaacgtcggagaagtgatccagagccggatcagtatcagtcaggtaaggaagacgagtcatctgaggagatatctgaataaaggctgcagcaataactaacctatcttatccatttgttgattctcggcgaactgtcctcccgcattagctctggaagcagcagtcccgtcctgtccgagagggagaagagagagaagaaagagaagatgatacagaggaggaatcactacaagctgccgcatccttggcccccgagatgcggctgcaagacggactactcgtcgccgggggcatgacctacgcctgttctcgctcctgccgctctcgtaccaccggtcgtcctatgtctttgtagacaccatggctctctacaatctctgggcccagctcaaatcggaggacgcggatgtgggatatatgcgcggggtgactcaggagtctttccgggatgactctgatatgtggtggaggctgtcattccatatatccaaggtcgagaccgatcggcgacagtttgcccggtcgctcagtacagacggcattggagtatctgccggaatgctgagacccatgtcgtcttcatctggcattgacaactacggatggagatgggaggtcgaaggcaaggatcgtcaccgagcagagtatgttccgtgaggtgtgcggccagaggacgaggtcgtggggctggacccaggccgtcggacgctgctctcgacgaccacaggagggctcaacatgtctctggacaacggcggtctggccgagcacggcacgcagtggtctctctccctcaagtcatggaagcaccttgcggggatggaccgagacgctcggaaacagcggctgtggatgaagaaccatccgaaagtgtcaaccactctccgtggtgagtgcctctcacgttcacactaacgttcaagctgactgtatagacagccttactgaccttgcagactgccttgcgcatatcggtgtcttgattcggcttctttctccgatgtctttctccagatcttccttcgttcagatttgccagtctcgatgatctccgcgctgctctcacttcgcactctcagtcctactcctggctcgcgacattcttcgctgctcgacggtggagacgtcttcgctagggcgcacacatcagccgcgagcaagcgtaccaccaggtggcactccgtctgttagctggacgtccacgcaccttcctggcctttggcgacggcgccttctcatcgacatctcgtgggcacgatcctagtcctgtgacgatgatgtatgtcaagctgagggcctctccgctgctccaggtccgcaaagtgcgagagtattggacgtcgaggttgttctcgaagtgtcatggcgagttctctggaaggaacaaagcgtgggcgatcaaggagtgtcgaagcgtctgtcgagtaagtgacctgtgttacaaacttatgatagtgtctcgatgactgatcgttctctgtgcttgctcattgttctctctgcttgctctctgctctctctcagacttggtggaacagagatgtaaacgcatcgtgcaacatgctgcacctagccctgcaccaagagaagaacgagggggcaagaatgccgggctttgacgctgtcgctagtgaggctggcacagactaaacccatgacccatggggatcttggcggtctgtggtctgaggacacccaagtccaaaagggccatgtatttaccaccgtcggttgagataactctcaccgtgtcttagggcagctccagatcccgacataacatggtttcaaattcgtgtaacatcagactcaatctagtcaatcagcccggctgtcggatacccattgggctccacaaccattgaataatataaaccatcgatcgatctagaattgaactgaattctggtgaagatcgggagctaatagctgtggcgtctgcctatgcacgtgttgtgtgtacatatacacgtggccgtatagtgcgcagtcttcgggatataactaagcgccacaactgatcttattcggttcctctcgtttatcatttcggcgacttccgtgaacatactttggagcgcgggaaaagcgacggaaggaacaaacccaaaaatgacatccagagcgacagggctacaccaacgggagaacgtagccaattcaagcacataaacacacaaacacacaaacacacaaacaaacggcgaaatgttctcggcccggcaaatagactgacaacgcaaggattcttcatagtttgtatatccgacgataggctctggattttttgctggtggtctttgctttcccgaaccattgaccggatacaatacaagagacatacgtagtaatttgccgtttgcttccagttccttgtgtattttataagttattttggtgtacgcgtaagtaaatatatttgtgtgtatacgtttgctaacattgaatccagaaacgccttcgtttcgggtccgtccaacaaaggaagagtagtccaaacgagacgatacggtttatgtacaactcctgcctctctaaccctttgctctctcctcccctcttgtgagttaccttctatctcggctccgatgtttgtgtgattgaaaggaaacagttcaaaagaggagaggggagaagaagataaagaagaagaaggaaagagaaaaaaaaaaacgaaaaaggggatatttcatcgaccaaaccagctttgccgggcctgagatttctttgaaaaactggccggattgacgtatgttgcatcgatcaagatcgggagatgtatcttgcagcaagagaataccttgcttatccgttctttccttccctttgcttatctctttctccccttctgactgatccgtctctttctttccttcttctgcccttccctcgacgaacccctatttcaatcctggcgctcatctacctcgtgtgtgtgtttgtgtgtgcgtgtgtgtgtttatgggcgaacgcgtgcatatgtatctgtgtgacgtctgcattgaacaataaaccctcagcctctgatcgaacataaagaaagcatatgtgatcatttctccttcttttctatgctcgggctacacgctaacaaatcgttgctcctcttcgttatctgtactcgttcttttcgctttttatttttgttgatcagcattctgcggttgattcgcaattgcatcgtacttcaacctgtatcgtacacaactgtaacgttcggtacaattttatcgtcggctcgcagctcttccttgctgcttccggtctcggttctacttcgcttttggttttctcaaggcgttaaattcgttgatcaaacacatctctaacaagattgatcgtcctcgggaactcccctcttgacaacatttcttactccgataccctcccgaccgacttcttttctttcttctctcctactatttcgccctcccccttttcctcttgatagttcattcgttggtcttgaaacaaatagcacacgatcgaggaacggaacaaggtaaaggagacactgtgtcatgtatcctcaagacaagtcgggagcggacaatgatcagttttctaccaacggtcaatcacaagcgactcatcattatcctccatggcagccgcatcaacaacagcagcagcagcagcaggaacaatcgtcttaccaacaattgcaacatcaatatcccgttgatacttcattcgcttcatcctcccgagatacccccgctccatccttccagcccatcgtccgcccttcctcgagagcaattcgtacagaaaagtcaaatatggcttcagcaaacgcgaacgcttcagtcctcagcaaacggaacaggcaatcatgtagtggctcgagacctacatcttctaccgttccagcttcaacatcgaccagctccagtgccgccggcagggttcaacattcagcctgtggagcttgcaggctccgaagagttaaatgtaatcttcaggaggagaaacaggcctgtagagagctgtttgagccctaccggaccagacgttcccagagatctgccgtcgtcgtcgggacaggcgtgaatgacgcagatggcttcacgctcgtaaatggagaaactatccgttttgatggggagaaaatccaatgtctgaattgtaaacaacgagggctgaaatgcttgagttcatttcacggccaaatcatcaattctcatgcatccgccttgccatcctcctcctcctctacctctttagtttcctctttcaacgcatctaccgcccaagaaggagcattactcgctgagcaatataccccacaaaatcctacatttaattcccaagtatctgcctcatcatcccggccatcgtcttccactttcaacccggtgtcagctacggtcgtcgacttggtgacaggcaagactaagaccctccgaagaggaaaacgtatcgctcagctgcaagatcaattcagcgcgatcctcaaaactacacaatctgaacctccttctacaaccgtttctcttcctataaatatggcttcgatttctgcccctgctcctgcctctgctgctggccgtccttcatcttcggacaaatcatttatatcttatagccatagggacacctcctttgaatctattcctgactggaacactgacgggcgtccttctaatactggttccagtcagtatcgtcgatcaggggaggacgacccaatggaagatctgacgagagagtttttgcaaagcgcgtttttcgttcggttgcatgtccaacgtcagtagattctaattctcttacctatccttgtttcttctttttatcttgttcatcaaggcctgtcacttttatttgattgacacatttccttcgtgtacgttttcttttatctttcaggtccgatggtacatcccgaagagttccatcgcaagttcctgtcaacagatccaccacgcgcagaaaacctcggtcctgttgttcgtcctctccccgtcagcgagccatctcattaagtttattgacataccattaatttttctttaaacgacttggttgagcgttttattagggcgcaatcttggctcgaactatgttggcatgggcgtactcatacggcgtggaccgatttggaaatgaagaatcctctcctacaacaaacgacgacaggcagagacggcgcagacggtgtaaccgagtcgctaaatactgtcttgaagatatcgatcatttagggtacagtccagcctacctctcgctagagattgtgttcaattctttctgacaaatctcttaacttctcgtcatttcactcgttaacaccagtgtgatgagaaaacctagttacgatggagtccaggtgttattattgatcctgcctctcactgagggtgcgccatatgctttggtcctcatgagcgatgtcaatcatcaaccacgatactgattttttctcgttcattcgtttctgttctatgctttctggctttctccttccatccatctgccgagtaaagatgtggccacaccattagagagactgacgatttatgaagctgtagtgaatcaagtgtactctctatgctcactctcgacggcaacgtacgagatcttcgaagaccgagatgctgtgaaaagagatggtcaccatgatgaagagttcatagtgaaagtccgaatatactggtactgctttggtgagcttctccttcttcactttcttcaccttaagaacttcggtgtatccttatagtagttctaggagattgacttaacaaacattctctctctacttttattctcttctttatctagttcatgaagcaataaaaactggcttgaagggagggaaactcatgttgttcgttcttttaccaaatacgtcggtgtctgtcatagtttgtctgatgtttattcttgctcaacagagatgaagaggacttatacgaatttcagaactcggtaccaaacggaatgtctctagtctcgacacctcaacactaccagctgattgctcaatacgctacggtgtgttctcatttgtctacttgagagcgatttatagtccaagcagagatgttctaattataaggaaatatgtatgtttttgaggtctacaaggccccaatccgactagctctcgcttgtcgaaagattcactctgctctgacgggtcccaaggctcgtaggaagagagacgtagacatgggacagatgaagcaggcttgggaagttctagaggcctgctctgaagagtttgatagcttgttggcggacggagtcatgttaccgaatcttcggagagaagacctagaaagatattgtgacggctggaaggttttctcgttctctttctcttcattcatccagtcactgaaagattttgcatcgctgacgttcactttctgcgatgtctttagatcttcatgttcgaatgtacgaggtcatatagtctatgtacacccttggtagatgcatctcacatctcgctgcttcgtgtttcgaacctattttgtaattttgtcttgttttgttttacaggccactcagttgtcagagaagcacttctagaccggatgcgtatcctagaagactcacagggtcgtgtgattgacgtatcggatccacaggctcatatcaatcaagcggaatgtctcaaaaacattcaaagaatccatatgattgccgaacgtgaacaactaatatatccctcttccttcagacgcagctcagtaactgaatctttcttgtgattttatgtagaaaaatgttcgacgcttgccagaacgatcgtgatgatcgcgaaacgacatctaggtactcagttctttgcatatgacgcaagtcttgttcgtggtcagtctcaatttttttatatttccagtctagtgaagagcatgtgcgcacatttggtaaagacctttgctaacacacaattttttctcatttcctccgaactatcttccccaccattctctactttttcgttacatccgctccttccctcaaagatggaatctactacgcggctactttcctcgcgtccgacggtggatccgccgatgaaatcaacacttgccttgccgcgctggacgagatgcgatgggcattcagcaagacatccgaacgaaccgcgaagatcaggtcgatatgggcgacaatgatgactcaaaaccgagaggacgcgtatgatgacgattatcaacaggtcaactcaactcttgaccatcttcaattcggtcctgcaccgacatcaacaaactccccaccacagcaacggcaaacaacgcgttccgcgtctcatccgatgccgtttagtgaatctaatcaggccccagcgttcagatttccctcgacggattcttcctccttgactgccttggaaaaacaagcggcacggtcctacatgcaagtacgaaatcagtctacattgcaaccttcgtttcaagtcccgagtggacctgaacgacggcagtatgaatctcagcttcagcagcaaccggtatcgcctcgatcccgagcagagccaacagaaaggccagctcgaccgatgggccctgttccttcaatcgcccttgctttgggcatgccgctacatctcaaagacaatgctccggtcggaggcgtctggataagcgagaattacggagaaagctcggtggggtccagcctcgatgggggtcatagctctcttcaatcttctatacactcgtccagagagagcacagtgtcatctgccccagctttttttacacagcagccttcatacttaaatcttgtagagtaccaagacgaagggccgcgccaacaattctacgtcgaagatactcaatacagtgtacagcacccttcccgtcagaaccgagcagctgtagagagagaccgacaatctacgttcttgtttcaacatcaatcttatgagcaacttcagttgtctgatccttcttcgcatcctcccaccgcctacggtgcacttgccaaccctggcacaggagcggaatctgaaagtggactactggtccaagtaatgcatcctacgccgtatcagcctcatattcctcctcctttcgacccaccaccttcatcttcacctcctctgataggttcatctgaccagatgaatcatactctgtatgcttcccatacatcgacttatgtcagctccacttcttacgccacctacccggccacgacgaccggttacccgatggacgctacgggcacaaccgttcatcaacaacagcaactgcggcatatttattctcatcctcagcctcaaggacatgtgcagcctcagtctcaaccttatccggagtctatcagtcctcgctctcagcattgtccagatcaacacagttctcatcagtgatcaagaggacatcgtctgttcgcgcactgatctccgctcgtttacacaacttctttggtgtaaacattccttcaattttcgatcaaggagcttgttcatgggactttccccttgtgctttttcatccgtctctgttcagaaatggaatcaatggaaaaaagaaaagtccatcatattttttagctgtttttgcatatcctcacttttctggtgaactatctattgtatcgataatccctttatctactccgatcaactgaccaacttgggacgagtttgcacctttaatggctttttttaccctcggatacgctacgtgggtttcatggtcttgtgtatttcaataattttaaattcctcgatgctctcgcgcattgtatcggcaaaattgcactgtttagtcgatcaatgatgatatccggttagtcaaatcctgagcacataacaaaggcgaactcaaggcacgacatatcatctattcagagaaggcttttaaaatctcatgagatctccgtcggtaaacgctcgaagtcacatactttcaattctccataaccttacttctttgtcaacgagctaaatatgcgtaaaacaagtgaggtaaaagagaggaaaccagtagtacgaagagaacccccacattctcgcgacaatcatgacctatccgcgctagtaaacgaatgtttcatgttacttctgcagcaaaccatgacaccttttggccccttgagttttggtgtcgagtggaagacctctgatctatctttcagaacatttgttcgagaacttcatcagcataaaccctttttcaccctgatctgcgctctttatactgatatatgagacaaaataaatcaacaccaaaacggatacggattcgctttctttctctcggttggtcaaatttttagataaatgaagaaacatgacgagccgattcaaacaaatgatactggaactgtgttgaatttgtgtgcgcccaagacaactcagaaaagagtgtttgtgaactgccccggagaaaccgtagaatattggggcatgaatgacttactgcccagactgtcgtacactcgtggttcgatctagcattaaagattcgatgcttttagctagttacatcctgtaatccaagggccatctgccgtgcagcggtatgggatggcccgactcttctatatacacgtagacccatgctctgaatgttgtctgagagcgctgccagtcacgtgacttgaacatatagcagagtcgtttaaaacgtcacttcctgagcttcttacttcttcatcaatcatgtccagctggaagagtgagggtgatttcgggcaatggattcttaaacaatccgaagacgatttgcaccaagaacggtcctcttctgaaaagtcagtcaatcctagggatcttctgtctgtcttcctatgaatcgccgctgattcggcttgcttctcctctactttgagcagaacaccgttcgttctatgactttcttatgaatgtctaatgacatttcttctgagctcgaacaactcttgacgattctcttataacattccgtcttgattctagggcatgtaagcttctgctaatatctgccatcgatctgggattgtgttggctcatcttgttctttccccataccctctgacaactcaagtccagaatcttcaaactctcttgaggactgaaaatgagcataataaacgagaactccatcgcttgcacaaatctcaaaagtcggggaaacctccaatacgaacgctgcttgcatatggcgataaacactactcaacgcgccctctgaatgagctagaacggattgagctatgcgaaatgaactggcacaagatccattatgtaggcctgcatacttcttgcctatcagtaaagtacagatggatgactgaaacgcttgttctattttttaactaaaattggtcgatgtaagggtcggtatctacttatcaaaataatatctcttccaacccggacgacttccattcgttttatcggtcaagacccatcgggccaagccgaggtcatcgagctccagacgactgtagatatgctcgtccatacaggcccagagcttgatacactatatcctattggcacgatgctagctattcgcgagccttactatgtctgttgccccgatgaggtcgctcttgatgatcttggtgccaagatggtgtctaggatcagagttgagtcacccacggatgtgatctgtcttggtgcagacgatcgactagtcattgggcttacatggacggattcgccaacggctcttgggaccggattggttcctgcaaaattgtctcctgagcaggcaaagttaatcggaaacgaacggttgaagaaaggatggctcatatcagcagagcgagcgtatacccagggtctgacagtcgatagcaagcacaccgtgcttagacttaatcgagcgcactgccgaataaaactttcatggttcagaggcgcttttgtggatagtcagcatgctctacgtagtcttcttgatatcgcgcccactgataagtccgaatggactgagtcaacccatttgagttggctacagaaggcatatcatcgggctgtgcttgctttgatcggtttacgcgactggtcagttgcacatgagcactgcattgcattcgctgagcagttccctggatttcttcctgcctcagaccttctggcgttcacaaaggctagagtggatgaagctcaaacaggaatctatgattgggcgtcaatatatcgcggtgaccgacagccaggagggatgactaatgtggtcgccgactgggtttcaccttccttcaagatgggctacagtcctacgtcaggtggtgtccgaggcgtcgtcgctgaccgaacgatcgaacccggtgagcttctcgtagtgtgcaagccgttcgcatcggtcgacccaaaagaattgaaagacgaggcaaacacggtggtgacaaacttgccgactaaacagttggaaagcgtggcgcaggcgtatttaacacgcgcaatggtagacaaagtcaaagacgaaccggaagcctgggatgttttgaagaagctgtacgctgggccggcatattcggatccggggttggtcgacctaagcgcatttcgactgcctggcgcaccaagcgacgccgagaaggaggatgagttgccgaatgtggatgtgtcgaggttggaagggatcagaacatacaattcgttcgcgatcaagtctgtcgccatcaaggagaccgggccctctacgatcagcctagccagcgaagaaacgccatccggtttgtttttttttctttgttgatcttttctctcttatggcatctcgttcaatccgctttatgaaatgacgctgagaatatcaacttatctaggtatctacctcgtcccatcactgttcaatcatgcctgctttgggaacgtcagctggaacttttggggtgacctcatggttctccgctctcgccagatcatcttgccaggtgaggaactgacgatcagctattatgccgatcattcgtttgacgagcggacccgttcactcctcaagtacggggtagatcattgtgactgcatcctttgcacggacgaaaggcttgatacccctgctcaacgggcctcccgagcaaacagccttgctgatctgtttacctatagagatcgactgtcggatgctcgcgcaaccgcccaggagggagtgtacagacaacagagagggaccacagcaaagttcataagtctcgttcgatcaattgaatcgacttatgctcccggtcgatcgaagagtatgatgttcgagctttttgcgcctttcagtatcttgtcagacgtccatgtgaacgaggtgatgagcggtatgaaagaccctcgagaagtgtcgctcttgatggatcttgcgatcgaatgggagagacgtgcgcttgagtcttgtgggtttagaggggtagattctgatgggaagggtacagttacgtctggtccgttcgtacacgagatggtctgtgtgagcgcagggttgtcgatcgtttcgctgctcgatgggttgggaagaaaagaggatgcgcagagatgggccagtgtcgtattagatattcacaagattatctttggaggcggaaaggaacttatgatggtcttgtggagaggtttattagactcgatggacctgatttcgttcttcagatgatttacggcttgctttgcatcaaacaggaatacatgaatctcaagaaaaggtatttttagggataaggaaagaacattgatagacaagaacagaatctggtcaactgaatacaaagcaaatgcgtatagtgtacaagaagggacggtggagacatcggaagacaaatgaaacgctatattgtatttctttattcatgtcgttctataattagggtgtcttcactttttgtgctctgccacaaggttgattaccttgccggtctcgagtgcagacttgacgttatcgatcacctgaatctccatgatcttctgagtatctcgagttctggtcgcgtacattagtattttgaggaaaagagaaagaaattgtcagaacaacgttggctctcccaagaaacctgttacagaagaggtactgactctgtgcccatgtgaggaagaagaatgacgttctccatcgagaaaaattcggggttgacgttgggctctatatattttcagttagaagaagaaggtgttagctaacaaacataagaggggaaaacagattaagaacgaaccatcagggaagacatcgagtcccgccgagtagagttttccagacttcaaggctgcgagcaaggccggctcgtccacaacaccacctctgtgtagatcacaacaatgagcgagaggtcagcaagagcatcaaagacgcacggacacaaaaaagaagaagtgattagtggacgaaccgggcggtgttgacgaggacggagccgtctttcatccaagcaaactgcttttcaccgaacgacttggccgtgtttgcgttcagaggcaagttcaagctgacaacatcggccttgcccaacatctcctccaagcttgagcagtactcgtactcgcttcccggctggccgtccttgatctggtttcggttatggtacagaatcttcattccccatccgagcgccattcgcttggcgacgaccgaaccgatacctcccataccgacgataccgagcgtcttgttttcggggtcaaaagcgggggcaaggccctgcttgaacttgccggctcggacgttcacttcggctttccagtattgtctcaaagcagagagaatgagatagcaggcggtagtggcggtggcattatcgaccgagccaggggtgtgagagacctggatgcctttggcgagggcggcgtggacgtcgactggatcgtaaccagctccgtctgttttgaatgatgtacagagggtagccaagagtcagtgggaaacccatacgataaatcagagactagaagcaaccgcactgtgagcaatccacttgacggacgagggcaggagttcgataaactctttgtcaaactgagacgaagatgttcgatagatcgatattaggtgccgtatcattcaggacgattcgcacgatacacccgtttgatagatttaaacgagaaaataataggctctaatacttacaggtccgacggtagataacgactggttcgatcggaagataccaataacgttggtgaacttggattcaagatcctgcttgaactcgtctcgagtcttagactcgacgtactgaagggttacggaatcaatttgtttgttagatgggatctgggcgtgattcggaagatagacatataaggagaaaacaagaacggtgctcacgatgacatcggctagagatccgaccttctcagccatttcttccttggcccagatgatttcacctgttgttgatgatcgagatttacattagcgtcaaggcagagagactcgagataaagatttagaaaccaagtcagagggatagagtgaaacaatttgtgacgaaccaactacgagaacttgctgtttggaggacatgatgattgagttgttgttactgaggaaacgtgaggtgatcgaggtatatgtagattgtatagaaaagaaaagatatgtagtatgtagaaaggaaagagaagaaaaaagacagaagaggagcagccgatgtctcgataagagttcttatacgattgaaaacaaaaggttgaaaagaaccgcgaggcctgggatgaccggtccgatgtgccgtgaaatgtaccgccggttcacccggttctggggtaactctcgcgatggcttctgctctctcggaggagccccggacgggagggaaactagattggagagttgaacagcaatcatggtatcggaattcaaacgaaagatagtggaacggggatggaaaatagggacagcagatgtatagaggtttgatatgatgggtgatcgagggagtacagagttatcggatggatggtgtagacaaaacggtggacgtaagagtttacaagatatcagcatgagaagtatcacccttccaacgacctttccgatgttcatagagaacccagagtgtatgttgatagcacttgggacgtcttgagagaatacatgtaaacaacgtgctcaattatgaagggagatgaaagtgatggccgtatgagccgttcagccgacaagacctctatttcttctcctgctttatcatgccaatgatgggagtatatctagaacatcactcacgcccacagaaacgcgcatccgctcctccgccgtttcgatgttctctctccgttcttcagtctccctttcggtaaatgatgcgacctgaatccaatgtatttcctccaacggtgcttatcgagaaactctgtcttcatcattagacgatataaagctaagaatatacgcacatgtcagggatgtgacctgagtgttacatgcttatattcgatgacttgatgaccgtttgccacaactcgtctgacttttcggacgcaccatctgttgatcgtcttgttactgttcaccgtcatctttgtctcttctgcgctctcaaccattccttgctcgtccttcctagttctcaattcaatttctattcctcgatttgttctcgttctcatcaaatgttcacgagaaccagattttctacttctacttctacgctggcccttccaccagttgcccacatcgtgcttcctcatcgccagcatagcccatgctcctagcgtgctctttgccataaccaggtgagcggcaggtagcgaccttgaccgtccagagctttgatagcgccgcatgcttgtcgagtcgcatcgcatgtcacacgtctcacatcccactacacgtttcacatctcacttctcacttctcacttctcacttctcacttctcacttctcacttctcacttctcacttctcacttctcacatgtatagacaacggaacgcatatagacaatctcccagcctccgcaagaacatagacccgaccgtcatcagtatcagtagggcaagaccgagccatcatagttaagcagcttccctccatgagactccctggtagcctcgctgacgaccttgaggactgcttccgcgctttgctccgggctgatcgctagatgcgcgtacgggctcttctcgccatctccagacagatccttggtggccatcgagttcatgtcggttgctacgaagcctgatgaagagaagagcaagcgaggagggtgtgtcgagtcagccagtcagtcagtcagtcactcggtcactcggtcacccagtccctcgtgtcacccggtcgctcagtgactcgtctcactcagtcacccagccatgttcttctcttcccatcagatcacagaaacgcaggcacgcatgacaaaagagaccgacctggatgcagagggaacgcgatcagcccaaagtcttcgctctccagatggatcttgacggtcgcatagttcgccgccgctttcgatgtgccgtacactccattgggcatgttgaactgagcggccagcgccaaggagcctgctcctgaggagatgacgacgaacttggcggcgacggctgaggcctggagaagggggcggaacgccttgtatagcacgacaggtccgaccacgttgacctcgtagtgggccgtccactgggcagggtctgactcgtgcaagagacctatagactcgggtgcagcgatgcctggacgtgctcggcagatcagacacagcatcgcgtgaaggagcatcgtgtgagtcagcatcgtgtgagtcagcatcgcgcaagttaccagactcagccaacgtagctacctcacagtgcaacgccgtcggccagacagcgacttcgccatcgccttcgacatcgccatcgccatggactcacctgcgttggcgatgatgacatcgactctgccggcggccttcttgatctcctcggccgccttgtggttgctctccgtatcggctgagacgagctcgacgacgttgatcgcggcctcgctgctctttgcgagctcgtggagggcggtcgcgctggcaggcgtccgaacgccagcaaagatgacgttcttggggctggtggcgagtgctttgacgatgctgaggccgatccctcggttggcgccggtgactgcagaggcgaggcgaggcgaggcaaggtaagataagacaaggcgtcggggatggtgtgagcgcggtgcgagaagagaaacccgcagagaggcaaaagagaagcacgcagggaagcacaggactgaccgagatatacggtggtgtcggacatggctgcagaggtatggcttgttggtatgatccgagacttgacgggtgaagggtgatgggtgatgggtgatagaagagaagacaggataaacagcataaaacattcggatggacggtcttcttatatgtgactgagcgtgttgggacgacggcctcatggtcaactgagcatctaattcatcagtcgctatacaaagtcaattccgttcatctcgtaataaattcgtgagaaattcagaatatcttgcgatgatgacaaaatccggattgaacgatttccgggcattgcttacagatcaagcgacgtgccatgtcgaccgggctgattggctgagagacagcgctcgtccgaaacaattagaatctagaaagtggtctgggtggtgctctatcagttctgctcatccagcaggtcagcatgtcctgtgatcaccgagcccgactctgtcgtgatagtctggggacccgatggagcagactgcatagctcagttgactggatgcgacttggtcaaggttgaaaggacgatcggcgatcatgaattgatatataacgtgggacaagggtaaacactgaggctctgtggtggttatctgaagccaaccagactgtcaacaagatacttgatataagaagtctcgacaagaatctcagcttgaggaaaactcttatccaagaaggcgcgagggcgttcccgtttcatatcaggtcctctcgcgcatttggtctgccactatagatatacatatgacgagcctagagagcctcgagatcatgagaactaaagatgatgaggcatgaaccatacaaactagagcatgatggaaaatgggcgaagaggcataggggcttgagggaaggaatagcctgtaggggtaacccacgtatcagatcacgtgatacttaacccgtatccctgacatcccgtccctcacaggttacgcgtaatagcgcacgtttcgaacatctacctctgaccttctctcggctggtctctcctcgctcttcttcgagctggaatgagatttgcgcatttaattcggtacgagtgatgaatgttccgagcttcgtgtggttaaatatctcgactgttttccactgccactgaagagcagtgtacaacccgtgttaccgacggagctgggctagatcccagaattcgcgcgcagtcgccggctgatgtaaccttggttctgataatttgtgccttcgcatttcgaacgaatgctctcggttagccttgaacgaccttggccacaccctctctatcctcaccttcagcatgcctaacaataagagacacaccgccaagcagatgcaagggtcaaggggaaacgatgttcatcccggatcccgacgtggtgagttagcgtttcgtctgaagagttcaactttgaaatcaagtggtggtctgattgttgctgaccttctttctatactggtatatgaatcactttttcttgtccttcttggctgtgctctctctgtcatctagctggtcagatggaccgtatcgtccttcgtaaggcgaaactttccaaagcttctcaggctcgagcaaagtcgacttctcaaagacgttcgttcccgtttgcaaagagtgtgggttatcgatatttgtgctaattccgttcttgtctggccaacatgttgtcttctaatctgtagtcgaacggcctttgtttttccatcactccctttcggaaccgccgttcgagtgccacactcttcaaggtcttcacgatctgatctccgaagtttacctaacccgctgggacgacgagcttgagacactgagaaaggagaggagggctggtagaccgaagagtaaacgtgaggacgatttggaggagattaaaaggagagaggcccaggagtatgagagtggattcggtaagttaacccatttccgagacttttgataccagagggccgttgaagagagcaagctggtagggtcgatcaactcgcgcgcgtgcgcgcttagaggagagacctaataggcgtgatacgtttgcgataccgtttgctcaaccaattcttctctttgtacgcgaaacccgatactatcgaacgcatcctacagaggttccggacttgaccaacccaacgacggtgactcttcttcgatcgtggacgtcttgcgatccctcatttttgccccaacttcgatacatccgagtgtcgaagataaatccagaacatgttgtcgtcagcaagaaaggtctatcgagagagtacaccgatgcagaggccaaggcagcccaggagatgcaagtcgaggcttaaactagtagtttttgtcgctcgtttcctcgatatctgccttgtcttttttttctccagtcatctccgcatcaagatcatatctctagcctcctttctcttcttcctcgatgcccaacagctcttgtcttttcaaatcttatacgaaatcgactgtctttatctatcatatacaggtttaaataaacaagcagcgaaagcgaccatcagttgttactgcatgcatgtccaagctaaagaatgactatatgcgttttgtgctgatcctgactgacaggaattgacatacgattcaaaacccatcacgtctactgacatgcttttctatcttccctcttcccattccggtcacttcactctctcatcttgtttcatcgttgatcttacatcttgagcgtccttcacctgattttgttggtgcagacgcagagaacataaaatgacctactcaagcgcggagcctttcaaagatttgttctattttgccggttcatccagggagtcagcttattcgactttggttggaacctctgtacccagagaaggaacaataggctaacttactactttgtgtcttgtgcttgatctacgagacatgcagtcctcttcttccaccgctcttttggaaaacaaacgaccaggttcccctgacaccttctctccctcctcactttcggcattccaccattccgatcatttcactcagacatctctcgttatactctcttgaagaacaacaaacactggtcgtcaatcttgtgaaagagaaagatgagattgatagactggaaagactcgtttatcccggttcgtcccgttcagtctgacttatgttgtcttctttcctcttcctctctctctctcctctctccacaattcgtgtatgcgctgagcaagaagaacacaggatgcgttatccggttcgactcaaccgacgggagactatcgtacacccaacagtttttgcctcgcgtaaacgagcaaaacgaggaagcagaaggtgtttctccagcaggaagagacatcaaggttgctctgatgagcatggaatctcttgatcctgaaccgtcagttccgctaaaagccattttgaaaaagaagacgaacacaagaaatcatttcaagaaggaaaagaatgaggaatgcatagctaagacgaaagaggtgtttgaggaatatgggataggaagggattcagtcgatcacacggtaaacgttttccggcacctcgtcgaaggtatgtctctgttccctatttttaatgcaaacatgatctttggtttaaactgaacttaatttcatccgcctttcaatccccaccgactgtaacggaatgaactgtagaggaattgtacgcgcttcttgcctcggatcttagtaccgataaccctcttgcaacactgtcctcctctgtttcatcgactggctctgacgatgatgcctggagtgaggaactgtagaaattgggatctggatgaaatgcaaacgttgacgaatcatctcaaataagaccacattgttccgcttggtatgttacaaccgagatagagtaaagtcgacaaagaaacaccgtgtacatccgcaaaacctctttttgaaattttcgatagagttgagcatcgatagagcgggaaaaattacatatccagtttttctttcttgtttggttatatattcctttcggtttaaattcctcgagcggcatatcgaccaccgagcaggttcttgtcgacattcaacccaaccatggcctctccaatgtcctccgagatctctgcgagaattttggggttgttgaagtgggtgacggcctgaacgatggcctttgctcgcttgacgggatctccagagtggaagataccggaaccaacaaagacaccgtcgcaaccgagctgcatcatcaaagcggcatcggcaggagtggcgactccaccggcggcaaagttgacgactggcaatcgcttgagtcgggcggtctccttgagcaagtggtacggagcctgaagctccttggcgaaagagtaaagctcttcatcagtcatcgatgaagctcgtcggatctcggcctggacggctcgagagtgtcggacggcctcaacaacgtttccggttccagcctctcccttcgttcgaatcatggcagctccctcagagattcgtcgaagcgcctctcccaagtttcggcatccacaaacaaagggaacctaggtgaaggaagatgtgcaagattagttaagagttaaaagcgctctcagtaagtgtttacaacaagacaaaccttgtaaacgtgcttgcctaggtggtgctgataagatcaagacacagaagacaaaatagcagatggcggcggcggtgtgttcagcaagatttatgattgaaagcctacattcaaaagaacaacagacatacctggtcatcagcaggagtaagaacttcagattcgtcaatgtaatcgactccgatagcttggaggatctgttgggacagcgaacacaaattacgtaagaatgatataaacctgatcagaggagtcatgttgactcagtttgcgcaagcatcctcaactgacctgggcctcagcgatgtgaccgattcggcactttgccatgaccgggatggagacagcgctaaagaacgaagacagtcagaccatcatgaaagtatggagactcaactccaatggaaaaaagaaggctcacttgatgatctccttgatcatcttaggatcagactatcacatcggaggttcagaggagagggaggttcagtttgagtggatgatcgatgactcgatcggtaagctggacaaaccattcgggcaactccaccctcggctcggatgtcagccggtactcgctcaagagccatgacggcgcacgctccagcctcttcggcgattcgagcctgctcgacactacgtagagataatgaagattcggtaaggaataaagattttggcacgcaaggaccatcgcgacatcggcaatctgccgatcgtaaggaaggcaacctacttgacaacatcgatgattactcctcccttgagctattgacgatcggaaattcaagaagcagaaaggcaccatgatcaagttctcgaacactgtacaaatcaagaaactgagcaagttgagatacataccatctgtgatcgaggacgatcgggccaaagagagaatcgcagatcaatcaaagtgagaagagagaaggtacaggcattagaggggagtcatgtgtgcaaagtcgctgaagataaggtgagaaggagaagaatgagagaatgtctgccaaggctttatggaaagcgctctggctgagaagtattctaccactgagcaagttgggagctgggaaagaggaggaagataaaggggccactctgcattttcatcatccaagagtacgtccatgcaactaaaggttctacctattcgatcggacacacctatccccccggaagagaggaaaccaagaaaagaatgagagaaatcttacctgagcaagtccggtcttgacaccaaaggtaccgacggacgagcccgcaccagacgagccggtcttggggagggcagaggtagaaggagtgacggctcccgaggtggtagattgttggatgatggggttctcggacgacattttgcaagtgtatgagtgtgtgagtgtatgttagacaaagagaagaaaggaggagaagaagaaaaaaaaaggagatgaggggattcttaaaggacgactcatctgtttctcaaacggggattgccaataaattgaagaatcagagtctttcttgggctcgaacctgataaaccccaccaatcttttaattgccttttcccttcgatccgctccgttccgtttcactctgcattgctattttatgctcttagttctccttcgtttgttctatcccagatacttttttcttcgtgtgtatatatatagtttctttcagagagaaacgacaagcagagcgggagacggttgtgtcgtcgaatggctttcattaccgcgcacatctacctctggccaagacgacgagcgcgatcaagagcaacagacgagtatatgatatctaacatgttctgttgagttattctctttctggacgatatcatctcacttttttttttgccctagatgatgactcgaggtaagatcgaggggaatatgataataatagccaagatgaaagaaagaaaaaaagaatagaaggacgaagaaggaaatgccttaagctccaaaaggtcgatcacgttttctcgatcacatcgaaaggaagcaatcgactcttggctcctggctggtcggttggaacgcgaacaccatcgctctgatttcaaaataaaattgaataaaataaaacaaagattgaacgcgacccatgttatgataatattaatgtgattgccttttgattttacagaatattttattcgattcccatctatcgagtcgtttcattatttgcgctcacgtcgatcgatcgctctaaagagtagatgttattctactctcttcttctcccagatcgactgatccctccttctccttgctttgaccttcgtctgaggcgtcgatttgggcatcactttctaaccgagaacatgattccaaccgactgcgctcgtcccgggcttccatcatccgcactccaacagtcaacaacacctgatgtaaagaagcagaagagaatgataagaaagcctaatacaacttgaattcttttcaagaagacataaacggagaacgaacgaatatagggcaaaggacaacgagactgatcattcctcttctccaacgaggagcctcgttcgcggggactgatcatcaacaaatcaaggcagataaatgagcaagatccaagggtccgattgaacacgtagcttttcggagtagacaattgtaacacagaaatacttacaaaacacgatagaccaccaggcattgaatgcgttggaaaacatgttcatgcttccactttcaatatgccaacgaacaagagaacaggtattgagagggaccagtacatcagaccatatctctttagaaccaacagaaacggtatcaagagagagagagagaaacaagacctacaggatgacagatcgctcctgatcgtctcctctcgttaaatcgttcgcccaagcaaagttactcgcttgaccagagtaagataccgcagagagatagaaggcgaagaacttgagaggcgtcggaacgttgtagacaagcaggatcaccgaagataccagcacgcagccggcgattaggaagttgacctggtaacgttttccagtgtagtccgtccagatcgccgttcccagcagactcataacggccaccgccgtcccaccggaagggtaataattgaattccgtcacaccgtacgagttccttcgagcagccgcttccgactttaaccaaagcgccatcagcgaattacttcctatcgagatcaactcgcctccgacgatccagatcaaactcatcccccaccatctccatcggaggagaacccgacggaagactgatcgatcaagcgtcgtcttcttcttgacaggtaatctggagattgcaaccagccgttcttccgctgtcagatatccggccgatgtcttctccggtgtatccggaaacaggaactggtagtttgtggcataaagtttcaatcaacagctgcacaagcacatacgcgaagagagagcattctcaaattggagacgtacatagccatagattgctatcggaagagtgattacaccacctgttcaaattgttcgtgcccgcgagaaaattgttctaatgagtattttccctctctcttttgacaagctgacatggacacgtgaagtaaactcacagatgataaacagccattgaaacccagccaagccgaggtgaccgttcatgttcttatagatcgacgcttgctgaatatccaatttgatagaataaattgtaaattttaaagatgagtccgacgacattgttcactaaacgatagaacactttggacctaccaagacaccggaaaagatggtagccacctgagccgcactactaaagatggcccctctctttcctaattcggtttctttataccaagatcccatgatataatgcgcaccgacgaatgtcgatgactcagcaatcccttggagaaatcggatggcgtataagtggggaactgttttagcagcagccgtgcacatagtgagtgtgccccaaatgactggaaaaagtatatgacaaacaaaaaagaacaagtcagtacaagaagaggataaagaagaaactacaggggcagatgaaggctcacgggtgctaaatattgaagacaaatgcgatgaatcatcacgactgatattcagtatagcgcgcacgcgcacgaagcctcctctttctctattgaaatataaacctcacaatccttactttataggaaacaagatccttggagatatgacatgtagaagaagattttgaggaatcattcctatcgtgtatcctgcggtaaagaaactgtgggccacacagtaaatatcaatatcaaataggcttgtccaggaacagataaaacgacacgagagaagaaaggaagacatgagacaaacctgttgacgttgttaaggtcgtggcctttcatattgagagcctccttgagtcctgatacatatgcattcgctagattggctctgtcaaggtctatccgggatcataattaagcacagaaaaggtgagtctcgtcattcgagctacaaggcgagaaaaacaatgtagagctgacagttcgaaaagaacctatttagacccaaaaaaagttcaagctagtatgaatgagatttctacccatgttccccgggctctgccccaacatacaaaaacaacaccaaaaagacttgaaacaaaaccaacatcaaacaaataaacgaaaggataaaccagtcgattttgaagagcaaacttcgttcgaccttatttgacgggagttctccccatatgatgttccgaagcgacgaccaggccatggcaaatgtatatgtgcagggtcttgacggaggatcaacagaaaccaagaggtcaagccaatgagcaagttatatagatttagggactcgttggacttgattgatgtcgaatacaatcgtacgacaaacagacgatcaaacgagtctccagtcgaaattcgttggggtctggtatatcaaacatagccgccgggaagattgttgagctccgagccgaggccgggcggaagcaagacagacacgtccgcattgttctgcgggttacaaggcggtgcaagttcagatacttggcacagtcgatcagtgccagggatgtgagctggggtttacatgttcgtaaccaatgactggtggaacagaatgagtggtggaagacaagacgagcagagtgatgcatggcggccagatctatggtcttgttatatatggctgagcatgttcgaacgacggccagacctggtagctgattcatcagctgtcgtctggactcgacgtcgcgcatgcagtgttggtttggcgagagattggtcatcgaacgcgatggcgataccgtctggatggaacgacgtccgggcattgcttacagatcaactgacaagagcccgggatcagcacacgacccggccgagacgggtccgcccgagggggatggatgttggcagcatcatccaggacgacagaccaggatgcggtgttgtcgatggtgtgtagcacgctcggttgcttcagcagatcaacatgttctgtcgatatttgtctcagtcttcatcggtcaatcttgggacttcacccaggtggtcgtaagtacttattcagtgcaatgcaagataattggaacagaacgaaacagctcgtcgatcaacagatgatgttgggcgcataagcagttctagtcagcggctaaatcacagagcaggctacgatctgtgcaactcgcaatgatcatgaggattcgtggtgtagacctctgattcttggaccagattagatggaagagaagagaagcctgaaacaagcgaggagtaacaaagcaagggatcaacagaggatctcgaccggagaggccatgctatgggcggcaaagaaggcctgccttgtgtgtgctcctcagactacaggagcactacaagagcactacaagagcactacatgaaatcatgtctcatggagtgtgctaggaatacatgcgctgaattaatatctatcatgattgcgcgcaagaaaggatcataggatataccaggagcacatccactatacgactgcatacttggaattcatgaattgtatgaggagtagctggggcaatagatctgcagtccgtgggttacactcaagtcacatccgtgacatccagcaatcttagcaaacacgtggttcaattctgacccaaaatgcggtgcatgctgtaaccagctagttactctgacgaggcatctctttacgctgtttcatttaatcatctctgttgcctctttctcttcaacatccatactatcagcaagaggatagaatagaacaacatggtactctcgctacgggccgtattactgtggtttgtcccagctcttctggtctccgcacaatcttctaacggatcggccccttcctttgttcgtctacgtcttcagcagctctctgttcatattacattcacctagcctctggatattgattggtattctttcttcgtcgcaacgtgactttcaaactctcaggagcaagacccgggcttgctttggtcaacatattctcctcagctctactttggtatcaaaccaagactgccgaaaagtctgagcgcaggcttgatgtggttcggcctcaacgactgggaaggcataagacgtgagttgtcctttcactcctgaacctcttgattagaatcacctcgtcgttcggtttcttcacgacaatgccgcctaacaaatcgaagaatgatctttttagggatccaccatacatcttcatctgcttctccttcggccgacggattacaatcatatacatacacttcacatatccctcgagttggatctacccaaaaactcatcgattcccgaaacggactcaatattcaaaccggatttgtcaatttaccaacttcgggcaaagcaggtgctaagcttggccaaggatggggtgcgagagtccaggttatcgaggagcatggagatgagaggatcagtgggctctggtacatcgccctggagggcgaaggaagcttgagacttgtggagcaagataatagcgaacatgtgagcattcatgagcttcaaccctcaacaaagtagatgtgccttgcgcctggttctggctctaattcactttcaatcgtagggtttgggatctcctatcgtgcttcttggtcaaacgcctgagcttggacccttcaaaattacgttgactgatcgtaagtcttaatttgatctattcatctctaatctatcatccggcactgaaccgtccgcttttcttatgcaccatctttcccagatgaaagcaatgagcacatcagtgagggcgccaaggccgccgactttgctgaaaagattggaaagactagctgggccggattgagagcacctgcggatgagctatggaaagctaaaggtcagtgcaagtcaatcgtacataagcttaggtgtgccctgctgaccgaccaacaacattctgatacaaacagaaatcgtccagtccctattacacgcatccgctcagaagatcgttcagaaatacggaaaaagtactccgcctaacgcggctgatttacccgatgtagcctacacgttcgggatgaatcttcctaacgagcaccaaggtccatttggtagcaacttttacgtcttccagaagacctggggaggagagggtggttgggatgtcctctatgaggagggcgacttctctccattttccggctcggatgacgaacagcctgttgaggaaggcaagcgacaggtaatctcaaatgctttggacgccttggcagtcgcatttgatgagcatttcgagaacaccctgccactctcctcaccctataactctccggcccatacatcgttcgctcaagaggtcacttccaaccttctaggcggcgttggatacttccatggccgatcgttggtcgatcgatcgtttgcgcacgagtacgatgaacagccagagtatgaagaaggtgaggagggggtgagagaaacagatgagagggagctattgacggccactcccagtcgaagcttcttccctcgaggtttctattgggacgaagggtttcatcttgcgttgattggagagtgggatcaggatcttagcttggagatcttgaagagctgggtggatttgattgatgaggatggttgggtgggtagagagcagatccttggagaggaagcccgaagcaaagtgcgtgttccgaaaacctgatcgctctattcctactcatgaaggaggatagttcagctgagcaaacttcctactcacatcacacgataaaacaggtccctgccgagttcagagttcagtacccaacatatgctaacccgcctacactcaccatggccctcacatctttcatttcccgattacaagccgccgagtcgtctgctctgctttcatctcagctcggccttgacacaaccgctcctttacctctggcatatattcgttccaaataccttcaatccccagagaaagcccgggcttatcttctctcagtttaccctgcgcttagacggcattacctttggttccgacagactcaaaaaggtcagctcaaggagtggggtcgaaggcccccttcgagagcggaggcataccgatggcgaggtcgcacggataagcacgtgttgacaagtgggttggatgattatccacgagcggtcccgcctagtgtaggtgagcttcatgtggatttgatgagctggatggggttctttgcgaggactatgaaagagattgctgggtacttgggcgaggaagacgacgaagaggagtatgcgaggaacgagaaaaacatcttggccaacctggacggtgagttcaatcgtgcttctcgagttttttttttttgagtattgctcaagccgtgccgttaaatcgatagctctgcactggagtgaggaagaccagatgtactgcgacgttacagtcgacgacgatggtttgttattccctatctctcataaataccttctttcatccgaacagtctagactcatactttggtattctgtctcgttcaacagatgactctgttcccgtttgtcacgcgggttacgtctctctttttcctttcttcctcggactcttgcctccctcgtcgcctcatctaggaccggtgctcgctttgctaaggaatccagccaagctctggtctccttatggaattcgaagtttgagcaaagaccatccattgtttggaaccgatgaggattattggagatctccagtttggatgccgtttcaattcttggcgttgcagtctctttacaaggtacggatcaggttcaatcacggtgtaattccatcggaaaaattgaaggagaacttacgagcttttttggggtgaggggcatgaacagatatacatgcctcagccaggtcctcatcaggaaacggccagaaaaatctacactgagcttcgatcgaacctgatcgataacatcttcaaagtacgctttctcatcatttttcttcgttttgtttcattcaagtatcaccgttccatatttgatagctttcagtccattgaccaagtgtttgcctcccctgaacttttggaattcaggagtaccaacgtacgggttacatttgggagcagtacaactcgctcacgggtgagggcgcacgaaggtatatttttcgtcctctgttcgttcgatccgcgctttctctagctaattagtctgttttccgtgattgtttgaacactttcagtcatccgttcacaggctggacggctttgattgcaaacataatggcagagaagtactagttgaaaatgatctagaatagaagcagatagataaatgaattttgaatttgatgttttgcagaacgaggttatgtgtgttagagaggactgtatagatttgagttcaaatttacccctttcacctcaatcttgtgttggatagatagacgctggacacaaggcctgatacacatcttgcgacaccaacaccaagttattttgttcaaagactagaaacttatatctttcccttcgttgatgctgaccggagagaaatcgggtgtttgatagagaggaatctgcgctattgatatgcgaatctaaccctaacaatcctccaacttgcctcaaccgctcagcgttggaactcatacccatcatcatcatcatcatca

SEQ ID NO: 638 - DNA, 8639 bp, Xanthophyllomyces dendrorhous
gctggtactcgatcacctacggagaacgtgacaatatccccggggagcagggtgtttgcaagaagcgtctgtgaatgagaatctctacagagtcggacaaaagaggagatagtcagaattgaaaaagcggaaggcgagagttgatcaaacaaatgttcttgcgaaccgaataagatgacaatagtgaggaacaagcttggatagtgcctggagagacttttcggatcgctgctcttgtacgaatccgactatgaagaaacaaacgtgctcacatcagtatctcagcacaatggctataacgagaaacaatagcgaaagatagaaccctacctgtcaaaacaatcatgaccgcgatcgcgatactaacggcgtcgtctctgttgccaaccagcagactgacgccagcgctgccaagaagcaacaggatcaacggattttcatagatctgttttgcaaacttgattgcgatgtgttctgtctcagacacttggaactcattgagtccatggattgaacgaaggtgatctagcaacgagcttggtaatccagtggtgggtgaagttggatgatgaaacttcagggtttcttcgaccgataaggccgcgaaggtttcacttggcgtcgtggaatctccaggcttgtgagatccttctcggtcttccaaagggatgtatcgctctgggctcgagcttgctcctatacccattcttcgaccaaatgctcgaagtttcctaccaaacccatctgactctctacccgtgttttgaccagcgatgatgtctgagccaggtcgatgaaagtcgaagcttgaattagagaccgttcgtctaagggtagtcgagtaggcaaacgtgctgcccgactgaagtggaggtgatgcagatagatcggtcatcttggttgcacctgggtgagctgaggaagaacgaggatatgacgatggaccggcgtgggaggtaaatgcgcttgaggaagaggcgttggcagtgtttgggctgagggatctaggatgaacgagtttagaaggagccatgacggctggggtgggtctgacgaatatgacaacaaagaggaagagaaagaacctcctgtaatgacaagattcgatccacctgtatttctcctctgatcgatgtcaaggacgttttgtttgcgtcgggaagaaagagaaagggaggatgagaaagaggattggcgaataaaaaaaagttggcggtcgccagttcggaactataagtgatttggtcctacagatgagcaaatcagaacgataaaggcacaaagaatctatttgggagcaaacccaacactgtacgagctgaacaggatcgacaacggatgaaggcgaggatgagggaatggaagatgcctgatagatcgtctgttgatggtagatgttcaaggagaacgaaagatgggaatcaccgcggcgggggagcgtaacaggcgagtgtaaccttctcggagaaaaagatggaggacaaacatcaagcatacataaaatggaatcgtcccaaagttgagtagtcgtttctgttgttcgaccggttggtagaagggtatgtttggatatgtgcgcgtttgaagtcagatgcgctcagtctcgctcagttttgctaccagacttttaaatgtcttgtgggcaaactgatcggtggatcactgatcgaggatatgaggcgaggtgatacagtgtttaaaatgctgcctgatgatcagctgcaactagaagagatacgacctatccgtggtgtgatttctgtcgcttcatatggtctcacgatacagtgatcgcatagcatagatgggtgatggcgaaacttgcgccgacttcagggagaggttatggcacttgcgtcgatggacacaaagaacaatatcaagagcaaagaacacgatttctcgagtatttgaagtggaatcacaaagaacacaaagcgcacaacattgtacgacatcagcttgttcatcgccgactcctttgtgatgagcagaggagactcaaataggtcaagctagtaagcgtggtttgagcgcgatccgaaaggtttgaaaatatccacgttgcattttatccatcaccattatcctgatcactttccttgcccgttttccgaatcgaaatggctgttcagcaagcatatgctcggctaccatatatcaacgtacagccagattaccctgctgtcatcaggttagtgcagcaacggcaatcttttttatactcccgttggaggtcacaaactcggctctagaatccctcgctcatctccggatctcacgttcttcccttgccctcttgattcgtctagagacgtagcccagtcggtggtcaaggcagagtctttttgggcatcggcttacctagagaacgaaaccagtgtacatggcaaggttggctcctatttcctccagatatataatcatcaactacctcatcaataaccagtgcttgcgatttaatagatcagttgtgaacgagaccaagacggcgatcttgtgactcgggcaagagaaggagttaagatccatcgcataggagaggatgaggtgagtcaacctcgatgcttttgctcttgtatgtattctcaagagtttcgagttctgaccaaccttcatccatccctggctagacctctttcaaactctcgttcccgagtctgggaataccacctacactcataacgaagccacgtcaacagattctctcttcgctgtcaaacgtttgtctcactctttcgattgtcatctcgagcgccacaagtttgccgagcttaccgctgaatctttatcatatcaatcttgaacctgaaatcttttagtttcctcaacagttgaactcgtttgacgtctctgcaacattaccattacttgtccttggcggtgacgacggcgagctcaccgtgatagactacaagaatcacgagacgaagcctctgatactgaaaggatgtgtaggagacatcctggagaccaaattcttcccttctggagaggtatgtttagtcaatcgttaaattccaacgaagaattttgatctcaaacggagccgatgtgatactttctgcttctgctcctgaaatataggtcatcttgagcgctgctctctctggtgcgctctacgtccattctgctgttcgttcaagtaccaatatgagtacacccgcccggacgctcctcgcgcacgtccgaccagtgacaagcgtatcgatcctgggtcgagggagacagattctctctggctcaaaggacggaacactgaaacgttgggatgtgggaaaaggcgtcgttgtcgggaatctttccgttccgggtggaagagacgagatttggtcagtcgatgttgccgtcaaacctggggctgaaggtggtaatgaaggcgaaatggaggaaggttgggtggggttagctagcggaaaggtcatgggtttcaggttggtgtccgatggttcgttggagtggtctggcaaggttatcgaaggtcgacaaggggacggggtgaccgcattagcttgctgtgtacgcttttcttttttgtgtcctctttgaactcttttagtcataccttcttccaagcaagaactgatctgacgtgaatccacctttcttctccctgactatcagcctacggatccctcacttctcttgaccggtacatctcagggatttatcaatctctaccaaagctcttcctctttgatcaccaccaccggcaataactccgttgggtcacttacatcactaacgacactgcgtcgatcatccgcggctacgacctccatcgcttggatgactgactctgatacgtcctttgtcataggcagtgaagacggaatgcccttcatctgtcactgctctcatccttctcaacaagcgaccataggatctaaagatatctcccaggaaccagtcacaataccgaaggagtcggtggaggaggaggtcaaggggtatatgagcagtgaatggaaagtccgtgaagaattgaccggatttgaggatccagtaaggagagtcaggatcgttggaaaccacatttgggcaggcggaaagacaggtgtcttcaggtattgatgatggcaactttagtttttctcttctatctttctcttgccatatttcgctcgagtgtttgcgtgaacacttgaaatagtttgtgttgttgagaacatatagtaaactcaaaattaagcagttagaatggaagagagaaagacgattgaaacctatgaccctaaatgaaagatacgaagaaatatatatatgtgtgttatgaaacatgatgaaatgatcaaaatagacggaagaagtgtgcaaagatagggataggggtttctgatttaaatcttagaaaagacttagtggtggaagagtcgaagacctatcagtgtagagattgagaacaacgagaacataagctttagtcgtaagttcttaaacacagaacagcaagtgaaagaaagcttaccggtgtgggcaaagaccatgccgtactcatcagccaccttgatgcactccttgtccatgatgcttcctccaggagcaccgatgaaggagactccggatcgcttcaatcggtgaacgttgtccgggaaggggaagaacgcatccgatccacaagacacaccagtcaacttggccatgtgctccgatcgctcctcggcggtcaaaggagtagggacctcggtgaagagcgacgcccactgatcgtgctcagagggggacgagttgaaagcggtaccagtgacgaaaaggtcaatggcgttggctacgaataggagccgcaacaagaagagcgatttgtcagcctcgttgacttgagattggcaagagatacgtttaaaagaaaaaagaccaacccttatccgctcgcttggttccctgcttgaagggcaagttaagaaccctgtcgtggtgtctcaaccaccagttgtcggccttctcaccagccaatcgggtgcagtggattcgggactgctgaccggcaccaagaccgatgacagttccgttgagagcgtagcaaaccgagttggactgagtgtacttgagcgcgatagtggcgacaagaagatcgagcttggcctgggtggtcagctgttggaaatagacattgagcgacaagtcagctgcaagcctaccatgcgcataaaaacaggacagaataatcggatagtgcgaattacaaacctccttcttctcggtgacgatgttcttaaacaaggactcgtcaatctggatatcgtttcgcctctgctggagggagataccgtagacctgtcgagtctcaatttcagagggaacgtaggtaggatcgatctagaagaaaacaagacgaacacaacagcacagaaagataagcgaccggattgaaggttagataagtgccacgaggactttttgacgtacttggaggacacagtactttccacccttcttcttctgaagaatctcgagagcctcgggctcgtatccaggggcgatgactccgtcagagacctctcggttgatgatcttggcagtgggcacatccacaatgtgggaaagtccgatgaagtctccgaaggaagacattcggtcggcacctgtgagactcacgtgtttagaaagacgttaataacataattcctcatagcgagaacgtgtttgaggagcacgaaaacgaacctcgggctcgagcgtaggcgttggccaaaggcgagagagcgtccttagcaaagagatcctcgacaccgaacaccttggcctcgatctcgctcagtggaagaccaagcgcggctccggccggggaaacgtgcttgaaagaggccgcggcggggaggatagggttcgaagtagcagcggaaagctccttgacaagagcataagagttgagagcatcgaggtagttgatgtatccgggagatccggagaggactgaagaatatattgaaatgataagttcgaaagagtaaagattaggtcagacgacaaaatcgcatggtatgttcatacaattctccatcatgaactacgcacccttgatgggaagctctccctcagtgacgaaagcttgtgcaggggcctggtggggattagctccatatcgaagctgcatcctctgaacaccggcggagctggaagcttctcctccaagagtagcgtactgcttcctgaagtaatcggagatggccgaatcgtactcggcggtcgactcgaaagccttgagggcaagacccttcctagtggactcactaaccttgccgtccttctgaagctcggcaatgatggtctcgtaatcggccggggcagacacaatagagaccctgccgtggttcttggcggcagctcggagaagggtaacacctccaatatcgatctcctcgatggcgccggcgatagtgcagttaggagcgttgatggtaaggacgaaggggtacagattgcaagcgacgatggtgatgggctcaatcgagttagcagccaagtcggccaaatcggattcgatctctcgggagagaatacctatgaagttgatataaagacaaagtgcaaatgatgatacattaaaaaaacctcatcagtgaccatatgaagtaatgaagcgacaagaagatgacgatcacgcacctccgtgaacggcagggtgaagggtcttgactcggccgccgagcatttctggggccttggtgatggaggaaacatccctgtgtagcaccaagagtgctgatgtgattgagtttcctagacggattttgttgaccgagacaggaattttttgttctgtcgggcgacttactcaatctccataccagcctctcggatcatcttcgcagttcctccagatccgaggagtctgaaaccaagcttggtgagcgactgggcgaaaggcaaaaggccagtcttgtcgtacaccgagagaagggctggttaagaagtgaaatttgattgtgagtcatggaccatcaaacaggggtctcgcaccagattcttccaaccatttgcgttcagcttggtaaaacttaccaataggcttctgttgagatgaggacatgatgggcttgatagagaaaacaaaggagatctagagggttctgtgggtggttgtgaggaagaaaaaaagaaagaaaaaagaaaaaagaaaagaattttaaaaaaagttgatggcattttcggaaatatcgtccatgatcgcacgtgatctggccttggttactttcaaaaatgtcacatgggctacgctctttgtcagagatactgtaagggacgggagctggactggtaacggaagggttgtaaagtagtaaccacacaatactcttaggttttaggggagaagttcaggctcctggaactgggaaacaggattgatagggtcactaggacaaggacaaggacaaggagtagatgtcacgaagcattcaagactgggatttttatctacgagcggttgggagagtcagtgttatatatggttttcataccctagaagcacgatacggattgtgaagaagacacgaagatgcgcttaatcatcagggatgcgcaccagcacgttctttgtgctggagcgagaaatggagaagaaggagaggattgggaatcttcgcgccacagcttacgaacatgtgtggctcatgctggcttcctgacatatatcccctgagggaatatgcgcggaatacatggcttgtagaccgttcgctttgtgaaagcttgaggtgctgcccctgcgctcacctctctaccggttgtacaccttgtgttcttctaccataatcacagttcctttttccaacatgctcgttccttaaactatgagagaattagttagcggcgctattcattcatagtatcgatgacagcgagtatatatatgagttcataaatcatcacagatacatacaactcaggttctgtagatgaattctcccagggtccgcgcaagaaagaaatccatacctcatcaggttcaatagggcaagaccgagccatcatagttcagcagcttccctccatgagactccctggtagcctcgctgacgaccttgaggactgcttccgcgctttgctccgggctgatcgctagatgcgcgtacgggctcttctcgccatctccagacagatccttggtggccatcggattcatgtctgttgcgacgtatcctacggagaataagataagcgagaaagatttgtcaagactgtgcgtcactcagtcagtcacccagccatgttcttctcttcccatcagatcacagaaacgcaggcacgcatgacaaaagagaccgacctggatgcagagggaacgcgatcagcccaaagtcttcgctctccagatggatcttgacggtcgcatagttcgccgccgctttcgatgtgccgtagacgactgcaggtgtgttgaattgcagagacagtgtcaaagatcccaatgctgaggagatgatgacgaacttggcggcgacggctgaggcctggagaagggggcggaacgccttgtatagcacgacaggtccgaccacgttgacctcgtagtgggccgtccactgggcagggtctgactcgtgcaagagacctatagactcgggtgcagcgatgcctggacgtgctcggcagatcagacacagcatcgcgtgaaggagcatcgtgtgagtcagcat

SEQ ID NO: 639 - DNA, 14332 bp, Xanthophyllomyces dendrorhous
  misc_feature (14029)..(14038): n is a, c, g, or t
cgcagagaggcaaaagagaagcacgcagagaagcacaggactgaccgagatatacggtggtgtcggacatggctgcagaggtatagcttgttggtgtgatccgagacttgatgggtgatgggtgatggacagtgggtgatggacagtgggtgatggacagtgggtgatggacagtgggtgatggacagtgggtgatggacagtgagtgatggaacaggatgagtgatggaagacaagacgagcagagtgatgcatggcggccagatctatggtcttgttatatatggctgagcatgttcgaacgacggccagacctggtagctgattcatcagctgtcgtctggactcgacgtcgcgcatgcagtgttggtttggcgagagattggtcatcgaacgcgatggcgataccgtctggatggaacgacgtccgggcattgcttacagatcaactgacaagagcccgggatcagcacacgacccggccgagacgggtccgcccgagggggatggatgttggcagcatcatccaggacgacagaccaggatgcggtgttgtcgatggtgtgtagcacgctcggttgcttcagcagatcaacatattccgtgaacgaatgtccacaaccgggcggaacatttggtcattcaagagttgatgttaggggcgtgagctgtgctggaagccgggaagatcacgaactgcataccccgcaataatttcgagaatcgaaagtgagaatttcaggttatctgacggtgatttgtaagtacagaggcgcaggaaaatactatagataggtcacaacagtgggatatcaggacggctagcaaagactgggactgaggtcaaggacagcagggaagaacaacggggggaaagttgacaaagagaccaggcttaggaggctatactatgggtagcaaaggaagtctatcttacacatcattctcagactcctacaacgctgtatagaggagtattccataggatgtatcagatacacatgtgctggacgactccatgcttgcaagccggtgcctcgcaagagatagaggagatgagaaggcgatacggtctacaagtcctgtattctgacctggaaacctaagtcacacctggttggtcatctgtgagccatagaccctctagtttaacacttctccttcttcaatttctcgcttattctgcttcccacgcattctatacagtgcttctagggcctgaggtccatgtgcgagaagggtgttctcgactactcgcaggtaagaacctcaaacttggattctttgtgactttccttgttatctttgtcttcccttcctgttgtccttgtccccggtccttgcaatccctgctgccggtcctgtccacccgttccatcaccttgcgtctctgtcctccacagtcctcgtatgagagcccggatttctacatctgcgcactctccagtagcggttacaccatctgtagccaccgagctacaggcacggctcacgcccgaaatgctgagccgttgcctccacgtgaggatatctcggtcgcaatagatgacgtcagccaatagccgacagggcaaaaaatcgatggcgaagctcagggagactaaaacctgtggaacatcgacaacatgttgaggacatgctgagcaaacgagcgcacacacgcgtacatgtatagcaccagctctcactctatagacgagcctttcggtacttcttgctagatagaaaatgaaaggataagggaggaagataaagaaaggaaaggaaaggaaaggaaacaaggtagataagaaatcgttcaatcagatgttcaccttgtctgatggactcgttcagagatccatgctgatccagtgacgttggcgatgtgtcccgtgattcgatcggcgtacactcgtcctctcctccacacatacctacattccatgaatcctataaaggaagggatagcttcttgaatctcgttcttgaacctttatctttctcccatcgtttcacatcgcttcacttactaactcacgggataactcgttcagtccatataatcacttaatctaccatgcaaagtctgtccttcgtcatctcgctgattcatgaacactgatgttgatactaatagacattcatccaattaaacatcaatcgatgtagctgctgccaactttcttcaggacaagatactcgtaggtcttcaggattatactcagtgtatttgtttatttcacttcaagcccttacccgatttgctcacttttctctgcagggaggtcccgaaccagtcgatccccgagcggtgccagagtacaaacatcgaaagaacccggatggaactccgcagatgatgaaggtacgtctcatatcattttgattgctgatcgtgaccgactcttgtaattaacacatttcgtccgtactctccttcaggctctcgcctggtaagttcaacttctgttacaggttcacatctctcgtcggaacccacacatacatctcagtcttacaacgagccgtcgcgcaactctttccaggttcggatccgagaaggtggaggtcgtcgatgctccaatcccagacatcaccactgagcgagacgtcatccttaaagttaccggaacgaccgtctgcggctcagaccttcacttgtatcactccgaaatcgtcactatgcagagcggcgacattctcggacacgagtttatgggcgtcgtcgacaagatgggctcggaagtgaaaggtctcaagattggccagcgagtcgttgcctctttccaggtcgcctgcggttactgccgatattgcaagcacaaggaatcgtccttctgcgaaaacactaataactcatctttgatgggtttcatgtatggagccaaggtttgctcagtctctgaatcttttggatttggattgagttttatcaaacattaacgaaattcttctctggttaacctacaaatacaggacgccggcttctttggatacagtcacttcaccggaggttttccaggaggacaggccggttagtttgtcaactcttgtgtctcccacatggttcgaccaataacaccttcttttctcattccctagaatatgtccgagttcccttcggagacgtcaatctggtgagttagcctcaagtcagcctttcggcctcaatcaagattgtatatcaactgatccctctccttttcttagctccctattcctgacaacgtcaccgacgaacaggccatttatctgtctgatgttctcccaacaagttatcatagtgtggtcgataccgaggtcggagagggtgacgtcgtcggaatctggggtttggggcccatcggtctttgcgcagcgaagtaagtcgctcgagatagctcatctttatatctctgttggctaatggtgtgctgtgcaacccatcgcagatgggctctcctgaaaggagccaagagagtcattggaatcgaccttgtccaggatcgactcgcctatgctaaggagcacgtcggaatcgaagtcattgatgcgtcaggtggagctgatgtcgtcaagacagtcttggagatggtccctggtgggctagacgtcgcgctcgactgtggaacattccacgagcctaagggcatcttccacaaggtccagaaggcgttgatgttggagactgataactgtgaaaccatcaagtgagtgatgctgtcccgccaaacctcaaacgacttcctcgatgctcacgcaggtctacattgacaaattttcttatctctagcgagtgcatcgtcgccgtcagaaagagaggacgggttggactgattgccgcctattctgcttttagtgcgtaatcaatttgatagtctgttgcctatccggtctctttctaaagacattaattcacctgtcactacagccaacggattaaacataggagccttgatggaaaagggtgtccggctccaagggtaagtgatcttttcacctgatcaatgaagggtttgatgtgcgcttatgttggtttgaatctctttgtccatagcaatggacaagccccagttcacaaacattgtatgtagcgctttctagtgctgagactatggttgtatacggattcctaactttccatatttctcggtatacaggggagactatcttgaatgattacatcattcctggaaagtttgatccgacgttcatgattgtgtgtaccacatattcacagtctacaattagcatccgttgaatctcaaccttgagcctctttcactttgtctcgtccatttagacccaccgagtgcctttggaagatttcaaaactctttatgataagtgtatgtcgttgacctagacagttgcttctgtgtatgtccactcgatgctgaccatgtccttgttcttctcttttcctagtcgacaaacgagtaggaaacatcgaaaaggtgtttgtggaaaccaagttcagcaaccgtatgtatccactttgcaggcttttccaattgaggtggaaaggtttctgaccttaacttcaatgctgcgatatccatagctccctctgccaattgccccaagaccacccgggctgccgacattggaaattaagcgacaagcagaacggacgtctctaactgatcagagtgatcgaggatgtctctttgctatagttatatgtaatccgtagcttcatctgtatccatatctacctgagttgtttctctcgatgcaatgtgctgtactttggaccatttgtgtgatactttattcggcaagctcgtatgttagggttaatgcactgacaaggctacaaaacaatatgaattttgtgacactttgattaggaaagatgaaagctctctattaacttttcaagctgatcaccaacgatcaattcaacattgacccaacatctctgcccaaaagtatctccgcaactccctcaacatgtcttttccaagctcattgaggtctgcgttgtcctctcgggcacctttctctcatctctctcctatcttcctggcatcacaccgattatatgcaaccgtcccttcgtcaccgaaaagcacaaccactaaaggtattatcaaccaggcagctgccgagcgagtcgaatcagccagactcaaggcagaggaactccgggctcaggctgcaaagctagcggatgatgttgatattgctctgcagacaaaagaaggaagaagaaggttaaacgagatgcctattgttatcagtggtcggtctttccttttgtgatctagtcgggctgatggtcctctcttttcttcttggtccaggtcaagaaagactggtccaagtggagaaagagagaaagaagcgaggcagatcgtctgatcgagggtcatatagagatcggctcttgggaagatctcgaaaacgttcccgtttcgtttggtctgacatactgtttcttctcttttcctcgcctcattctctccccttgaaatcggcgtccttggatgtcaccacctccattcgctcgtggcttgggcttttccttgtgtttcaatggaatcatttgataaatacgattccttcgtatgaaatatcatgaattaagtgtacgacaacccggtgccgtataggagcaagaataaggatgatacgttgatcgaatacatccagcatcgattcggagcattctaccagtctcgagacgcgttcgttctttctcactcttgcttttcccccttatctctctttcaacttcagtgtcaggatattctgagaatattcatgactcatacgtttctgaatctctttcgttttatcatgccatgggattgaaaacgattaggatgacagaatacttcaagacgcctaaatggtcaaaagccgaattgatgtacaggcttggctttggtgaaggcgtggagaggcggtcaagtcttttgaaggaacttgaaggtcggttcgaagccttcaagaaggctgaggtcatgtacgtctctctgtcttctccgagcccaacattgtgttcttcgttcacctatgtagcctcactctgtcctttgcagtggagaccgacgaacggtcgaaaccgtatcctgtcccccaatccgacaatctgtcatgacgaaactaaactcacccactcgaaactctcgattacgtcaagccacatggacaaagacccgatcagtttctaaaccgaaactcatcagtttcttcagaatgccaatccatccgaagcttgtgatgtggcaggctttggttaggttccataccgagcaggtatgttccgccctctgaatatgcgcgtcgttactcttgtgcctgtacaacttttaaagaaaaatctttctacgttgggttttaatacgatcaattttgggttcggcaacctcttcgacgctacgtgtctcctcttttagacgattcaaattccggcgacaaaaccaacggaacaagagatcgtcaaaactcagactctggttgaggacgtcctgttcgaacgccgagattggctcgagccaaagcccgattggaggatcagggatttcgtgcctacgcatggaatcaaggaggattacactaaagagcttccaattgagaggtttcagtgataattcagtggtatcaaggaaagacaggatagagcgaggcgttgatattaaccaaaacatgatcaatgcaaaaccaaaatcccgtaggatcttgaaggggcgaaggaagagggggggggagtaggctgatcttatgaaagatttaatctccgtaatcttcttcacccggcttttttttcgcacggttaacgagacggaagtgcacgtatataatatctaagagtcacatcaagaataatacagacgttaggcaagaaggattagatccatattcgattctgatcgaccgattggtgacatcacgcgctctccccctccaatcgtttttggtctgacttatttgcttgtcgttctaagtgctcattttcttcgacctcgggtacagctttgtttgcgctactgttcgaactcttttgatcttcccaccattcaacaccatatctatcattcatgaaagtaacattcgaaaattgaggcggcttaagcgatcgtctgcttgatgagacagagagagcagggaaaaaacaaaaggatggtcttgacgaactctatcgcgatgctttgaatctcgttcctgactcgaacaccttcggccgtgatctctttgaatcgttcaagatcgaatctgatgatcaggttttttaactcaacacgcacgttagtggtttagaacgactcttcacattccaaataccgaatgaagacgtatgtaacagaaacgtacccatgtgagttgtacagtgttgcctggcgatggctgatggtttttgctgcatccgtcccaatcagtcagatgccaaccgtacatatacatgtcagttatcgcagagtctttgtagaaattgagttgacttcgaaactgactcaaaatagctccatagccaggttcgcctgagagaacccggtgaaatatacgacataaagaacgaatatcagcactggatgtcatgagtattcagctatgagtgagagagtacaacgaacgagagtgtataagccaataaacgtatccagacacgaggacaccatggccgatgaggtaagtcacaggtctaaaaccgagagggattatagaaccacaaagtcaatggagaacgtggcggattgaaatcattgacattcaactcactccactgaaccgacccaagtcggaaaacaacatgtaaacaacagttttgaacgagtcgcatcaggatgactatcaagaaagaagaacgatacttactgacgtcccaacctaagctcgtctgaaacgtcaaccaataaactactccccaatatcctatcaaaccaaccagtccactaaaggccactcttttcgctcctttctttgcctccttatcacaaagcgtcttgagctcacccatctggatcagagacttattgatttggcgaagtctctctctcaaataaacagtccgatcctgaaatgtcggtaccgatacctccagcgtgttgatagggccttctttgaatgcttcggaattagccgacgaaactgaagagggatagagcgagatggtgaatgaccggacatgagcagcttgcttgatgaaatcgccttattcacaagaagacccaagtatcaaactgtaagcccttgtctcgatgtagtcaatacgggtcaaattagaactaagggcgaaccgacctatgtctgtcgaatccgaccatctgacttgactgttggttccaaatcctttgaattcaactcttccaacttgaccatctggtagctctgcagcaatcagcctgcctagataagataacggctgagaaggatggagcacaaaagcgcaaggatgagagggcgacggtaatggtagagttaacctacaagttgaacatagtaagatcagcactcaaagctgatatctataatgaggcataagcggactcgacgtaatactcacctcagcagatgagaactcgtactcgatagttgacctggtttcgttgtataaaatttgactgtgagtaggaaacaaattagtatagataatccgaatcttctcgcctttgagttttccatccgaagcaacaagcaggtctgtccagtcgtcctccgtctccattgcgctgtttggatcaacagtagatctctttcgcccagacggtctatttggtctaggtacatggtcgccttgctcggcaattgtctgtccttcaatcgtgacttgagcttgactaatgctatttgcttcagggatgggagtaatagaaaatgctcgagaaatgactggatggaaggctgttggttgacctaatggattgctagaacgatgacatgtccgcgtgactgacggtcgggcacggttcataatatgcagtttggggatagatccccaaaaaagacgaaggataggatatgacatcgaactccctttggaacacaaagagaaagagggtgatagatgaacagaaatgaaaggagaagaggagcggtttactcatattctcaatcttagctgaggcgatgacgacagagtacgcagttggtagtcaacgtttatctgctctgatctgatctaactagatcaaaagcacatggcacatatttctcaaaattaagcaaatcgagaaaatgattgaaactataaaaggcggagatataacaagatatgaaaggaagcaaacgaagagatctatatgtacaagcacaggagattaaggccaatataagagtaaagatcaaatctatctaaaggggtcggccgagtcttaagagcttgtaccactttctcgcaattggtttagcgtttcgttccttggccatcttctcctccttatcctgctctctaacaattgctccctcccctcgtttccagacgactccagtctcgaagtcggcctcgagcgcgggaacgaagagcggcagacctcggaagttgatgaggtggtaaatccagtacgcgatgaagaatccaccaaacaaaacaactccgatatacacaccgacgatgtcctgttcgatcgaaaaacgaagatcagaacaacatgcaaacttgaagctagaagcttgtcagagatatggagagaagtagatgagacgatcgaacctgggcaagagtatccgaatcatatgtagttgcagcccatccttgtccagcgaagatcagggcgccaaggatgacggcaacccaagcaagataaggagaaaatggagctttgaaaggaagatcgaggaaatctcggccttggatcttccacgcccgtcggaatcgcaagttgataaaagcgatagaaatccaggtcaacaaagaggacgttccggtcaaattaatgaacctgtaaagattgaagatgaggataaaccagatcagcaaaagtaacattgattgtgtttactgtaacaaaaagatcataggcgtaccatctaaaagcaacaccttctccccagatagtagccaggaatgaaagacaggacacagccagtacaaccctatggagttgaaaaggcaaaatatgtcagcgagggagaaaagacagagaatttgatagtgggcacagaatctacatacaacaatgcaggaacaggaactccctggctagtgacataacctaggaccttcggagcatggcctcgcctaacagatcatacgcaaacgcgtgaaagattatcaaagatgagcaaagtacggtgcagaaacaaataagaatagacttagacatactgggcaagagacatgagcattcgactactagcatagaaacaagagttggtggccgatagaacggcggtaagaagcacggcgttgacaagatgaactccacctccgaaaccggccattttactaaacacaaagcagcgcatgaattgtcagatctttcgctcaaactacaaaaacgatttagaacagaaatatagaacgaacaagacaacggtgataggcgaagcggctacactggaatcgctgtcggcggtgaagagagactcatcattgtggttgatgtttaatccgatgaccaggatcgtcatgatgtagaacagaagagtcctacagagattcaagcgaagcgacggcaagcgttgtcaatacattctgttaggcacatttgcagatcagagacgacacgacatggacaaaccggaagaaggttgccttgatcgcgcgaggcacagatttgtggggctttgatgtctcaccggcggccagcgatacgagctcacaacctccgaaactaaagaacgcataggtgaaggactaaaacaaaacaggattagtcaacaccatgtgcatgtagagtcatacgtgcagagtaaatgcatacttgagcaaatccggcgaaacctccgaagaagggtccatccttgaagttagataacccaggtccaggatgaccgatgactcctccccagttgtagatcaaaccgacgctgagatgtccaaagttgacgcgtttacgcggatgatatcaggtaacgtcagtgctggttgatagtagaattcaaggaagacaagatgcgaagaaggtatgattctcacagaataaagacgatgatcaagagaactttgatggatgagagccatagctcagcctcacctgtgatcatgcaaagttaggtagaatggttatcataactgattgactcgtacaagagcaaaacggagatgtactcaccgaaggctcgaacgttgatcaactggaaggcgaaaacgggaacgataatgacgagagccctgaaagttcaagaaaaatcacgtcatgccagtatgaagtagagacaacttccgtttgcaaatcaacagaccattgccaagcttgaagtgtttgggtccagtagttcaagatgacagaagcagcgatcaactcggatgggatagacaagttccactgtaggtacatatccgcatgaagtcagtgttgagtgtaaagcttgatgagaaaccgtgaacaaaacctcacctgcaaaaagtagttcctgtgagatgtgggatagatcgatcaaggttagcttgaagggagaaaaaagatgccagtgatgaaagactcaccatccgagagtgaatccaagagcaggggaaacgaatcgatcaccataggtagcaaacgctccggagccctacaaatcgggttgatcggcatgatcgtccgactcgctgtcaatatagtaatcgctacttcgggtgtcaaaaagcgctaagacatttaccggaatcaacgcagacatttcgcccaaggtcaagactactccatacacgaagattccaatgagaccgtaggcctaacagaaagtaaagcagtagaactatcagacacgaagcgtcctcttttgttttcttggattgtgaactcacgcaaagagctccgccggcaccggcagtggccacggatgttcctgcagacaaaaagattccagttccaatcgttccacctgtgaggagaaggcatgatttcggagaggaagagtttgacaataattcatccgagacgaatgagacgtttgttgcccgatcgtcaacaaggaaggctcatttcttcactagcataattaaaggagaagaaaagtccggacttaccgatagcaataaacgtcagatgccgactcttcattccacgaatggtcaagtttgagcctgatcccaaaaatcgcttcttcttggacgactggatggtagtctcttcgcctagaaccggagttggaaggatatcctctacttcagaggtatccttcaggtcagaagatttttctccgagttcaatcgactcgctcgcatggggggtttgatacgacattatgctctgcttatcttgagtaaaaggagaagtcaattgagaggccactaatttggatcggtgggcgaactgattccttgaccaggctgaggagatagatccgaatcaggaggaatgtggatgagagaagcggacaacgaagctaagaaagctgatcgagaaacaaccgatatgcctatggcaggctgaataactcgaccggttaatttaccaaggaatggcatctacggaaaaaaatatttggcgttgtcgcccttatctgaaatttctcttcttttctacgggcccctcttgccttgtcccacacgttccttccctatttctttctttttcaagttcgacttttcaacattatcacgactgagtacaaagaaacaagttcatgcgcttaacgctgaccaagtcgagtcgtctctctgaaagaattgttcgctcgcttattcgaatcaacagttgcgcttaggctatcaagtccctccgagatgtccgagtctaccgggtatcgaattcggctaacgactgcgggctcaggtgaaacctgaccatcagcggacgatcgacctcatgcgagaaattaaaacaaaatagcatctaatgtcgacataaaatgataggcaagggagcagaaacaaataggatacgcctcgagtttcaaaaagaagagagaaaagagccgttctagtttctatagggcgtccttgccggtaatcaacaagctgttcgcatgatcctcacgtcggataagtatcctctcccacatccttcgcccttcgtgcagcgtcacacttcccagcccaaacgcaagcaccgtaccaaagtcccggagactcaacgcctgcgtctggaagaccccctgcaggaaaggcagatagatcaacccgagctgggcaaggaacgagatcgagcatgtcaagaagagcatcttgttctggacaagtcggcagctcaggcccctgttctggatagcagatgccaggtcaaggaacacaaacgtcgtgaacgtctggagagacagtccgtcgagcacaagatccggatggggtgtgtcagtagataggatcatgatgcacactcagatacactgtcccgccaaccagaccacaaactgaccatagtctgatcccgtcgagatagtcgcccgtcctgggtttcctgaaggaacatgtacagcgtcccgaccacgatgatcgccgccgagaagaacaccctggcaaacagtcgcttgctcagaatcggcgcgttccgaggtcgaggaggtcgcttcatgatcgccgggtccaccgggtcgacgcccagagcctgggccggaggacctagagccagccagccaacaacacagacaccaagacccagcggtaagcagtccgtcagcgctggaagaacaggtgcacgaacaaatgcaagaatagatgcaagcacagatgcaagaacaagtgcaagcacagatgcaacaacagaatgataaaagccaacgaaccgtccataaggatgttgataaacaggatctgcatcgcgttcagcgggttgctcagcccaaacgccgtcgtgatcgtgatgatcgacaatgcagcgacagcagtcgacagctggaacaccaggaagttctggatgttgtagaagatcgacttgcctgccaggttgagacacagcacagcacgagcacaacatgagcacaacacgagcacagacatccatcaaccgtcacacatcaagcaccaagcaccaagcannnnnnnnnngaacaagtgcaagcacagatgcaacaacagaatgataaaagccaacgaaccgtccataaggatgttgataaacaggatctgcatcgcgttcagcgggttgctcagcccaaacgccgtcgtgatcgtgatgatcgacaatgcagcgacagcagtcgacagctggaacaccaggaagttctggatgttgtagaagatcgacttgcctgccaggttgagacacagcacagcacgagcacaacatgagcacaacacgagcacagacatccatcaaccgtcacacatcaagcaccaagc

SEQ ID NO: 640 - DNA, 2065 bp, Xanthophyllomyces dendrorhous
caaacatcaaacatcaaacatcaatcatcagcacagcgttcatggaagtagcggcatcaggtgtacagagaaagcacgacagaaagacaacaactgaccttcctccacagccggcaggatcgtcgcaaagttgtcgtccaccaggatcacatcggccgcctccttggcgacatccgtgccggacttgcccatcgagatcccgatctcggccatcttgagtgcaggcgcatcgttgacaccgtctccggtcatggcgacgacctcgccattcttctggaacgcggagatgatcatcatcttgtgtttcggggtcacccttgcaaagacactgatgctgttgaccttttcttgcaactccttctcagtgaggccatcaagttccttcccagtcaaacagctctctctgccaggtcccattttaagtccaagcgttctggcgatactgacagctgtctgctcagcgtctccggtaatcatcactacatgaatcctcgctagctggagatgagcgatagcgtcagccacaccctttctaggcgggtcgagcattgcctggaaaccagcaaatacgaggccgccgccaccagagctagaggtctcaaagtcgagagcggagccttgaccataggccatggcgacaactcgaaggccagttgaagcaatgtctgacgccttggccaagattgtgttccttgtagtcgagttaagcgaaggagtggatgagtcggacacgtagtatgattcgcatcgatcaaggacagcttcgatcgaacccttgaggtagacgagctcccgtgtctgagaaaaaggtgcaagcttgcccgagacgaccatatacttagagtcagacgaaaaggggatctctgtcgttcgttcaaattcctgtgtcaccgaaataaagagaatagagctaattaggaacattgacgttcaaataggaagtaaaccatctgaagttacggtgataataacgacgacgaacatctcgttgatcttgccatccaaacacgtctagaacatttaagatggcgacgtctgtggcctgtccgacattgcacccatcatcatcggcgaacgagttgttgcaaaggttgccaatttgaactgtttttcgaagtgcaggcgacacattttcaggaggggagtggtgttcatcgaaagtgaccgtatcatctacggtataaattgtagtgaccgtcatctcgttcttggtcagtgtacctatgataaagccattatatgtcagttatggaaaaaccttaagcgtcgatatatctctcgtctcaacagaccaactaaccggtcttgtctgagcagatgacgctaacgcttcctaatacctctacactgggaagctttttcacaatggcctgtttattggacattcgtagtacccccaaagcaagagtgaccgtagtcacgatcggcaaaccttcagggatagcagcgacagcaagagagactacaatagagcagaaataaaagatagtgaaaagacaaagtcaatatcaacagatcaaatgaagtacaatgatatttcgaaattcctacctccaatagtgaacatctccaaccaagacctcttttgataaactccaatcagaacaatgattccaatgattccaaaggagagaaacgagagctgagtggcaagctcgtccatcgagagctgaagaggagttctcttctcttccacctatgatttgaagaagagatgggaagagaaaaagtgagtaaagtttgtagtcaaacacagtctcctttcgtgagcccgaaatgatccgcttacatcctgcatcattgagaaaatcactccaaactccgtcttgctccctgtagcaacaactacaccagacccatgtccacttttgacaagcgttcccataaatgccacgcagtgcctgtctcccagctcgatcgttgtctttccgcccggcacgccttcagaatcgcatgcctcgactcgctttcgggcaggcctggtctctccggtgagtgcgctctcgtcgatctcgagaccgacggcagtgatgagtcgaatgtcggctggtactcgatcacctac

SEQ ID NO: 641 - DNA, 30568 bp, Xanthophyllomyces dendrorhous
gctggtactcgatcacctacagaaaagtgaacgatatcacccgggacaagatcattggccaaaagcgtttggggatgagagtctctgtgtaggttgaaggattgaccggattcgttgtcagcgcaagcgagagcatagcaatggcaactgaagaagaaccacataccgaatgagatggcaagaatgaggaaccagcttggacagcgcctgtagagacttttcggatcgctgttcttgaacaaatccaactataaacatggaagcaaacttagcatgatattgtctctgtaaaacccccgaacgacacaaactgttgatgttaactcaccagtcaagacaatcaataccgcaatggcgatactgatcgcatcatccctgtttcctacgagcagactgactccagcacttcccagaagcagcaagactagcgggttctcatagatctgctttgcaaatttgagcagaatatgttcttcttcatctgcctgaaactcgttagggccatgaatcgctcgaagatcttcgagcaacgcgctcggcaatccagtcgagggcgtggtagggtgatgagatttcaaagtatcctccactgattggctggcatacaattcactcggggtcacaacatgattcgacttatccccagacgactcagtgagctcgtctccgaaaggatgctgcgactctacaccattgatgcccaccccgagcttcttactgagggctttgatcttggccgagctctcagcaaatgaaccaagtgcgccaggatgagattcgacgcttgatcgagatcctgttcgtcgatgggtgggcgagtaggcaaaagtatctcctgagtgtaaggtctgaggcgggggagaggcaattttaggagtattgggagatctggatcgagggttagatatacgagggtaaggcgaagggccagtatgagacgcgtacgcgctcgaagaagactcaaccggggacattttcggaggagctcggaaggtcaaagtacacgtagagttgtgataaaccccaggatatgtcgttgtaggttgtacaactgttaggccaatctggttttatatctttacaatcaacgacgacgcaagaaatctatacatcaattatttgcccttgaacgttctttgactcaagcaccagaacgtatacaagaaacatagagaacccaagcctgatctctactcacaggtgtacaaatagtctttaatgccgactttatctatccggaaaggagataggtggcggttgagtagagattttgtttttgggctgaacgatgaagatgtgccagcacaacacgtacccctctgcacgtgactatatgattaggtaatccaaattctcaacaactctttctattcgagtcgagtcagtttctcttcaatataccagaattctttgacggccggcaagggtacaaaaccgcaagattgagaccaaaactaaagcacacgacgaacatctagagtcaccgcctcctctcactatcaattgaatcaagatgtctgaaaaaaagcccaggttgtttttgctcgactatggagcaggcgtatgtcctcttctccatccgttgtcagattgtgtcctcaagatcaaagactaattcaaagcccgttcattgatgattcgcatggtctttagaacgtcagatccttggccaactctatcaagaagcttggttacgagtttgaatggatcaaggacgcgtctgattttgaaaaggctgatgtatgcttatgtctttcgtctttctccttaacttttcgacttgttctatgtttcagcgtctcttatcgttttcgtggcatctttcattccttgttcaaacagaaactcatctttcccggagtcggcgcgttcccccaggcaattaactctctccactccagtaatctctttgagcctcttcgaaattacctccactctggacggccgtactttggaatttgtatcggtatgcaggttctcttcgccggctcggacgaaggagaccccatccctgggcttggtcttatcgacgctcgggttgaacgattcaaggcagtgagtgagacgacaggaaagtcaaagtcgattcctcacatgggatggagtgaggctacgcctttcaaaccccgaacgagctcaaccctggtccctcccgtaaaggaggaggttgaggatttgtactttgttcactcgtatgccgttcctttccgatcaaccccgcttatctcatcgtggacaaacacgaccactcaatatggagacgagatttttgtctcatccatcaagcgaggaaacatcctcgcttgtcaattccacccagagaaatccggagaagctgggctcaaggtgttggacaactggctgaaagctccagtagaggaaattagcggaaactttgacggacaagaacaagctcgagaggtttctgttaaggccaatgacggattcactaagagagtcgtcgcttgtctagatgtgcgatcgaacgatcagggtaagctcgtttgccggtcaatctcaaattcgtgttttttccatatggctaagctctattgaataccattactcaggcgaccttgttgtcactaagggagatcagtacgatgtccgagagaagacgaccgatgctggtgatgtccgtaacctcggtaagcctgtcgagctggctaggaggtactatgagtcaggcgcagacgagtgagtttgcaatttatctcaatactacgtgtcacgactgagtcaaagagtctaaatcatcttgacatccataatcaattcgaaaggatttgtttcttgaacatcacttctttccggcaatccgctttacacgaccaaccaatgttggctgttgtcgaggctgctgctgagacggtatttgtgccgttgactgtaggaggaggaattaaggatactgtcgaccctgatggcacagagagaagtgcactagaggtggccggtgcttatttccgaagtggtgctgacaaggtaatattttgttccattctctccctttcaagttttcaacccaattccttgagccagtgtgctgaaatagattcattgtattcgatattggttctaggtcagtattgggtccgacgccgtgatcgcggttgaggagcttcttgcccggcaggctgccggaacgcaacctgtcttgaccgggaagaccggaatagagaccatctccagagcgtacggtaaccaggccgtggtggtctcgttcgatcccaagcgagtctatgtcgatgctgcaattgatcctgctacgctcggtcctcacgctgcttcgctcgtggttggttccgaggcgaccggaaatgtcacagaggaggaacgttcgaaagcatggtggtatcagtgcaccattaacggcggacgagccgtgagggatatcgacgtagtccagctcgccaagggggttgagatgttgggagccggagagattcttctgaattcggttgacagggacggcagtggaagaggtttcgatttggacctggtgagattggtgaggaacgcagtaaacattccagttgttgcctcgtctggagccggcaaggtcgaagactttgaggaggtgtttgaaaagacggacgtcgaggctgctcttgctgcaggtattttccacaggaacgaagttcctatcgaggtatggttgttctagcttgtcggaatctttcctcacttgtcctgaagtgctaacgacctcctctttcgtcacactcgtacagaacgtcaaagctcatctcttgaaaaagaatatttcggcgagacgagcgaaagatgtggccggtcgggacagcacggtacagaattagagataaccagagttgactgattaaaaatgtagaatgtcaatagaacgtagatttgatcatcagcctatttgttgtgtttgcaaggagagacttgaatagaaaaaaatgagagaaaatgaacatataccggttcgaatataaagcagagggcgctaaagcgccctccgtttttggggtttcatcatatttggtcaacaaacaccaatccttcttcaccatctttgtcttcttctctccggaatccgactcggcaaatacccttggacctgacgttgtgtcctcttgccctctctctgttatttagatagaggtctcgcaaggggtcttcggcacatataatcttttgtcaacagtcgtgcaacggctgccagcacagctaggtttcaaatatattcgtcccttgattgacctgcttggttcccgatcgagaatgatgcttgctagttctatcatcaaaacatccaattctccgacccatcccttatcttcgttgcctcctccaggacctccgcgtaagcacacttcttaatctgatgctcttactgcttcgttttcttgcaggagcaagtattctctggggagttgtttctcctatcctagactccgcctcgttcggaactagactcctttttatatcgtttttactgcctgatggttatgcattaacacatcggaaaggattgccctgcatcgtatttttttacgttgtattcatgttgacttataccttcgttttcgtatcttcctctcactcatctctggcacaaacgctttggtagctaccgacgcccttcctggcctaccaactcaatcactctcctctgctggtcttgatccgccagtttctattccgctcgcaacgaggtcaacaactcgctcttcgtcatcatcgtcttctttctctccagaacagtcttcttctgctccttttcgtccatcgggtcacgatcaatcctacaacgctccctttctcggatcacacgcgtacgacccttcgtcacgtccaaacttacattctcaagggcgttcgttcaatcctcatcggcaacaggccctgccttcagttcagccaagcgtgatacagcccgtaagatcgcaaacgatctcgacgtctccctcccgtaattcccttctgttatccgcccggccttcattctcaacgcaatcccagggtctttccttttttgaccgatcgtctgttgggatgccgagaacaccgtcaagattgctgctacagcaagcattggatttggctcagatagccgttggacttgatcaagctcaagatttccatgaagcagtcgtcaggtaccaggaaacagtgtcgatgctaagaatcgttatagcacggattgagagtcgagggaatcagtcgaaggccggtataggagacggtagagacgatcaaggattgacattgaaaggaattgtgagtggcttggtatttccttaaatgaggagaaaggagagataggaaggatcaagcgaatttgacaactttcctttggctgttcggctgattttcaattttctcagcatgatgcgtacttatctcgcatatccatgcttcaagaacagcttaatcccccggacgtctctttcttgtccgaccccactctagaatcagatcactacagaacccggctggatcgtggttcttctcctgctcctgtccgggctatttcacctaccatgtcgagaacaacctcatcctcgtcagagtcgattgtgccccttgtgatgtcttcctttcaccgtccaaggcgcctctcatacacagctacagaagccgaatcgctgcccggaacgagcacaaccgagccttcccacatatcgtatctggatcgatcagcatccaccacttcctcctatcgatcgtcccatcattctcgaactcaacttatacataatacacctgtgtctcctctaaacaaccaactttccaacgctcagatatcatctgatgagtctgctgatcaatcaagaacaattccgaccttgaacgtcaatcctgaattgaacacacagggaaatcttcctccctctcatactcctaattcaagatctttgggcgacgaaccagacaggtctgcgttccagcgtcgacaaagtctgatagaaagtctgggtctgctcagtgatgacaacgcaggcgcaaaagaggcgatggatgtaacagccaaaactcggaagcatgttttggaggacgtccaggaaagcccaaggtcgattgccaaagagctcgagatgggcacagaaggcgagttatcagatattgataccaaacctgcgtcggaacgctcaatcgagcgaagagttgaacagcccctttctcaagaagcacaagccgaagcttcagtagcactctcgataccggatttgtctccttcaagtgaacgagagggatatggcgggtacatatctcacgaggatcgagctctttctcaatcgaaccaacggccgataatggccgagactccttcgtctgaacttttcaactcttccactcctttcccttcttctgtttctttaatcgctcgcaaagaactttctccaccgactcaacttgttacagttcagagccagtcgcctaaccaattactaggctcctctctgaatggacggtctatctcgggtcattcttctctgtacccatcgattcctctatcagtcagcaccatcgagggaagtccgtcgcttttgtcgacttctcctccaaacaatggccatgaccggatgctaaaccatcagagcacggaccagtttgcgatgagccctccactcgcccgtacgacatctacaacaactcctgcgttgcctcttccgagcgctcagacccgagaagaatcgcggacaaccctgctcgaacctgtcccgtctaatgtacttcgtcgcccatttcatataatgcgcgcattaaggttgacaatggtcacatctggaggtagctatctaacacctagacttcatgtaccgtccggagtatggtttcagaccggagtgttccttcaagccgtggataccaaggttcaagtcatccatgtgttggtggactatcttcaggcgatggaaaaaacctcgatgccgcttgtgtcaactatcacgccaactgatatggggtcaaactcaaagttggctgcaattggagtagaattcttgagtttgttggattcttgggagaacgtgatggagactgtgcagacgacgctggcgaagaaaaatgtggtacaacatagtaagaagggcaaaaacggaggagtaagtctttgtgttgcatgttcaatgaccggaacacagaccaccagcatctgatatccgttgttcgttttatgtatacatcgcgtcaatagtctaactggggattcaaaatcagtcgagggttggaccgcttagccaatggaaagaagtaagctgttaatgcccactgtcttgccctcattgtgcaccagttgacagccgcttcaatcaatgttttcaaccttctagtatcgatacccttcaagcttattcaagtagtttaaaaaagctttttgctcaatctcagtttttaggtatgtacttgatccgtttctccaataatctcgttaatcaccaccacatctagacctgatttgatttcgctggttgccttttgctttcttatagttgacattctccaagtatccagcaatagcaagccatcgcttcctaacgcaccgtacttgtgtcttccgctctccatccgagtccagattgaggccaggcttaaacggacatcagaattctttggacaagtcatcgttgcattcgtgctgaaggatctgatgttgcttctggataagtatacaaaaaatgtagaaaaatggatcttggagtagtttgtgaaatattttcggcattcgtcctcagaatgagcattcttgtaattccatcttatctgttgtttatgctttctttcttcttctttttttttgtcaacatcagtgtaccggttctagcttttgatcctttggaattttttatcttctctctttacctgagcttttcatagtcttcgctttccggtcgttctttccttactctcttagtgggttttcggtacactgtaccattggttttgtcttttggttcctttctcatcgtcttctttgatcgtagatcacttattcctcagccataacattcctacaggcttcgcttctgctacgtatcatatatgttatttgtgcgtatcaatatgttttgaactggcgactgccagagataaagatttgtaatcttatctatccaatcctgtgctgggagtttgctgttaccggacacgtaattctacaaacgaacgaccaccatccctcaacctatattgcaagaatgctcaacacatgtccggtgtgtaccgaagaagtagagaccgctacgttgaagatatatcagtaagtctaataaagatttggcttaaatctagtcgagctgttccctctgatcatttcagttttcgctcaccgttccaccgtagaaaccatgtatcagctcatttcgacgatcctattcaatgcgaccaagcagtatcagaactgaatgatggtcaggaattagaagaggtcctctgtcaggacggcagtatgaagtcctcgtcagggtgagagtctaaatttacaacaatccaggatcgttcaagagttgttctgacccacattgcttaacgatgatatatcttgattctgattgctaatgactatctcatgttcaggcaagctatcatatgtccagtgtgtgcatgttccatagaagatcttcaagtggaagagagatctgcacatgttgcttctcactttggtacgtcctcctatgcgatttgaccgatatgagctcgcatttcgtcaccgtttatactccctcttcccttgcttgtataaagatgaggaagactatgagtctcctcaagaatcaaattctccagctacccacaaacctaattctatgcgaccgacagtcaaacgggataggcgtgatatctcgtggtcttctgttcattctccgttaagctctcttccgcctaattatagtccgaaccttatcccgctcttgtatcaggtcctcagcagttccgaccaaacacgttctgctgttctttgttctccccatggtacaacacatatcagatctcgtcgtggatgggacttcacatggggatgtgggttccgaaactttcagatgtgcttctcagcactcggtcatcctctctgccccggaggtggggttgacgacggagaaggggtatcagtctggactttacagagttggatcgaagacgcttggcgagaaggatttgatgaggtcggtaaatcgcagttcaaaggaaagatgagaggagtcaggaggtggatcggagcagccgacatttgggtgggactcatgtgcgctggaatacagtacgtgcttgattgtcatgttttcaccttagcgtttgtgctgaacagtcattttgtctcgaatttactaattcaatgagaatcataggtgtcatttgtgtacgtttgttgaatcaattcgtcatatgtactaaacactgagttggctcctgcatcatcttagatgactttccgaaagctggctcgacagaagatcagcctcctcatgtcgttcttcaacgatgggttatcaattattttgtaaattcccctgttggtgtgtcgagacaggattaatgagctgaaagttttcgcctccctttgtgctgttgcccatagaattcaggtaactttgctgttgaaaccacgaaaggaggatctgcgtttgacatgatgatgaaatctcgaggccagagtgtcaagatcagtaataaattgccactaatcttacaggtcggttcaacggactgcctatatatcaaatgatttcgtcactgatgtacactgccctttatagcaccaaggccattcccgaactattgttggttacgaaacgctttcttcaggggagactagtacgtacaaacgcttgatgcaatagataaagttttcaagcgctctccttgagaatgtttcccgttatcgccttaccgtgacgacgtcatccgacgacagacctcctcctatttgatccagccaaaacggtgccggatcatctccggaagcttgccatagaagagttgaagaacagtcgggaacaagctccgtcatcgtccggaccttcttcggttgagaagaggacagattgcgacccttcaccggccgacaatacgaatgataggtcaatatccgggtttgagcctcagtcgcccgcacatttggacgacaacggaggttcagaggtcgaaagagtcaaagcaaatacgaaggaggaggattggggtcataggagtagatcaaaattatcttcaactatgttaggggatgaacatatggaaatcggtgtgagcaggaagaagaggcgggccaaagtatcaattgagaacggaagagaaaagagatggcggaaggacgttggggccgcactaagctgttttagagtcaagtgcgttatcgttcaaatgcgatttgtttagtcctgcatgctgctccctgacttggaattattttcacttccgtttttcttctctagtcttaaaacgctcaagtaagatatagattgtccgactatttgatatgagtccacgttcaaaagcttactctatggttgtcgttgctgatgaccaggcgcaactcagaataccaaattttggccttttctggcggtccgatacttcctcagaaggaaagagacaagcacagggtggttgtcagtacaaaagtatccaaatgatatgcctgttatcggaagggtcagacgtcagcatatgcatagcatattgacaacattaggacttcctggaggatcgatattctttcttcaataatgtggagtcgccgaggtcgacaacccaagcatttgcccgagttcaatgtgaagagttctgagaactaggtcattgatatgagagtttgtgatacgttatgattatttaggaggcactggttgataacatcagtattcgtcttctgtcggcgcctggttatgttgagaaaccccgagaaggtagggcccatcatgtggagaaagatgtatgtcagaaagctgttcaagagatccaatagacagtatatacatacaaacacgcctgaaaagacaaggatggttccgtagacaagcgctccgccagtcatactcatccagcaggcggccggagcaatcagcccggtatgggccatgataagaggcagagagaaggccgaaacgacgatcatggaagtgaggaaatggccaaagtccttatatgctctgaacaagatcgaacacatcgccaggaaacgcgatgtcgagattaaaattaagtccagcaggtttgtaaaatagtctgcatctttatgtatgaaagctgaagagcagtcatgaacgaacgagttgtattctgtcgaaaagtcatccgctcctgcacatcgcgtgcagatcgagtttggtactggtgcaagcaagaacgtcaccgcttgatgttcgatgtcgtcgacgaatagcatccatcgtttgtattctataggttaagttgcattctgatagaactggtttcttcaaagtatcaagaaactgaccaacgacaaggggaagccaattggaccaaagggcacacgatagaatgacgaggaggaaccctatagccaggatgaaagccaagaagacgacctggaaagaagaacgtcaaaagtgatttcaagcaagttgttaaacgagttcacgcgcgtagaacggttccaagcgaataccgatggatgagtgacgaacggctatgaacagaatgtgatgatgtatgaaagaatcgccaggtgaatagattagtggaccggcactaaacgtccaatctatcacttgcagaaaccccttcagatgagacgaagactgctacatagcaaaagtgacttacttttgagccctgcggtcatactctgaaagctatctagattgaatctttcaagacgaccagaagagatatatacgatgttggatcgggaggagtagaataagtaagaacggagatctctgagacagacgagcgagcgggagatgaagagcactgcaatacgtaaggctcctatctaagcgacacatattcaacagataagtaaaatattcaaatatgaccggactcggcatgctccgcccgggcaccgacatctaatcaccgatgcccgagcgaaccatgccgagaatatctgatatctggatcaactcccagaaactgttaagagctcttcgtctgctgttgcgcattctctcttccctaaatctttcatatgctccggctcagagttctctcctgggcagatagtgcgataagaccacataccattcgacccatctctaatatgatcacaccttcagtcttggccgttcacaaagcggatggggcttcaactcgcgaagggcaaggtcctatagccgataaaccggctcattggggaaacaaacaagggactttgtttgagtgagtttcaaagacttcaggatctgatcttccaaacccatccatccgaactgatctctattcctcgtgtgtttttagcaatccatgggattcgtggcgagatgcttcagcaggggatattttcggcgtgagtaatttcacgcaaactataaacgaccccttgattcttgtcataagatctcatctcatcgaggtctacctctttgtcttcatcagatgttcgctcactcgttccgggagatgaaatctcctcctagtagcgaggttgtgcgacattttccaattcgtgttcccgactttggtgcctcctttcaagactctcaccctgccgagatcaaggctacatggttggggtaagctaccgagatagatctctacgctctcaatcattctagcgctgatgatttcgggttgtttgtattctctttggaacaacagacatgcttgctttctcatcgagtttccaagggagccagaccaagatcgagggatacgaattctggtagacccagtattctccaacagatgcagcccgttctcgttcatgggtccatctagattcactcgtaggttcacttagtagaccatcgccaggctgctcatatgcgacaaacttatggaatcactaaaccgattggtctcttcagccgcaccctgtcaagcggcagatataccagagattgatgtcttggtgctaagtcataatcattatgatcagttcgttctgcttgttcaactgatgttgcgatcggttactagcttgctaactctccaacccatcattcctctcatcttttttcctagtatggatcttccaacactgaaggcactggcctctaagcccgaatcttctcacgttcgcatcgtcgtacctcttaacaacgctcatcatctggcctcgacaggattcgcaagtaaacaaattactgaactcgattggtgggagtcagccgatgtagatatcggttcaggaaaaggggttattcgaatcggagctaagcctgctcaacacatgactgccagaggaatttctgataggtgtgtttatcgttcaactttggcctctgacagtatatattcttacggcgggcatcatatcgacttcttttggtccgtatagaaaaaaatctctctgggcttcctttctttttgagactcgtccatcgctcgagccgtcttcccctagcggggtcaaggtctatttcaccggagacaccggttactcagccctttccccttcggcagatcctgactcacatctcacaactgatactcccgtctgccctgcgttccgagagatcggcgagaagcatgggcctatcgacttggcgctggtacccgtgggtgcatatcgccctagagcattcatgagtccgttgcattgtgacccatgggatgctgtccgactgtttaaagatatcgtatgtcaacctgcactttctacttttgtacctttgactccacaggtcggtctctgatacagctgttttcgccgtttcaaattggggcgaatagaaagcaaagcgtgcgatcgcgatgcactacggtgtatggcagttaaccaccgaaactatcgatgaaccgttcgttcccttttgtttggtctgttttcctctcttactccagtgacttcatctgatctaccatctgtttttatcacatcatacagagttcgactattggctgaatcgagagatcgacttggtgtgactgaggaagagtttggaacattagagattggtcagacaggtgtctatccggttggaaagtaactgagtgtgtttgttaattctttcttcaataatcaaagatgagcctatgtccttgctccgtgggtacggccagtcaatgatcacatcatcctcaggacgttaatgcaaactttgcctatgggaccctgtgattgaagaattgagtaaactgaagagtttggagcaacgctctatcacagatcatcggggatggtcatgatattggcgaagtatccaatctgagtgatgtttgaaacaacagctttgaaagataaatgtatcagctccaagccagatgtgtgtactcaaatgttgctcttcgtgaagaaaaggagaaagctctagtctttccaaatgatagaccaagtattgattttgaaataaaaataaaaataaaaatgaggtcaacaaatatactaagcagtaacaagatgtcaatcgtcatcggcctcctaacctgtgcattcaaatcgagcgaactttcctctaaggccgcacacgtataatccccatctcccggttgtaaatcagccctgccctctagtttcaattcccacatctacattgtaaactctcaagatgagcgccaaagaattcaaagtcgttctcgctggtcagtttggttcaggacgaaccgcttttgcctctcggtttacctctgctaagagcgacaaaaagaaaatcgccgcgatcaagacagaggtgttccccgtgtcgctttacacatctggtcagttgataggaatttctctccagacgtatgagaaaaacaagctgatctatcgaatctaaattctttcatctcgacatcttcagccggctctgccacgctcaagttgtacgataccctcgtccatgccaagggtggtcttccagagcacaatttcttccaggcagatgcttgtttgctgtttttcgatacaaccaaggaggcaaggttcgttgtgtatcattattcagcttgttcaacttgttcaactgatgagctgaattcatgtcaatcttctcggcatcctttttctacgacgtgttaagctatgaagcgctgactgagtggtacgatgtgagtttacgttcaagtatttgtccatagaaacactggtctggcaccttacgcttacttggtggtaatattccttcggtaggccattgtcaaggctaatggtcgaaaggggtctgaacctttgcctatcatcattgtcggaactaaggtggacgacgtcaaggttggttctacagtcatttaacaacgaactttttcgtcgcatccctgacactcttatatgacatccttagaatcgggccgtgaagccaaaggacattgactttgccaaaaagaaaggattgccgtacatggaaatttcttccaaggtagatatctcttccagcgtatatatggtcgcatcagctactgaattctacccctgttcatcataccacttgcaggccaacttcaacgtgaaggagctcatcttagaaactgtcaaggcactacttgggtacggtcatccctctcattatcgcttgaactggattgtgaattgagctcaccttcaagagaatcgttcctgtttttgtctcacagaactggaactcagctcactgatgagattgcgctagagaaagcaaccaccgaggttgatgaggccactctaagcggattcaagaaggagtatgaagaagcgtcaaattaattcgactggaaatagtcatttttcatcccagtccagaatatttcagtagtcagacatagagtatacagaggcgtagaattatcaagtaagggcgagaggttggcagaaaaaaagagcaaatatatatgcaatatagcgcaaatcaagcaacacctggaaaatttgttgtacatcaaataccccttcgatctcactgaaccacagtttcgttgtattccttcaaaagtgcttgaacatctctgcgaacatctgatgcatgggtatcatcagagtttccttccagagcaactccaacagatgctgatctatgatacccggaagggtctggatgggtcaacctctcgtcaagagaatggacagccggattgaggtaaggtgctccaccttggacaagtgccggtggtgcgctcgttgaatgaagcgatggttgtggagatggcactaaaacagagaagtctggtccagcctggggcatatgaattggctcaattcgatgaggtgaaggtatggtagaaggaggagagtcggagtagttggtatgaacaaacgtcggcggcgaaaaagaggcttgcttgtaagtgtttccaatttcgttgtgtctagcaagaggcattgtgggtaaatgggatccaacaggcgagctgatggatgtcggctgggatgaatggctgacaaaagaagtcggcgaggagtatcttacgggctgaagaagagggctaagagctctatgcgactgcaatgtaggcatgttgtgcgatatcggagacacaggaagagtgtgcgatctagtgttgggggtatggttgatctcaagatgagcggagggctgattcaaagaagggatagacgtaacggaaggagagggagaggggactgaagtgatgatatctaataaacttcgtccagcttggaaagaaggtacaggaataggctgatgaaagtgatataacgtgaacaagttcaatctcaagcccttgaaaggacgaaagagatgcatcgtaaactcacaaagaattgcgattgagtgcctctgatgctatgagcagcttgtaaaacttcaaccgctgagggtctatcagtaggcttggcttgtaacatggagcctgtttgatatatatatacgttcagaattgacgtttctacaagatcaagagtgaaaatacacgaaccaatgagaagatttatctctggaggataaacggggaaggatgggatcacataagacacattgaccacggcctccgaacctcgtgtttcgctatcatcatgtgcgaacaaacattgtgagactgcggctctaacagatagagactggtcgagagctcgttcttacaaaggagtggtaaaataacaaattttatagaggaagacgccgagagcccagatgtctgataatacaggaaacgcaaaatcagccgagatagccagagagatccgtgtcatgaaagactaatacactcaccagctttttcatcgatttcttttgcttgagagaaatccactaactccggagcacgatactgttgagtagtgcttgatccgacatccaattctaatgccttgagctcagtccagcttcctggggcttttcttggtgtcctcacgcttccaaagtcacacaatttgaaactcgatccagattgaagaacattttccaccttaagatccatatgtattagaggtggagataacgagtgcatccgactcagcccttcgcacacgtcgatgaagatttgtaggatctcgaccgtagtgaaccgattttgaagccgggtgttcatcaggctgatgataccaccatctagacaactttccatcaaaatcagaacctcatggttcccatcaggtagatggaaagcgtctgcatcgactaaactgacgatattcggatgatctcgaaggagtttctagaggaaatggatgaaaaaacacaagttgagctgatgggtactgtctacagacagctgtgtgactcaccatgacctcgacttcccgacgaatctcatcaagcatatgcttctcaggtactatgacccttttgagaatgaatgtatcggtcccaccaataggcgttggagttcttacctgataaacatgtgcgaaggcgcctgatatgaagatgatatgagcgagaatatgatcagttctgactggcgctttgtgtgatcgtgcaagacatctgaatcctataaagctgacctgatgaaagatatttttcgatgacgacattatgctgtcctaccagtctctgactcccagggagcagttcttgtgccgaagagcgcggaggttgagcagccgatcgtgctggaacggagattgggactgaggtcgggatcataagaggtagtggagtaacccggctaggatacacttgggttgggtacgagacagggtcctgagggagagctgatgggtcaatctgtagcatgaccgacactaatggctcaacaaagagtagagatgaatgttagatctgaaatagggatcttttccatctcaacgatgaccacgctcaacggatttagacaagtggagaggacccaaaggaatgacgacggggcgagttgagatggatgaatcggataaatcggatgtaaccgatgtaaccgatgtgatcgacgtgatcgacgtacttactggcttttcttattctatttgatttctgttgtccgggagagattcaccaactctggagcacgattttattgaatagtacttgcctgctcatgtctttgcgtctttgtctgtgaactgtagagcctttatcaggtcgtttagaataaaccacagccagtcgatccgattaggaggatcttctgcaaatgaggaagcatcgatctcaacagctcataagacacaaagaggtcgaggtgatgagaaaacgtttccacatcagaacgctcatcagtaatgctgaggtatgacatggttgcctcggctactccagctgctgaaattgataggcttttggtgattcgtggtctaagagctctcaatttcacaaaggccacgtatcgacaaccatcggttaaggtcactctcaccaagcctaattcttggtaagcagaacggacagtcgttgacctctacttagggaaggaagaagcgatcgaaagacttgggtgcaacaacgaatgaccaacacttgaggacgatattgacatgttgagagaacataaagcagaacaaggatgtgaagatggaatgacatggaaaggcgcgtaatctgagcatccaccttcatgctcatatgacgtacgtttgacattaacctgcgacatgtgtcagttggtcctacagctatagtgaaagggttatcatacgagtttcccaataccagtctactcgtggtccgggttcgagtcccggtggctgtatgtctcttagcttcatgtttctttttgtactttgttgtctcttcggtctgatgacaattgtctaagcaaaaaaatcgcattggttattgatcacacactgatttcggcatcctgcatcctcgcctcggcatccagctcttcctgctcagcctggcctcgaagctccagatgagctattaccacgccgttcctcacgccatcctccctctttagcttcatccatcgaccgagacgcggctcttgtcccacgcatgccaccaataagatcgaggactccggttgagcacccttcgaaacagtagccgtcgtttttgtcgtttcgtgttcttccgaaggcgagagtgaagatacagatgaagacgcagatttattctgagatcgccagttggtgaagtcgagaatcgatgaggatggcgtgatcaactggagtgagttgacaaagcccttagcggggatggtgaataacagtgagaaagacttgagatttgaggcgagggaccagatacggacggagccgtcccaagaacctacacgagcgaaagatcaagcattagaggagaggaaatggatgatgagaaaacagtaacttgagagagaaaaggcatgatgcttgacccaccagatgcaaaggtgtctccgtagggcagacaagcaagcgaggtgatccatcgggcttgtccaatgattccttccgactctgagacatgctcatttactccgtgcgcaagatgttggatgaagactggcttctttttagtgatagtccaaagggcaatagcactaagaaatccgttgccaaaacaagaagaaacgaggcgagataagtcagtgttgaagttgcatggttagacacgcacgaacaagagaatgaaaaaagactcacccgctgtctcctccactgaggaaattttgctcgtcgatcattgcgacgcaatcgatccgtccttctctgtatgcgtcctttcctttggcccctctcctcttcctcctttccagcttggctcgtttttcaccttctcttccgtggagaactttgaagcgctccagctcttcttcgatatcgtcatcctcctcccagactcccttactgcctcctcctcctcggaacacaagctgagactcttctgggatcttccaaaatcggaccgttcgatctctggacccagccgatataacggattccgctcggagggttgagagcgcggtggggacatcttgatgtccaaacagagtttccaggtgagacaacgtcgagagagaaaagatagaaattgttcgatcaagggaagtcgtgtagagagtgagtgttggcgaacggaacgccagggactggaagagacgatgtattttcagtgacaacattctggaaaccggacgagagaaagaatacaaacgtacagtgactgagtctcgatgaccctttagaccacggacccatctgccagtctcaccatccacatcccaacaacctacaactccgtccttcccggccgaagccatccattttccgtcatcgctgatcgccagatcgagcacttcgtccgagtgaccttctggtgcacctggcgcaccagatgaggaagctttgccttttcctttagcatcctttccttttgccgcacgttttgctcttgggaagtgagccaagagtttaccggtttgaagggagaatttggtgattgctccggccttggtggaggtgtaaatgtaaggagtcgagggagacactcgggctgccgttggtgggtgattagggagaggaagaaagaactgccgaggcctctttgaaagcgattgagagataaagacgtgaatcttgggtgagtgagcgaggacgtcggcctgcagtctagccgccatgatttctctatcgatctcggcggcatcgaatgtcccgtcatctgtggatatcaagattgtagaggatatacccgatttgaaaagtcaatatcagtcataggttacgcggagcgatacagcagcagacagtgacgaggagccagaatacaggtaaggagacggatagaaacaagacaatatctgaccttgctcctcttcgacattcttcaggtattctcgtgctagtctgagcctcttttcgtttccggtctctctttttgctcgctcagcctcttcctcgtcactcgagccaccacgagtgtctctcctaaagtccatgtcgtcgacaccgacgtccgacccatcgtcctccgagagttcctcatcccgcttgctcttcttggtcaaagccggtgtcggacgggtcttgccattagtggcagagctggagctgttgttgggctttcccggccgttttctcttggaggaagacggtttagagaagaaggcgtcaggcatgagagtatcgatcaggtctagtttgtcttgaggaagaaagggaaaaaagggaagaaggaaacgagagaaaaagaacaactaggacgaaaagaaggaggacgaagcaaaggaaaagggctgaggcagggtttgagtgagaatctcaaaaaattcgaacacggagggcagaggcaagaggatgagcagaggatgtaactaaaaagactcgtgatcacgtgatttttgtaaccacgcaccttacgagagaacaagcgaggtaatccagcgaacaatatatattcagagcagcgcgctgaccggaaagagatcttcctgatttccaacaccaggagaagcggcagcaacgctctaggaataacagagtgaataaaagaggagctgggaagaaaagatcgaatcccagagcaagcaacgccggaaagaaagaatgctcgggaagattctctgtatagattctactgtataagcccggaggattttctcttgctagggttaaattcaggcacgcggtttctcccactccccttcaggattccacccacgccctggcgttcatactgtcctttcggcttttctatcctttccagtttgttacttctcccatctcatctctcttgatgagtcctccgacagtcaaacaagtcatctacctcaaaacaaagtggcttatcgaagactacagctcatatctgatcaacgtatgtcctaagtgttcttcattcgaaccatccattttcacccttctttgtccctcctatgattgggggcagcttcgagtcttatctcatcatcgattgtttcaccccatttgtttccatctttcttgacatccagacttaccgatccattcttcgcacttgggacactgctcctctcgacgccctgggtcatctcgctaaagctcttcttccggttgctctggtctttgtcggttacgccgttttcaacaacaattcttcttccacgactacttccgctacccctgcccaacctcgtcttgctccccgaccaggctcacaagctagcatcctccagggtaaaactattcaagccgaacgagagcgagccgccgccgaaggaaaaaaggaaacaccttctatcgctgtaagtgtcttgatacctgcctggtccgatgagtttctatcgtacagcccctcagtttgcagactggctctgaagacttagctcacccccgttgttgtcgtccaaccacagaagactacaagtatgatgtccgcgcctgctgtcagcttaaatgccccactgtctactcctatttctcctgccgagcttgcgaaacacgatggaaactcccctgacggcaaaatctacgtcgccatcaagggctccgtgtttgacgtgagcgcaaagagagagatgtatggtcctggagcgagctacaacgtgtttgccgggaaggatggcagtaaaggattgggcatgagtagtttgaagcccgaggtgcgttctttgctctcttacccatatgcttgactttggtcttggaagtccggccgtgattgtcccttgtgtatcatgttgctcacctgtgtatacatcatcctcacacaggacgctgtctcggactactccggtctcggggataaggagatggcgactctagatcaatggtacagcttttttgagaagcggtacaacatcgttggcaaggtggccgaatagagcactcgtccatcactcaaaatcttagtagtgtattgccctcgtttcctccttaatctctctcttctccttctcaagtaggtccttgtcttctgtgtctgcagacagatctgattcttctcatccatactttgcttcgagaatttgctctgctatgtatcctttttcagctcagcatgcgttgctcgtttttgtcgattggactgagtgatatgattgaatgagaatagatggtgtactcaggtctctcgacaaaccgcattttcgctcgttcacgatgtcctctggcctttttgacgtctttctccattcatcagcccctgtctttcctcggccatctcctattgcaacagtttattttcctatcgattctttgcaacaccgttttgcttgagaaagacaaactaccttcttaacgtatcaaagcacatctcatcttacaaaacaactcagaacccgtctaagaaaaagtcattccaagcatcccaagaaaaaagaaaacccatcgtattagttttcggaaatttggttgaaaagcctggaccgttgagacactcgactgcttattccttctttgccctcgaatgtatatatcaaagttagtaaaacgcacctagtgagcggaaggcgactctgggatatcctgcttcaactcctcaaagaattcgtcaaggctctgggtctcagcggagccagcactgtcggtggacttgggcttggcggccaaatcgacggtggtggcatcataggtctcgagatcggcagccaaatcggtagtcaacgaagcgggggcagatggggcggcgggaggagtgaaagacttgacggcttggagctgggcagccttgtcctacagatcaatcagacatataacgaaaccaatcttaacctcagtaagacgttccaaatgaagagaaagaaaagttcaaggacaagcttgacagagtatgtcattcagaaagactcacaacctcaggggtcttgtaggccttaagctctttgatgtagagatcctggatgaggtctatcaggagtgagattgatcgacaaggagtatgggttgttggcgagacggatgaagaaaggttgaaaccgtgaaggaaagatgagtcgattgtcgcatatacgaatcgtcaagtgaaaagtcgtagttcaaggaaagtcaagatgaagatccagtcggatgggtttgagagaagagagatcaaagaatgacccaaacatggggatttatcgaaacacacagtcagatctgatctaatctctgcggtccaaactgataggagaaacgaagaagaggagcataccctttcggacaacagaggaagagatggacctccgggcgaaagcaggagcggaggcagcgactcgtcgaaccttttttcattgatgaaaaaacaaaaaaaagtggcatatatcagaacaagagaggccaatgagtgacatcctcgcaacaagacacaaaagcatatcactcacggcaaacatgtttatgggaagagaaagaaaaggtaagaaaatgaggtgagggtccgaaaagagaagctagtcgggagaaaacaggcgaaaacgaggatgggcaaatcaacgggggccattcattcggatcctttttgtactataaattttgcctccgactgtaatcatcgaactacacaagtttctaattcatgtccttttcccttctttcctcgctgtctcactctctgttggccccgccttgttccgttgaagtagccagtgctcacatctcaacattgttttaatcttctcttccatcacacctctccctctccctctcatcagctttatcgttctatatcatgcgaccaactctatacaaccttgtcaagacaaccactaagatcactgggcttgtggttcatcccaatcctctaccagctcttgcgcatacctaccaagccaccttgaaggttctcagccaccttcctccctcattcgcctatcgacaaggaactgaggctttgacgaacagccgtttaaatgtagtcaaccaggcgatcaaccagtacaaagttgaggagggaaaaaccatgaagactgatggttctggcgatcgagcagttgaatcggtcgagaaagccctcgctctcggagagatcgaggaggtcttggagatcgcaaagagcgaggaacaactggcagcgaagatgcttgaatggaaagcgtcagtttatctcttttattgttcttccgtcctgaaacctgcagtcacactgtttaaaggtttcgtgacgttgtgatccgatgacatatcgatcaccaagccatcgctggaatggctgggatcttattctcctctctctttttcgatgttcaaccctaccatatacaaatatctgacctggtgttttcttatatctatatcaacttgatcggaaaaacctttgacgctcctatgcgttcgtctactcaccgtgttgctttcaacatcgtccctatatacaccacccatcctggactctctgttgcctgctcgatcaccgaacatatgcatctgcataaccactcacaactttggacccttaatctagctgggagcccttacggacgcctactcctcccggccaatggacagggttcaagcaggacgactaaacggtctgatcagaggtcaagggaagggtttcgtgttgtatctacgttgtatggaagggaagaaacgagaatgtaacagttgtattctgtcagatatcctatgctccttattatcgtgtcgatcgagtcgggtttttttaaatctcgagcggggctcagtgtgatggagagggttttatgggcaacctttggcttctctaatgtttaatacctaacaaacctgaaccggtcaagcagtacccgttataaacccatgggaatctctcggcctgattgaatacggggatagactttgaagcctgtcggccattcagaatgaagttcaatcatcgacgtgaaacatggttacgcctcgttggttacggcaccatccccatcgctcacgtcccagtcccgttcctaatagattcgggcccaccagtcagcgctatctcgccttcttcaccattcgtacatcggatagcaccagggatactcaccctctcctcttgcctcttccacatatacttctttcacatcctgtgagcgaacgctacattcttttgggtttcgacacctagcctgaacgggttcatatcacaccgttcgtcctcttttgaaagtgagcacctcagggtctttctcctctgacaccttgttcatacacccccactttgcatattcatagtatcgctccacattggaggcatccctatcagcttgtcttgagccttctggtttatttctttctgagtccagaactacaaatactccacacgttggctttgtgactatcgcttcctcaacgcgtccgtcttatcgttcttagaaatcatgtctaccaactccgcccccctaccaattgctcggccggccgcctcgaccgtgccgtcttccaatcaaaaccaaggccatcaccatcagcatgtcccttctcaaatatccttttcaccttcatcctttcccctccgaaacgggatgctttctccttcaagaaacttgacatccaaccccattcccttacctgttccttctggcgggttcaaccgtgggggaacttttcctagtgggtcttacaacaactcaggctcccttgccagaagttttcgaatgggaagcatgatgaacagctttgaggatcgaatgcaacgtatgggaagttggaagggcaaattcgtcggaagcggagatatcggagggccatggctagctggcggaatagagtaagtctttggggttccacccttatgtggctgagcacatcgtcatctaattcgcttttggagaacatgtctctatgtactctcgattcttcttctaatggctcatcatctgaaattattcatcctatctagcgcccatgatttttcaacccatttctctacgtctatggagtcggtcggaggatcctccatgaagatggccaggagagaggctgactatgtaagccactcttcactcatacaattagtttggtatgggtttcttacagtcaactctattctttttaatcccgagcaaagtgccaaaactacaattgctgtggactagaattatcttctatgcatgatctcctcgaacacgtacgtaaaaagtcccaatgtgtctcttgcattcgacattgtgatgagttatctgtggtgactaataccaccgtcacattctcgtaacagtatgaggacgttcacgtcatcatcctatcaccctctacaaatgcttctcagctcccgtctcacgatattgaatcaatggatctagaggcagatggtccatcgtcatcatctcaatcatccggatcctctgcttccacagcctctgcgattccgtcgtctgtactacctcaacagctcaaacctcaatccagtccactcaatcgtgcacaccccatacccttgggcttctcatctcccaggacatcttcaaacctaaactcgccgtccaacatccttcatcgaacttctcagccgtccaacccggctcctcttcaactgtcagatgttttggcccctccatcaaattcggcgttcgaaacatcggtactgacgtcttttcctccaagcggttcagacaagaagaccaagcaagcccttgcgggccgagccgcctttgttcattccggtagtggtgttcaaatcaaggacgagggatggaatgcgttggcggacggagctaagacgcctacgaccgtgtgggagggtgagtatcgatatccctctcctgggcaaggttctaacttgagctcagcgggtggagttggtggatcaacttctggcttgaatggtccctttggttcgacaagtactatcaacaataatccatcggccatgcctcctacattgctattctcatctcaaccacaaccaaagaactctacggcgccactctctccatcttctgcagcagctcaggctcaagcagctgcagcgatagcagcctcgatgaatattaacgacgatggggaaatgcattcgttgacgatcacccctggcctagctcatcctaatggaattccaccaccggcttcggcgaaccaaaagcttcatcactgtccgacacctggctgcaacaaatcatacagttcgtgatcctaatcttcttttcttcaccttctttctgtgctccgtccaaaaaattgctttgccctgactgaggtcaagcagctgaatgccttccttcgttcacgtccaacaagatgagattactgatgcaatacttgcctactatgtacacgctcacagaacaacaaaacggtttgaagtatcacctcaaagttggacagtgtgatttcaatgttcgagatggagtggagaacggattatcggaggagcaagccgaagagaaaagcaggccctatcaatgtcaagttggtggtggctgcacaaagcgttatcgacagatgaacggcttaagatatcattatttaaattcagctgtgagtgtatggctttcgccggtctttcttcaaatcaggcatgttttttcttgtttcaagatcccaggcttatgttatctatcaatcaggcacacggagccattggattagctctcattcaacaaggtaagcatccgaatcccaaaggaggagaacttccctcttcaatgggagtaggtcctgtctcaggctttaaactcggatcgacatcttctctgtctgctattggaggtaccgctgtgggcggaggaaccaatggtgtcgtgggtggtcttccacgacctgggaactggccactacatcaacttgctccccagttacaacagcagctggctcagcaaagtcaagtcagcgctcaatttgcatcgagtaaatccgacctgagagacgagatgttgttcacggtgaaggaggatgaggacatggacatggacatggattaaagttttgaatatatttatagccttaggcttggtgggagcaatctcaaccgattttggtcgatacatgacctttttggacttgggtgcccacagaccacagatcaccaagatcccataggccatgggtctaattgatccctgtcaatggagtagcgtcagcagcggcggtgtcaaacactagctttgcgctttctggttctcttcttggtgaagggctcagtgcggcatttagcaggacgcattgtcaccccctgttccgccaagtctgagagcaagcagagcgagcagagaaacaatggctactcgacacaccatcctgtggtaaacatgaaaaaataaggaggccatcacacaaagagacagatagagagagatgaagcgacagaaagacaaagctgagatcgttcattcggttgatcgagccgcgcacagctgatctcggcggtgttcatccatagagccggtcactctgctcttcccgctcacacggcgagcacggccgggactcttagcggagagaacacggtctggctttgttgctatatctgcatgtctctcaagggcgtcatctatatcttgccgctatgcgtgtacagcgtcggctttttctacatcattgtgtttaatgaaacatgactcgtcacccgattgtctcatttctcgttatactctcttgtttctacacgtatgaaaacaattttttggccctaggtgtaaattgatatgaactagaggcaaacaaagctttcccaataatgagagccgagagttgacaatagatgttgcaacaaaactagactcaatcagcgacggagatcgaagagctttacgtaagccttgaggtttccttactgcacagggaggaacgactgatacttcaattcgacaggtttttgcatgaccaagatacgtccgcttcctccgaagctgatgtctgtaagctatactcaactttcccttagttttgtcccaagacgcattatctcctaacttccttccaccactgtatcaagtcagacaccttcaagcagaccagtgcgctgaatataatgcagcgttattctggtcatcatactggcctactcacgttggacggaggtacgttcaatattcaagtttgcgcagatagtcaaggtgtcatcgatgctggctacagtgcgttaggttgatcgtttcacttttttctgctgctgtctgtttcttcgaatatatcgtttagagagaggtcgttgagagactgagagtgtagctttgtttgctctgtcatcagctgcctggcaacaaggagatattgcattcaggaacattctccgaatgatcaggaaggagatctcggaaatggtttcttcagactcgaaccaacccggtgactagcttgaagcttgtgcgtccctgtcctcccctctgccga

SEQ ID NO: 642 - DNA, 1906 bp, Xanthophyllomyces dendrorhous
atatgcgatctcatccacacaaggtcaactgaaatatggaagcaagtgcatcgagtccaacggacccctccacagaacgaccagtgtttccttcccacctccgaaaacgatgtcatgcatctccaacaccactctggcccatcgttgcgcatccttcttcctatccattctgccgagtatcgacacgatcgacaaccctatactcaaacattccatctcgtatgcgaacggactagacgtcagtgtacctcttccatcagactctatccctttgaacccacaacactcaagcgcacgtttcttccagtacaccgcttgctccatcaaccacaacgtttcctcagggtgcttcatgccgcccgtcgcttcgctcatgtgaaggcccgacaggcaattataaagacagcagagctcagacatgaaacccggtgaacggttggagttgtatgtcgattcgatagaacgagtcattttcatgactccctcgagagttcttctcggtggtttatacatctttccattgactatcggtgcaactccggatatgtattcatcatactccaaagcccattcgaggtcatcaaaccatatctcacgtccatccagagggtcaagccgttcttctttgcacaggttacattcgcatcggtcaattccgtactcgccgatcagtgctgttcgccaggctaacgggctgcaagagaagtagttgatcgtcagctcttcgccaggcgagatagtccggcgggaacgaaggaccatgatgtcgtcccagaatacccagctgacgttggcgaagcaggcatggttgaacaacgaggggacaaggtagatgcctacgtagatgacgaatcgataccatttgatgaaacaggatacatcaaaacacaaaaagcaatacaaagaatcgtcaagagagaaaaaaggcaaaaaaacgtagtagacagagagaaaagagattatcttagaggcaaaagtacgagacgtacctgaacacggctcatttctatgtggaccatgcatagtgggcccggtctcggcgatgatgactgacccggtcgcaaaagagctgtaggtcctgactccctccagtctcgacacgtccacatccaccgactttacctcctcctcctcatcctcggtatcgcccggtgcgccaggcggttcgaaggcgcttagatcgaccaactctggatccgaggatcccggtccagcatacagcctcttcaacacgtccaaggccctcggttcgtcttgaatcttgtccaccatcgctcgtactagatatgcatgcgcagaccctgaagcgtattgttgaattggcacgttcaccagctccgtcagcggcccttcctttggctccttcatgtcaaccgatacaaacggcttgcacaccacaagtagctcgcctcgctcgatcgttcggtcagcgatgacgccccggatcccacctaacgtagggctgcggcctatcttgaaggaaggcgacacccagtcagcaactacattcctcgtcccccccggctggagatcaccccgaaagatcgacggccagtcgtacacacccgtccgagcctcgtccactctggcttgtgtgaacgccagcaagtccagcgcaggagcataatcaggaaaccgctcaacaaacacagtgcagtgctcatatgcgaccgaccagtcgcgcagaccgatcgaagctagcacaagccagtggtatgccttctgcagcagatccgactgggccaagtccgcccgtccaggttcctccgcgcgtacagcgtcaagaaggccacgcagtgcatgctcgccatcgacaaacgcgcctctgaaccgcgagagtcggatccggcagtgcgctcggtcaagtctgagcacaatatgcttgctgtcaacggtcagaccctcg

SEQ ID NO: 643 - DNA, 490 bp, Xanthophyllomyces dendrorhous
tatacgctcgctcggccgccatgagccatcctttgtccagccgttcgtctccgatcgactttgcatgttcagcagtcagtctccgagcatttgtttcggtcgccagacagacaggtggactcatccatgtgagctcgctgacaagtcggtcgtctgcacccagccagataacatccgagggtgactcaaccctgatcctggataccttcgttatcttggtgcgtttccaatgagcaatatcgatcatgtcttcgtccagacatcgaacatagtgaggctcccggatggctagcaggccgcccataggatagagcgcgtccagttccggtccggtctggacaagcatgtcgacagccgtttgtagctcgacgagctcggcccggcctgacgggtcctggccgatgaaacggatggaagtgatcctagtgggacgagagacgatccgaatgagcagatattgaccctgagagtggtgaagtggagccaaaaa

SEQ ID NO: 644 - DNA, 339 bp, Xanthophyllomyces dendrorhous
ctgattcaccgcaagtcgcatagagatataggaaaatggtaaggataagacgaagataagagagataagacgggaagaagctcacatgatggatcttgtgccacatcatatcacctagctcgacccgttctagctcttgcaacggacgagttgagaagtgcttgccgtcgtaagcaggaagtctccgcgtcaagggtcgttcatcttcatccaatccctgcgcacgtcgaacctcctgccgatgcagatcatcttccgttcgaagtaaagttttcaggtcctggactatggtcgattgagagcatagagaagaggacaagatgagtcagagtactttta

SEQ ID NO: 645 - DNA, 536 bp, Xanthophyllomyces dendrorhous
gcacaaaacaatcgaagcccatcatatacaacacgaaaaaaacataatagaaacatacagacagttgatgataacaagatgtcagtcgtgtagcgttctgtccgctgtcgttagtcgaccacatcgttcttatacagttcagcagctattccaatgtgcattcatcaaactgtaaagaagtttactaagatgaaagggtgaaacatagtcttttcgttctggcacttgtttctgttgaagtcctcactggttcctcacacccgtaacacaccacccaggtgttctagtaaagtgagatcgagaaaccaggaaaacaaaagggaaccagctggagagtgcatagctctaggccgagggtcttgggactctgcgcagaaggaagtcggaaggtgatgcgtcaagaagaaataacgaactacagctgaaatagtgtcaagacttctgaaatttcgacaatctatgcgtgcatctcgactgtctaggttgatattgaccgctctcaaaacatcaagatcgtatagtatagtggttagtac

SEQ ID NO: 646 - DNA, 1650 bp, Xanthophyllomyces dendrorhous
gtcattctttttgccccgtctttgcccatgtgtgtgtaggtacagaatgtaacaaaaagctcactataccggaacgggcatctgtaaaagggcggaagagccgggcgaccgttttgttgcgacttgactaggtggagagttctatcatcacaagttgtctcaaaactcaggctcatggatcctcacaggcgcggcagagatagagacattgcaagaatcaccgatcaaacaacctcgaatgaggatgacaggactcggacttgagagagaagagaaagagaacaatatagaaaaggaaagcgaccaagtgctttgggactcctcgtcgcctgggcatgaatgcaagcaggaaagggcgcgagaccgaaaggtatgaagcagtgtagatacacattggtatcgaccgcgcaagaggtaagagacacatgttgtcgagatgatgtgcagatgaacacaagacctacaactcggtcagatctttgatacgaagcgtacaaagtatgagaagcaaaggaatgtgtgagagagaggcaaactgggcatccgggtcgcatgtggtacagttagcttgtgctccatacagggctcaaaaaggaaaagaataagaatggaaactagaatggtaactagaataaggatgagaatgagaataaggatgagaatgagaataaggatgagaatgagaatggcatcaagaagaaagagagatcaaccaaagtgaagagagaagctacgggagagaagagagtataagaaacgaaaagacggacagagcgagagaaagaaaacatgagaagatgaagagcctcaggacgacggaacaaagtcgatgtggcaattcgtttcgtttgcctttccttcgccgtgtttttctataaagtcgccacatcatatcagactgctcttcttccatcactcactgtctctactctatttagagcttctgttctgatctaccgacctcattccaccgcttgagtgagtcttctcccactggatccagtgcgcgctcataaggctccttcgctgaacgagagctgtcttggctattctgtggcaaagtctccgtccagctgtcgagtatcatgccaaaggtcgagtatcccaacaggaaatataaaccagactacgacgatgagatatacatcaggccaggaaggaaaatcgtatgtgacgataactgcgaatgcagtctgatgcacgcaagcgcgctcgatggggggtggggcgtcaccctgaacgaactcgttgcattgtcaagtggaagggctgagctgagagagctacagccgcgtgggttctggaatgtggtggccgcccacggcgtcaacactgacgacctggtctacagtgtcaccgacatgaagctgtatgtgggagcacacgtgatggaaactcaatggaagcttttcagtgccatgtccgacatgggcaacaatgcagaacatcacccactgatggactacattgttgtacggagctctacagcgtcctctggcataccggttacgagaatgcacgatgatgcttcaatcgtggtaagcaacatactggcagagggctattccaaggtgctgcaactggacgagacaactgaagacctcatagtggacgaggcagccgagggagacacagtgccacaagtgtaag

SEQ ID NO: 647 - DNA, 465 bp, Xanthophyllomyces dendrorhous
  misc_feature (267)..(276): n is a, c, g, or t
gcgggagctaagccgaagacaggccgaagaaaagtcgaaaaaagggaaagatgtggaaagatacaaaaaacggtatgggtcgatgaagcaaggtcgcccggtcaggatggtgaaagaagtagagcgatccgggctggattgatggagatatgggcgaaaaagggaaaaaatccaagaagacgaaaggacgagaagtgggcgggcggggagcgcatgattacgtaaggtcgcgtcgtgggaggtgatgaaaaaagaaaagaaaaaaannnnnnnnnnaagggaaagatgtggaaagatacaaaaaacggtatgggtcgatgaagcaaggtcgcccggtcaggatggtgaaagaagtagagcgatccgggctggattgatggagatatgggcgaaaaagggaaaaaatccaagaagacgaaaggacgagaagtgggcgggcggggagcgcatgattacgtaaggtcg

SEQ ID NO: 648 - DNA, 841 bp, Xanthophyllomyces dendrorhous
aaacaggcggtcagaaggaattgatgagaacgatatgggagaaacagaaggacacaaagaaggaaccacacctacggaggatgaacagtcggaagcgaccgatgaaagtacgcaggatgcagataatctgaaaagattcacggtttgttctgcgagatagaacaaatttattctaactcagcacacaaacagtctttgtgaatactgaggaagggaaaaagaaaaagaaaaagaaaggaaacgaaagtgtcgatcgcagatatatgtgagagaacacaatgtgctgggatgagaagatagataagaagaaagaggctaaaaagacagcaagagaaacagccacgatggaacaagatatctgccaagatggcgatcgagacatcattagttgaagatgaaacagaaggattgtaagaaataagtccgacatactgaattcgaaagcataatcccaacactcccactcatcgttgctctttagacaaagacgtgaaacgaggatgttgaaaagaaaggggaaagaagaacttgaaggagaataaaatgagatgtggaagacaagtggaagatacacatagaagaagaagaatctgacaaaataagataagtcgaagcgaagttgaataaaacaagtcgaatcgatacgatttgaaacgaaattaatcgaagcgagatgaaaaaaccgagcagatcagttgatcgaagaggaaagaggaagaacaaaaatgaagggtagaaaggccgaaaggttggaaagacaaaaacagtcgcgactcaaccaccatcttctacttcttgcttcacctctggggtcagctcacgagctcccactcgaccacca

SEQ ID NO: 649 - DNA, 372 bp, Xanthophyllomyces dendrorhous
agaccgcctttgtctctcagatactcgaatgtctctttcggaagcggcttggtgagtaagtctgccggcaggtcctttgtcttgacccatccgaggtcaaggatgccttgtctgtacatatccctcgcgtacttgtacgggacatcgatgtgtttcgtcttgttgtgtagctgaccgcttctgacactcgctatggctccttggttgtcagtcttggcgacgatggtcggaacagaataaccgagctggtcgagaagcgaccggacccagacgacctgcgaggctccgttcgagagagctacgtattccgactcccaggacgacttggtgatcgatggtatgcgcttgcttttccagtagaccagagctcca

SEQ ID NO: 650 - DNA, 346 bp, Xanthophyllomyces dendrorhous
cgtccacaactggagatcaggttgcatcgggatccgacggggaacgatgtgagaagcgtcaaaccggtcgagtacttcctcgatatacgccttctgagagacgctgatcgttttaccttttcgatctctcgcaaactccatccccagtagcgaccgtgggtcaagatcgccccggtcgtcgatctcagactcggttccgatctcggagaacacctcgtcgactgccttttctgatccagcgacgacaaagccgtcgacgtacaacatcaagtacactttccggtcgtctcgctcaccggtaaacaaacaactgtcagcttcggttgctgtgagtccgatcgtgttg

SEQ ID NO: 651 - DNA, 3385 bp, Xanthophyllomyces dendrorhous
gctttcttcccgaacttgtcatccgctatgcgcatgaatcatcagaggaaccattttgcatcgacttccccacttcttgagttgcttctgcgtcatgaaaattttagttgagttgttccgtctacgtcatcatttttgctgatatcttttgtggtcatgactttggctctttgcatccaactttctttttacattttgttatattctgttctccagcattaaacaacaattgtccttcatgaccacttgctttaccctgtgtcgtttgttccacatatattttcacgcaggcctatgtgtacattccaccccatatcctttcttttcttctggtttttgtaggttttatgtttggagtcacttcatcaaatgtacaatgtattatttcgcctagttttatgacattacatgactgatcagatgaaattgtttgttttcgctttttcattgtctttttgtatcgatccagtttctttctgacctttctttctgttttaacagtcgcatctgccctgtgttactagtgatacatgtaccctctacatttttttcgttcgacttcctactcacccacctcttctaattcattcatctattttacaaggctgtttctgtgatgatgttcatatacattgttctctgtgttctttcttcaccatctactatgcgactatagcttacttatgctctgcaaccagagtcgatttgtatgtcatgtcgggtataccacccaagattcgttgacttgagaacaattctaattgtgtcttcacatatcattgagtcgtagttatgaggttacatcattgaacgtgaatgatgaatgatagtacatagtgataaaaattacattacggctcttgacggtgatgacggtgtttttcaaatctcgttgaaacatctctctggaaaatcgagtttagtactggttcgaggtgtatatttagaaagtgggatctgctcgtgagacggcatgtgcgattacggatgcagttctacaggatgtatagacaatctcatcactttttcagcttaagctacgaggataagatcatcctgagatcgttgattaacacatttcaaggaaaagcagctaaaagcattttaacgcttcactttcgtccatagtcagcttggactttgatacacacatgttgatactttattcaaaattcaagttctctgatgaatccgaatcttgcctcgtgtagaaatgcgtattgcactctccgaacaatcattctgaagctgatacaaacggtatcagagtgttcataaaaagttcagttcctgcgtccagatttgtggataatcgctataaattgacatacattgcgtcacatacactgacggtctcatttcgctctgatgcatgacctatcatatcttacaaaatacaaagaaagactctgataacaaactgctcgaatgtcactcgttataaggtcacgtagaatcatttagttatatccacagatgacatgtattgacaacatttcgaaaccaattccgaatcatgaccgattcatgaagtatctgattatgttattatacagaccgcatgatcaagtgacaattaaagtacagcagtctgataattgattatagtgccgtaatgaaaccatgcaagaaactaaagccatgggcgtcacacgtgatgaaacgaactgtttaatgttttgtcaaattatgataagtcagaattcattttttgatgttttacactcttgatagcaatggttcaacaaatgacatgaggtcaatgacggttagtagtataatcatatctgtcacacgtatgttgctttactagtgtttgagatgtaaagaggcaaagaagactgttgagtactattcgcatgcaatcatgtgattcattcaactgttctaatctgacaagcagtgagtccagtacggtctgcctattccgggagtagcatcaactgatatgagctcatgtaaagggttaatctatggcaaaacccgatctgtttctcacttccctggcagacgttttgatttagaatgaattgctaaagccatatcttgtggaaaagtaaatcagactcactgcgactgaaaaattaccaattgtgaagatgtcgaagatcttgaaaaggtcataacgaaacgagaaaatatgtatattgtgggcctacagaaactataatatatgatgactgtatggaaattttttctatcgtctttccaatgattgaaacctaccagaatatcatggaataacacgttgtagttgacattgatactgattaacatgaaattaccaaaccgacttgagtcttgagtcaactcaagaggtaaacatattcacatgtttgaccacttgttctgaatcagaacaccgggtttttggatcatatctttttgtccatatctgagaatcgagatcatgaactgaagattctcaatcaatgactttttgttatcgtgtgaaagtgtaattgtaatggttttttttctttttcgatttgataccacctgagattgaaaaggtttatagagcaacacaagaaacaaaataagcactttctgaacgtatccataattagctgtctatgtttgagaagcttaactaaatcgacagtaatggcgacaaccagaaaatcaactttttgattcagagttcaaatgtacttcatgtcattatgtctgacagtaacgttgttgacgtggatgtctatgatgaaaagaagggtcgtcagtatgtcggacattcaaaagagtcatacggttttgatagttatgttaatgaaactcacatcgacgatccaggcggcagtttcactcgcgatattttttctacatatctgaaatattgtatgagagtcgaggtcacatcatgcaacgataatgaacaaaattcataaaaaacgaacaatctaccagcgggaggttgtacttgtctgttgagattctgataacttgtcaaatattctagacacaatgaaatcaaacaccttttctcgaatcaaatggtagtctctgatgttttgcatatagcttggaagtaatgtcaagtattgcttctattcttatctggaaaaaagctcaacttacgataaatcgcaatgtttagatcattttctcgtccatgccttctgatccatgaaaacagaattttgaggatgaagtaaaggtcctgataagtaatttttttcaaatcctgtagttctttaaatgatctggatatgtccggatggcgtacaaagtttgtccttgattgaaattgcgttccatactcctgttctcatcgctgaacaagatgtgtcattgaatgatatgataccttgaatatcttgtctgacatctattcatgaaaataaaattaaaaacgatttctatttagagaaagaagacattgaac

SEQ ID NO: 652 - DNA, 3668 bp, Xanthophyllomyces dendrorhous
aaagaagacattgaacccaatatctggaagttgaagcaaaatagtcgtaaaatcattgatatatgtcctgtgagcgagaaaaaaccatatttgttcagttacaatacagataaaatactccttgagagttatatgatctgcttgagctgtggtcaactcaaaaataactatctcaagaaagcaatcatacggacacattgagattcaatgtcaagaatttttatgtgtcggaatccagtcgatcaattactgagatgtgatatgtttgacaaaaaatgtatgcttgtatcatatttgaggtgattttggttttttttaaacgccgtacattactaatcaaaaactgattcaaatgaatagttagtcagtttaacttgggcatgattgtttttttcgatgaattagtactacaaatcagaagactaattgatgcaaagtaagtttcagttgttttccagtataaaaatgaatgataagattggacgaaaatgttgcggcctcgaagatttgcgtgtattttgcaatgcacattttctagtagactataatctgtcaagctggcatgataaacctgaatagaaacatgtcattgcagatgacattgaacaaccactctttcgatctattttctcttaaagatttgaaacaagttgcagaaatctcttatgacctgaaatattgtgtgataatttatctttgcgtatcttgattgcaagaaatgcgaaatatcttcaatgtactcatactaattgctgctttttttgcaagatgtaccaattttacatctttaaccaaaacagtttcagtcgtgaatgatgtccggaaatccgcagccaaaaagatggttttggctcgcaatacatattattcacaatatatgcgtgaaagtttctccaatatcaatttcaatattataattctcattaacaaatatttttcttcaaaactagacgtgtcaccagatatgttcagtggtaagttattgagagtggggaggcatatttgagtcatcatacaagtctttcagttgaagaaccacaataaatatttgtgatgtgggatttattccatgcttacaatcttcagaaatgaggatgatacatgacgagcatatgtttgtctccttgtagattttgtcatacaaagaaatggtcatcatatcaggatatgaaaggattgtatgtcgatgaataatttgcaccagacatgaaagtgcggcgcaatttaaatacggttgtttgattgaagatcaaatcttcactggaggttcatttccataatttatcttgatcattcgatttaggcatacaatcgcagcattctccctacaggctatataggcatcacccgataactcaaattacatggatagacgatttagtgacatttgggcatgtgtgttatcagtcggcacatcaacgtcaaacccattcgacgttttatcaatcccactacaactttgtaccatattgcgaagttaaagcacttacagtatacatcaacaactaaaaattggcaccagaggctattgatggctaagtccgtccaagaacttggttttgcttcataacaaccggcttttccatgttaagacgaatgcggattgtcaaaagtcattcatcaatgtgctcgcattacatagcttgtgtaccttggtcttttcattcaaattgacatgtcaattctcatcaagccgttgtcaagcttgaagtttattttgcaagaatgataacgtttgcgcttattcatcctgctatttcacaaacgacattgcatgagtttgcgggctaattagggtagattctaaccttccccaactcagatcattcctatagatgctgctcatacaatggatgtaaccctaataccatatttccgtcggataccgtagctacgatatgtatgatatcgtcactcgcatatcaacctttgatagcactgttacattacagtgctgaatgcaagaaaccacattgacttcaaattgatcatcagaattcgagatgccatcacccctgtggtacttgtgaacatgcgatcgctgaaaacaatctgttatcagtgattgagtagaagatcaatcagtcaaaactcctttgaatctgagttccgatgcagttctcaaatggacttgtgaagactttcaattattccataagcagtcgtcctatatattgcacttatcagagaaaatcggattggatattgaatcaaaatacacaagtagaatcacgcagctcggacactgttaactgcaataactttggttgtataagagccaaaaatgctttatcaatcgatgccttgaccattctagtacttcgaggcacaatcatttcgaaagcacattcaaggcacttcatatcgcctcgtagatctaagtgtgtacattctgacttcatacgctcaaaacgtttaaagatgctgaatcaacccagaattgggagttgttattctatgaacaggattcaggtagacaatgaatttgacacattgatagatatgtgcaaagatagggaacatacattccaggcgacagctgatgcaccatggacgcgtacaatttgttttggtatgttgggggtaatattcaaaagcagtaaggatgtatcgtaatgtaaaagtttttttcatatgcaaattcgtaagtaaatattcttgtgttttctgactatggaaaaagaaaaatctttgacgccatgtaccaatcgatatgacactccgcattgaattccagcgcaaagacttgggctgaataatgcaaagcagaatagggtgctgagatacgacgaaagatttattagtatacaataagagcgaacactgttttgtattgtagatagattgatttaaaaaaacaaacaatcttagtaccaaagaagcagttttggtaaatgctagggaaggaaaaacaaaaaacgggaaagaaacagtaaaaaagaagtagaggaggaaagagatattggaattagcagtctagacaccaaccatcgagtgttgcgcgttggttgactttctatctcttcggtttctcgttcaacatgttatttcatttctattttctatatcatctttatttcacttctctctcgttttatttccattctactttatttccatcttgtttctctttcgtttgcatcttggtgatctcgaatatacagtagctagtttgttttcttttctttcttcccctttctggttctctcaatgaacttgctcactgtgtgtgtgtacaattgtttgagaatcagagaattatagaattagcattaggatcaggtctatccaagaagaatcagttgtctcgaacgaacaatcaaacaagaagatcaggatagattccaatctcagagaactagagatcagaaacttagtctgacagaagaatcagttggcattcaagtgtttctcaacaagtcgatttccccaccaagtgctccctattttatcaagagaagccatatccaagtatcctcaacaactcaagtactctcaacactccgacttattgttcctgcttatgaaacatgatgaatgacggttgggatgatgaaagcaaaggtgaaagatgcggtagcacgaaagaaatgcgcggaaaaagatgaagagtgcaaaatcgagaaaaaggagaaaatcaggaaaatgaagaaaatgaagaaaaccaa

SEQ ID NO: 653 - DNA, 370 bp, Xanthophyllomyces dendrorhous
tttgatgtcctgtgaagtgatggacttgttgagcacctctgggtttgacttgacaagagcatacatagacatacaacaaaggtggcccattcgacgatgaagcagatcaatctctttgttcacctggctggtgaccaggtgagcaacagcagtcggagatcgcacagtgacatcaagagcccacaggttcctgctgtatgcagacgcagtaaagaaaggcccggtctggtcactgatcacgatctcctctctgttgccggtgaaggtgatcccatcggtctggcagatctgaccgagggagactagaatggtggatgacaagagggggacatgccatacgttactaaatgatacctcgacctgctgaccg

SEQ ID NO: 654 - DNA, 583 bp, Xanthophyllomyces dendrorhous
agtatgtcttgccggaggagtgttggtccttggcgaagcactcggatgtgttgtgcccggatgaccgatgaaagtcacagtatctgttcgaccgagtcttgccttcggttgccttggggttgtatgatcgaggttgtttcgggcagtcagccgcgtagtgagacgactggccgcagtacagacaatggaccatcggtggagtcactgccatggccgagtgaggctgctggttctggcagttcgccatcgctgttgactgtatgtccttgttgtccaggattcgatcggccacaaagtcaagagtgagcggcctgggggttccgtgagcgtctgtgccgacctgggcctgtatattggataccagagtctcgccttggatggtcttcggaagcatccgcagaagtagaaggcctgccagtttgtcgacggtgatgctgtctccggtgatctggcggatgagactgacctgtcggaacacgctatctatgctggcccggagatcggtcgagtcttcgaggcgagcatcccagagtgtacttagtagctggaggacaccagtcgtgcctcgcttaagatgggccga

SEQ ID NO: 655 - DNA, 403 bp, Xanthophyllomyces dendrorhous
agatggccgtggcctctcaccagtgacgatcgtccagagcttcatgtctcgaagagcaaaccggagtcggctctcccagacaccgtagtcgttggcaggatggttcggagggtgaaggttctcgaagttggcaaacgacgcctcggacagcttggtgtatagcggcacactcgacggctctgcatcagtgggctcggctggcttgacatcggaagacatatctgtagcagtagagttagtcatactcttaatctaacggcaaacacggtttcgtattgctgagaaattaagataaagtaatctcagcaccaacgagacagttatggtaaacgctacatttataaacgaacctgagaaactaaaataaagtaatctaatgacaatcgttttgtaagcatatttg

SEQ ID NO: 656 - DNA, 571 bp, Xanthophyllomyces dendrorhous
cctatgactttggcatcttcatcaatcctccagagcctgaccttcgacacacatcctcgtgtcacaactctacaactctacaatcaatcaagctgcaacagaacggttgccgagcccttccgtcctcacatattgttagaatcacaccgaaaccatacgttgcacagctcgggatgtaactacatagctatatttccatccatttttcttctgtttttcttttcttgacttcatcacctcccatcgcgcgagcttacgtaatcctgcgcccgccgccggtcgtcgtttcgtcctttgatgtttctcgattttttccttatttcgcccatatctccaccaatcccgcccggatcgctctacttctttcaccatccggaccaggcaaccttgctctatcgatccatactgtttctacatattttccatgtctttcatttattttttccgactagtctcaccttctccggcttgctccaccttcttcggcttgtctctgtgcttgctcaactttctcgtccaccactttccatataagccttctcagcttcccatctcctttcttcacctcagg

SEQ ID NO: 657 - DNA, 1394 bp, Xanthophyllomyces dendrorhous
cactcaggtgtccgatcctggctctgtctgttctttagttttcatccaacaatcgctcccgtctctcttccactgccggctcccttctgctttctttcctctttctgtttctacagccatcttctcgtcaggtcgatgtgctcacaagatctagctcatatcatctcggcacctcacgcagccctggcctaccactgactgctagaacgcatgtatatactgatcactcgagctgttcatgcgacgatcgaagcagtcagcaagcttggggtgtaccgtcagtcggtgggactacaaccgtcacagaaacaaccagcacgtgtacccatcttcttgctagcttacaccccgtctgtcgaccgtcaaggcaacatcaagacaggacacagcgctcaccaggtaaagaaaggtatgtgaacggcagagatcttaagagtggttgcaaggcaatgccatgaccacgtccatatcgtatatacatctatcgctgtcacatatacatacccgttctcatatacatgtctcacccctcgtgcagtcagtcagacagccagagtctcgtagaatgatgacggccgagctagagacaccctcggcagcggtcacccagtcaacgtctccgccgaactcactttctcatatgcgatcttagccaacctgatcaagcaaagcaaatcaatcattcgctcacctatgtatcctgttcgaaaaaaggcacagacacaggcacagaaatagatagcatactgacctctgcttcagctccttcttggtgaggctctcaccagcctccccacacagctcctctcccacccagacagtgcctctgaacataggggcatgcctcggcctgtccatctcctcattgatctggtactcgaccgtcctctttcgctttgtcttccattcttccagcctagacacatagtttggatcagatgtcccgctcgcttcgtccgccccgcctgcctcgctcatctttggtgcagtctgagcctcatgctccttcagcagcccgtacgacactttcatcagtggaagaaacacctcggacagccaccgctgggtgaaggcctctccagactcgagatacacagcaccgactgttcagtcgacaccggtgagggttccatcagcccaagatgagaaaaagaagaagcaagacagaacagcacaacacagaataagatgaagcgaaaccgaccgaaaccaaacatgatcgaatgaaaccgaacgaaacgagataacatggagacagacccagagacagaacagcgcccagaccacgtcacaacacacaaagaacgaacggcaagacaacaagcatgatgagcacgacaaacaaggtggaaatgacggaagcggacgacagaaacacacggcagaagaaaaca

SEQ ID NO: 658 - DNA, 3350 bp, Xanthophyllomyces dendrorhous
  misc_feature (2993)..(3002): n is a, c, g, or t
ccctactcaccataagcctcgaacagatcggccacgacagaatgggtcggccgactcaagtcccgctgggagccgtgcgcccgaaggttcttctgtagaccgtaagctaagaagaacgatgcaggcataaaatatgtcatcgtcagtcttgtcattctgacaaccacacttcgtccgcccgggatggacagtagagccagaccctgttgtctttcacccaccattcgagatgtatgccaacgtcggcacattcatcaccagagactgcagacaaggcgataacgtagtatagatgacccatcgatcagttcgctgcggccgtctcgtcatcgacacattcatcttgccaggtcacgtacatgcttgagcagctgttgagatcaaacccggttgtgacaagccaggcaagtccagaaagtcagccagagagcgaaaagacatgggataaacagtataggatatgaaacaaccagagacagaacagacgacaagagctcgacaggaagaagaaaagatcaggaaagagagacgcagaacaaagagaaaggcagaaaagagagaaaggcagagaaaagaactggaagagaaacagaaagaaggcagagaaaacacagactgaccgtcatggcccctgctctcaagtgagggtagtggtcccatatcattatcgtgatcgctgtcgaaagaatgccatcccccaggaactcaagacgctcgtagtccgtcccgctgtactccggctcatcctccaccggccgtttcggatatccatagaacgaggtatgtgtccgggcggtgtcgaacaaagccggcgagcacgtaggtagacgcggtaggctctcggccgagatcgatcgcagagcatccataaacggcttcttctgcgtcagctccaggctcgtcaggttcagcaccaaaggcatctcgcagaaagaccggatcggagacttgctcggaaggataaaatggccgcagactgggcgagagcaggaagagaatgagtcgggtgtgagggcgtagatcgatctgtatgagccgtggcggcagaatgactgatgacgctgggagcacagatagaaactcggccatgtggacagaagatatcggaagcgtgatctaatgataaacgagacactagcgatctattcccccatctgagtgagtattggtctgagtattggtctgatcatctgggtgagatactcacccatgtatccatctatccgcccatctgtctatctatcttcatctgacagcatcctccttccgctcttctgtctctctctactcctctttctgctgcctctgctttatctatgtcctctgcgtgctctatctcctctctccgctcgttgattcatcttccctatcgctcgtccaaccgatgatcgcttgccatgtcattcctttctgcaagagttgtggcatacttggggtcagaaacggacacatcatcacgattgactatggagacagtgtgtggagccagagaaagcagaacaacccaaaagaaataaactacaagtatcagactacaggaaacaaactacacgagacaggagaagacatccctaggcaaaggaaaggcaaagaagaaggggaacagaaagaaggagaggaagcgaaggaaagcaaaggaaagcaaagggcacaagagggatcacaacgaaaaaagatagagaaagacaaagagaagactggaatgacaaacggcagcacacaaggaccgatcgtcccgtccattctgtttgccgtgtttgtcctgcccgatcatctccagacatggccgcttagcgatcgctagcttggctcgcccgcagaaagctgctcgtcgtcgatgaacgccactccttgtctccggccgatctgacatccacacaggtcgagcctgtcgaacggaagcagaaagctctgcagagaggaaacgctctgaccggacgaccttggctgcatccttgatccggggagacgccagtttggcaagagaaggagcagaccggtctaggtcatcgacaagctcgaccttgatcgttggtatcgtcggccgtcgagtctgtttgccaaacagaggcgagctagcaggtgaggagtcagaacgctcgacaggtggagcagacagaacggacggagcaggcgggctagacagagcagatccagaaagcttggctgaagataggtcaaagcggcgcttcgcaggacgaacgtccgaccgcctcttctcctcgtcactaccatcatcgtcattgtcgtctttgtcatcatctatcactcttcgtcgcttaggtgactcgaagggaggccggggcacttggagtcgctctcgatcgaccatctccgtccagctcgctgatcagacaaaaaatcaccagaaaaacatcagtcacaggcacaacaagggcgagcaagaagcccgggtgagaagacaggagaaaggctcgacagaagagagacacccacaagaagccgcctgaggcaaaggcttcggtatcgccgatgggttcagaaacgcatccatctcggcatccgtcatcggctccatcccccgcagctcgaagcgctgtatgggcgtgaggctcttgagatacgacctctctcgacactctgtcgtcgtcgtcggtagtctgtgcgaacaacagaaggatggaagaacagaaggatggaagaacggaagaacggaagaaccataccacgtcagtctagaaacaaacatctgacaaactgaaggcgtaagcagccaaatgcatcactgacctcatagcctcggcctttctgacccttccagccctcttgacgggctgaggccggtcgccctgcctggctcgactggccacgttggcccgttcattctgcgatgcagcgataagaaagtcagtcgacacgaccgagacaagccatgacaaacaaggacggcaggcgaaagaagagacgaactatgggcaagccctcgacaggatatctcttcgccggccggagcggcttagcggcgggagcannnnnnnnnngatgcgggcatgggctgcgtgtccgaggaaaagtgcggagcatccaatgaggcgtaagaggggctgaacgcgtgtaaagcatatgatggggaagacgcataggagatgctggaagtgtcagaagtgctggaagcgtcggaggcgccggacgtatcagaggtgtcgagaacgttggagacggaagaggcaggagggagggaaagactgtaacgagaggacgcaaggctgaggctcatcgcggtttgtatgtaatgctagtatccggactgcgtcgaacggtagtgggacaggaaatgagacaagtgcaccaggtggtgtgcgagcagggtgcaggtgagtgtgagtgtg

SEQ ID NO: 659 - DNA, 18723 bp, Xanthophyllomyces dendrorhous
ttttcttgttgtattgttgatctcgatccactgagctctgtcagagcttgtctttgttgttacttttcccatcaatatcctcttttctcttttagaccgcattgattggcactgtctttaatgctgaattctttcgattttgcctttttctttagtcgtgcattcgccttcatcttcctacgtggttactgtatgtaagtatgcatgtatgtatgtgagtaatcctccttcattgatagattctcgagatagtgcttgggaactaagattgcgttgaagacagatcgacgggtgtatgcatcatatggagacgtttattgagctttgatcaggccttcattggcaataggatgcctatgcaactgatactatcagcttatccagcatcttttgagagaatttagtttgttacccgtaagatattcaagcctgtcatctccgccggagttggattgaagtgatttgaaaaggtccgatttgacgatcaggttaacgagagaaacaaggtctgaagagatgaataggcaaaagagtacttggggggaaaggtcggcgctattgttagaccaaaattagcataaaagttgagaagcatcgtcagttgatgactttacacttattatttaacaatgatatgagtacagatgtaagtctgacgatctttagatgtatgatcagtaagtggtatgatgattcactacggtcataaattatgcagccgtcgcgacgtcagtatagaattatcgcgtgagggtaagtaacaataacagccaacgccgtaaaagatgatacaagacaactgctgtgacgttgaaagtagcccttgaccttcaagatttatcttggtataaaaggtcctgtgataagataaaaggatagagagaaagggatgaaatgatttctaatttacaaaggaggaagggggtggtgacagatgggctaggtatgggtgtggttacatatttagatctgcctgatcattaccgatacacctcaccgttcggaagtcgtctaccttcctgattcccactaggcaacactccttcctgaaaggcaaccggcgagacatcaggtaggcagcgagcaaacaagcaagcaaacaattcccatgtccagcgtttggttgcctctgccttctacttctcaagttcggccgtcgatctctcccaatgctctttcccactcaacaagttccttgacccctatacggacaaactctagctcttctcctagctcaactccccagagatcctcgtcttcgtcttctcaatcgtctactgcatccattcctgctcgtccactcagaccaccaccaattcagacaagaacaaaagctagtacgggagaacagctcggaggctcggttggcctgaaacaaggagatgttgataccgatgtacaaagtacaggatctttgtatgcacccctttcacctactcacgaggaaggggaaatgaatcaggtcgatctttccacatcacctctttcagccaacaggaggaaggataattctgggtttgtcgttcatggaggtaggagaggctcgtcaaacgatgtgacttcagcggcacatagtctagtcaaaagagcagttcaagaagcgttgacgcaaggaaatcatggtccgagacgtgcgtcgccttctacaccttcagttggtgtcactagcttcaagtttggagaggaattaggcagaggaagttttagtgttgttcgtcattctctccactttggatctcttgtcagtcgagagaagcgacacggtcttaacagctcgtttgttgttccctctccaataccataggttcgacaagccacacatttattaacatcaactcaatatgccatcaaagtacttgacaaacaccatctccgaattcataagaaagagaaatatgctcaggtggaggttgaggctttcaaaaggctctcaacctctcccccatcaatcggctataacggaacggcaaccgaagcgtcttcaaggtcaaatggatccgataaaattggcgcaactggtaacaacggtttgagcaagagcacaagtcagcaaacggtaacagatgtgccgattagacagccttcaaccaatgtattggcggagagacagatcgaagttgaaaaggggagagaaagggcaagtggtggtcatccaggagttatcaagttgttttgggcgtttcaggacatgtcaagtctttgtgagttttccatatgtatgaacttgagatgaatccgaattgacgttctcggtcatgtccttcacacctgttagattttgtccttgatctggcaccaaatggagagttgctgtccttgattcgcaaggttagttttgttttctctaatcttccaggcgtattgacataaggcccttgtatggataagggttattttaataatatttttcctgctcttgtatacgtcttcttatcagtacggctcgctttcaacattttcggctcgtcaatatgcagcagaactggtagacgtggtcggttggatgcatgagaggggcgtcttacatcggtcagacagcgtcacatatgtgcccaacgaatttcttctatgttcttagctaaaaaaaaaaaccttctttgcgtgtctccacagtgatctaaaacctgaaaagtttgttccttcttgactattcatcctcgataaaatcagtgctaaatgatttggtgtggcaatcctgcaatagcattctcatagatgcggaatttcatattcggctcaccgattttggtagcgctaaagttcttcctctctcaaaaggaaagattactccagaacaacttgcaccgccgcctccaatgactgagcctggtttgtcaattccttctgcaattgcagctaccaaagacataatttctcacgagtgttctcctacccgataccattcttacaatttcaatcaaagacacccctcgatcgttttcgtctggaagaggtccgccgaggcgttcattcgtcggcacagcagagtacgttagtccggaggttctgctcaacgaacctgcttccgagtcgtatgtcattttctacttatttatatgatggaacatctaatcctttgatgtattaagctaattcgttcatccataatctcaattcaggtccgatttctgggctattgggtgcatcatatttcagtgcatggctggtcaacctccttttaggggcaagactgaatatctcaccttccaaaagatcaaggccctagactatgagttccccattaactttgatgaggacgctcaagatttgattgagaagcttctggtacgtcgtgatgtttcattggtaccatcaacagccaagttgatctgcgatgtccttcggcaattgtaaacaggtcttggagcctacccagagactgggcactggtcctggtcggatgcaagaaattaagacccacccttttttcaaatccgttcaattcagcactttatggacgtcacccatgccacccatctcatctggcttcgttggtccgcctccactatcccccgctcggtcagaagacttttttgcagcattagacatatcgcacaacgatgcacttaagcatagtgccgatgagattgaggatggagaaaagttaggggagttgtccggcctggatgacgatgattgggacccacctcatagtcggtggaggcgcgggccaagaaaccacgcaggaagtggaagtgtatcgagcgggaaaagtgtagtcacgcttgacccaggatctgcggctgggttttcgtttggaggtctcggaatagggagaccaacatctggatacacagatgggagtgggagtgcaggtggtgtaaacggtagcaattacacagacggccccgaaatcgggagtggaaatatgttcaaagaagaagacaacagaggcagtgccgaaagtggccgggaaggagaagctgcagcacgcagaacgccgctgaaaggagaagacagagcaagagctatcagcgggccgtggattagtcctacaagcaaagataagaagtgagtttgtctctgctgtcgttctcttcttgagtatactctttctctctccagctagaaagattgtgaagacttacgcaggtcacttcttgctacagaggtttacctctgctgccagatgagaccccgatcttctcttcaccggtgcttgtccctgcgtctcagccaattgcaaagacgctttcgaagccgaaggaacggcttcttgtccttactgatttccctcgactactatgcgtcaagctagactcgaagggaacagggatactcaatgtcaagtacgagtgtttaattaccagaagggggactggaagcgggatcgggtctggttcgggagggggagcaaatgtaatgaagggggtcaaagagaaaggaggaagagggttcattattcagactgtacgtatcatcatatacaactgggaaaccgtgcgagtagaccacgaaacctaacggtgtcattccgacgctcaaacagagccattcgtctagaatctttctctgtgaggacgatgcacttcgtcgacgatggatggaggagcttcgaaaggttcaagagtaggcgatctaaatcattttgagtgcgttttctgaacttctctctcatgacgacaaacggtgtggagtgatagccttgcctgaagatttatctttaatttttcttccttcattgagcagaaagaacagacacaaggaatccaacatagcatcatatctcaccttccggtgtgtaacaatcatctcaggcgggatatagaagctatcccccggtagaactcttcttcatcccttttttccttattctctcttcttttctagtctctcgctcccaagctgcctgtagttcaagggttttgcacatcctgttgtctttatatcttccctataccgtctctggatgtcgtcttgttgcttggtgaaaaagcatcacatgtcggctgctttcacgatcgtttcatatgaattcttgtgaaacctcttaaacacctgcgatggctcgacttgcatgttgggttttcacctttaaggatctcatatacagtaatcaaatgtcggctgattcattgcaatcaatcgctcgatttggggcaaaaaagctagagtctcaagaatgcaaacccatctgcctcgctctcttctcttttcttaccagataggaataagttcgtttcgttcactattccttgatgggaccttgccctcttttgcgcgactcgtctccttccgctcctcatagggcactttagattcgagccatacaacagtgatacctgatatgttgcaggaggagcaagagccagcggcgaatcgcttagtcgacgtttcttgccgatggaatgtatgaaactggaacgatagatcggatgatgtttcagctcgggcttcaaaatcgggaaggcgagggctgggaaggtatttaaattccaaagaagttcatcgaatagaggatcttcagcaggcgagaaatggatcgtggaagaggattcattgagttggagatcagggtgagaagcaagagcccggtccttatagaatgactcgatcaagttggatgagcgagatgtatgggaggtcacgtcaacaagttgatccagattatgagaagaaagttcgtcaggaatagatttcttgtgaacgcctcgtgatatttggattcttttggtggccattgcttctttgtctggtctgatacaatcccaggaaggggttcgagagatcgatgagataaggatcaaaagacgagtaaatacagtgattaatcaagttcacatacctatgggttgatactgcctgtcagacttaaatgtggtggtagtttggatggaagtacagagggtatcaagcctgtcttcgtcggtgatcggctcaaaaagaagaagaaagagaatatcttcacgtctagaacgcggatagatgaatcgaggagaacaagcggactatcggttagtgatgaactgtatctcattcctggatgtcagtcacaagttgtcagttgtcagttgtcagttgtctagctgtctaactgtgatcaaatctggtagaaagacaggttgacaggtttcggaaggaggagaactagattgatgatctcgtggttccttgtgcctgactctatgtgtctcgtgccttacccgtcgatcaatatatgattggagaatatttcataaatttgagtggtcatccttaacacaagcattcttagaagtttgtccatcttgctctgctatctctcacactctttctatcaacctgatttctcttctgatctctttgtccttcgccaatatgcctccaaaaactccccccacactcaacgatgtccaaaagcaaacattagaaacccttacgtctgtcttttgtcttccttctgctcgagcgaccgagcttaccgtctcgcccaagctaggcccttcggctgctgacctggccggctcgtccgagcttcgagcatactcttgggacgaggccaagggcaaactccttgccggactcatcacgggcggtatcaagctggatttagagacgagagttcttttaagcagcatggttggatccgggaggttaggaaaatctgaacaagtgtctggtcagttgtccaaagcaacctcatgatcatcctccagtatgtctaaaggtacatagagacatcgtgactcacgttactttcgcttaccaacagctgccatcaaatactttgatgaacgcactgcaactcaaattaacgatgatgagttcgacaaagcctgtggagtcggtttgtacagtaactctctgtgacaagaataaattatctctaattgactaggaattccctcttcgataatgagctaggaatcaactttaagcccgaagaaatcccaactcttgtatccgaggcccttgatgtgttcagtccatctagttgggacgatttaagcaaagctcttgtggctgtcaaaaatactgatctaaagtacgtcaagtgtatcactgcagtgtttttgagcatcagaccaacactgactgtgccctatccatcacacggccgtacgactgttatttcacaggtgggctggagcgcttgacgtcaagaatgcagttgagcagtcattcgtctctcgttttggatccaaagaagctgctcgggagaagaaggccaaggtcaatagttttctcagtatgtttgatctgacaaatcaggctgacgtgaggggttacttatatgcataggaacccaaagctcccaaggctgcttcagctgccaaaaagccagtatcttcagacgctacagctgctgatgctgctcggagtatgttcacagaggggtttctttcccggttgcataagccgggaggaaacaagcagatcgatccaaagctaatggaagaacatctcaagttcactggcggaaacgtgatcactcgattccctcctgagccgtgagtctcgttatgtgtcatcaccttcgtctatgtgtaaaagataaggtgctgagagaatgtttcctctgcatcattgatcaatgtaggaacggattccttcatatcggtgcgcgtttcgactcctgtagtcacaatattgtccctttatagatcgtatctcatcataatgcccttcctcatgattaggtcactctaaagccatcgctatcaactttggatacgcagctcatcacggaggacacacctatcttcgagtatgttcacctacatctgacatcgagacttccttgagctccatttgaccatttttcaatgatgtcgttcagtacgatgataccaatcctcaggccgaagagggtcaatactttgagtcaattctagagatggtccgatggcttgggtttgagccttgggcggtcacctacagtagcgactacttccagaggttgttcgatttgggaatcgagctcatcaagagggatcgagcctatgtgtgccattgctccggtatgttcaatcctgatctcttgatcatatccgtgcaatatcttcagagagtcgtcgctgatattccattatggtatatatattgtctcttcggtctgctctataaattagccgaggaacagttaaagaatcgagggggagaaaagtctcaggttcgaattgcttgctcgcaccgaagccgcccagttgaagaatccataatagagttcgagaggatgcgaaaaggggattacaagaagggagaggctactcttcgaatgaagcaggacctcgagaatggaaacccgcatatgtgggacatggttgcctaccgaattgtgcctgccagtcatcacaggacgggagacgagtggtgcatctacccgtatgtcgtttcctcctcttaaagatttgaccgaagtatgtaggtagatttgtacacatcgcctgaatccatccaaaaactcgtgatgttttagaacctatgattttacccactgcctggtcgattcgttcgaaaatatctcgtcagtatcgcaacttcttgtcaattcgaagcagtccgactctgatatttccttcctcctgtgtagccattcgttgtgcactacagagttcattcttgctcgagaatcatatgagtggttatgcgatgctgtgtccgtgtacaagcctcgacagtccgaatatggccgactcaacatccaggggacggtaatgtcgaaacgaaagatcaagaagctcgtagatgatggccatgttggtagttgggacgacccaagaatttataccttgatcgcgcttcgacgacgaggtgtccctcctggtgcaattgtcaacttcgtacagtctctgggtgtatcgactgccccgggaacgatccaacttgctaaattcgagggctctgtccgatcttaccttgaaagttcggccccgcggctgaactttgtacttcgaccgttgaaggtcacgatcgagaatgttgctgatgactaccgagtggaggcttctaagccgcttcatcccaaagttcccgagatgggatcctacccgatcgttttcaccaagcatatttacatcgaccgagacgatttcaggcttgaagactcaaaggactacttcagattggctcctggaaagaccgttggactattctctgcaccccatccgatcacgtgtactgaggtcaagaagaacgaagctggagaggtcatcgaagtggttgtcagactggaaactgagggagtcaaaaaacccaaagcatacatccgtgagtgtatcctatatacgcgcttgacgtaagagctcttcaagagttgcttcactaactgctgcctcatgtcttgaattatgttaaaatctgacgattatcagaatgggtggctgaggatcccatctctaactctccggtgatcgttgacgagacccgaatcttcaacccgctcttccattctgacgatccggctgcgctggacgactatctagcggatctgaacccaaactcgctcgtccgagtgcatggagctatgatcgaacccgctttctacgcgcttgctaaaagatccatggctaccgctttggaagaggccaaggcacgaacggccaaggcactccgagaagttaagaaggactcgacggtcgagaagaagaaagacgatgacaccccggtggctacggtcgatcagcttgttggtttggaagatatcagattccaaggccttcgggtcgcctatttcaccgtggacaacaaggaatccaagctgggctgcttgaacgaaggcgaagatgttgttccgggaaagagggagggcgacaagctggtgctcaacaggatcgtgtcgttgaaggaggataccggaaagaagagcgtgtaatcagaacagtgaacttatctaagttgaatttggttgtgaaggtggctttctgatacataggggagatatctcgatgttgagatgacagtgtgacaaatcagttggttaagatagtcgcaaatatcgtacactacgatatctggaggagggaagatcgtatgaaacccacgaagtacaatcattgatcaggaatgcatataaacatatgacacaaaaggtacaaagttggccttttgcaaatccaaaaaagatttacagttgaatgcgagagaagaaaagaatgaaagagagactagggacggttatagtcgactgattatcaaggtaagaagaacagagcaatcagaaagcaacggaaatttcaaagttcgttttgcactacgagagagtcgtcatgagatgagcagacagcacatcgtgctcctgcgaagtgactgttggcaaacgcagtcaaaagataagaaatgtaaatatatatgtcagcattgtgttctttcgacatttcggagattggcgctcaaaatctgaacccggcttttacatactcttgagaaggattcggataaactctgcagcgaccttgggatgattcttctgcaacttctccagcttcgtattgtccaatttccatagaaccgagggcacctcaaccgtaacagtcgcgtttcgaggtgttcccgcgagagttgatagctcgccagcaaccacacctgacaccatagtttcttggacctgttgtagataggattagatacaaaaacgaattgcttcatcaatttgtgttgtcgggaagggtatcataaaataggagggcgaagcacgaacgagtctagtgtgttcagcgtactgtaaaagaagtcaacaccacgatgagtacatcaagcgttgccgatcggtcatcgaattagatgacagaactggatatagggacttacttcatagacagccctgagcataccgctttcgattaagtacataccatccggctcatcaccttggctccacagaatctggccttgtttcgcgtgaacactttccaagtaaggcacaagctgaaaccagaaatcttccttcagatccgtgtacgttcggaacgtcttaagaagtgttggaagcggcggggctaaagaaagagtgggattgggcgacagggatccattcgaggaaggttcatgtcgaagatggatgtcggctacgatcgtatttgtcggaaggtcagtaagcttgttttgaaaggatgaccaaggtattggtaagaaagatgcgtacaggatttgaatgtcaaatcaccggcctgaacaagatgcttgcgtcttgggctgttctcgtgcgactcgcctaatgagaacggaacttgggaagaagcgatgttgaattctatgtataatcacaatagatcgagtttttagtaatcagagtcgggttcacgatagtgtcccgatgatactcacctcgagcagcaggctgttgctctagcttccgattcggtgccccgtagaaggccgacctttagataaacacgatagagtttgatttagttcaagtcaggttgtgtgctgtccgatccagatggaagaaagtgatacctacaaatagttgttctcagtccactccaatgcatcgttcaatgtgtctactacttgaaccgagttattgccttggtcactccagagctcgacagcctgtagtgcttttccaacaacaccttccggatggcatccacagaatctatgattttgtgatgaataaagtagaccaaaacaaacaccaatgtactgttagttcggtctcgaaaacaaaattggccaaacgcgtagtaggagcgaagccgaacgtacacaaggactacgcccttcgcttcgagaagtcgttggattcgaacaaaagcctcggccgaagaaaggtcaagaccgtataccaaccaaaggtcaacgatcaagaatctgattggattatgttgccagacagcgatatccaacatctggtacaacgcagacaaacaagagagttaggcacactggtattcgataatcaacgggaagaaaactgacatttctgatctctccttctacggctgagatggttccgaagaaaaggaacccttgaagcttgaccacctgagtttggcgaccaacatctttaatgaatgctgactgactagcgggtcgacgaacagtcgaacgagcaacagatccattgaaagctgtaacgcaatggcttacgatgagcattctataataaaagttcttagatgtcaaaataatgcttacctgctcggatagcccgtcgctttgaattctgaatgacgaagaagatgcatgccatgacaattccgataaacagcccgatcacactgcatttatgattatagttttgtcgttgtgttcagaatgagttatcgattcatcgggcggtgctgaagctaacttcattatggatggaaagaaaacttacaagtcccagatagtcattccgatagtgatggcgacaatggtgacatactcccacctgttgactttgtgtcgggtgtcccagacggcctatgaatacggagagcaaggaacaaactattatatatcacgtaaaagaagcttatgaaagcgcgaaagactcacctctttggcaagatcaagtcccagcacaaaaataagagcagcaacaaccatgatagcttaattagacagacatgatatagattcaacgtcagtcattaagacatgtgcatgagattcatggaatagaggaagatgagcatacgaaggaagccaatgacagaaggacctatgaagaacagaagaaagaaaaccatacagattttcgttttgaaatcagattcaacaggtctggtccaacgcagagacaaaaacgaagacttacctgcaaccatgattccggcggtagcagcagccaacatgagtgctgccaatctagtgccgcctccaactcggtagaagagcacagtgttgacgtagccttaaaagatcgttatggaagcaaataatgagtaaagcttgtttgatcatgttggcgtgttctacacccatgagaagagcaaagcgactcacaaagatagttgggaacagaaccaacacagccggacaggatattagagtatccatgagcgatgagctccctgtcaagcttgacgttgtcttcacaaagagacactcccagggcaggaacgtttagaggaacgtgcaaaattcctgaagtttatcatgatccaccacgaatggagacaagatgaccgaagagtcagagccaaacggttgaaagctacggcaaagattatatggaacaaaccgaagaaaacaagtgcaaactgggtagacatggacttccagaaggctccccaatgaacctgtctgaaatcgtagtaggctttggtcatagagagagggtccattgagcagaacgtcaggatcctccacaccctgagaaatcctgaaagagaccaaacgcacagtaaaaagtataccaaggctccttgacctgtccaacttcgaacacccatctgtttttcctgagagtctcgaagtcaactccgatgatagcgatgacaatgtagaatatgatgggcacaaccagaaagtatgctgggaagacaagctcgtgcgtgtatcggagggagatcaaccgaaggaagagggcaaggaatagagggattgcccagagaagaacattgtgggccgatccgaaaagctgcacgtaggtgttgtgagtaaagtcaataccttcaccctcaatcccagctgccacctcgagtctggatatcgatgaaattggaatcatctaacatcagaaattaagcttttgggtaggatgattgaacggaagcatacccagtctcaatcaggaaaactcccacaccgccgatagcgccgataaggatacttctagggaagaaccctactaaagcaccaagcttaaactttccaagaccaaagaacacagcacctgtgcatagcccatatgcagtatcagtctcggcgagaaaacagagccaagaaaaccgtgaaactcacccgtcaagaaggatgagaatgcaaacgccgccatggttgtggcgatgatgacatgaggctgtgatcggacatagaaaaaaacataaggttgatcagatattttcagacgtgacaagacgaactagctgacgcaagaagagtacaaacgttttcttctccaacctcagcagtgatagtgttgacaaggatatgaaagaaggggacggcctcaatcatcatactcccatttccagctctgaaatgcgcccaagtgaaaaataaatggctgttacaaccatgttttcttcgaagcacctacaaatgtttttaaaggcagaattcacgtacttgaagatagatcctccaagagtgaaagtcaattgggatacgatgcaactcataaagaacatggaaactccgacaactccaaagtcggggaagattgcgttcgaggggaacatgatcattcgtaatgctcgaaagacgggaaggaggagatcgatagtaagaaaggagaaacgggtagacaaacggtagtgttagctcagtctagtcagatcaaaactcaagatgtgagatgaaaatgaagactcatcataagacactccatcgagtaaatttctaaaattcagatgttccggaggatgtatccaattagcccgtttctctcaagattacgtggaagatagaaggtgctttgagatgctcacaaaagcaatccaagcatcacggccggtaacgccttggtgggcgcgaccacacagttttcaacaagtgtctttccagtgggtttctcccagccggtcgacatttctctccaccagcctaccaacccggactctctgttttttccaaagctctcaggatctgtttcggtcaacccgttggaggaatcctgcgcatgttcgtcatgacgggccaacaaatgagtcctttcgttcccgccctgattgccggctgcgacagagctggttgatagctttttacctgatgatgaagcttcggttgtgttactaatatcagaatcctcctcgacaatgtcagaaggagccagtcgactacctcgggacgtttcttggtctcgctcgacaagtgcggacagggcggatccttttctataggagcttgacttaggctctggtagaaccgtcatcttgctcgctttgggcgtcacggaagtactcgggctccagtcgtcttcccgttcgtccgcctcatcctcttcacgaggcgggtcgatctgaatggccatgcccgggctggttgtatcatccaaaccggaagcgggaggtgagttggactgaagcatcaacgccagtccggaaggaccggttcctccaggactggttcccggctgatgtttctgagataatcccaattgcgccaaatccttattgacatccgaagatcggtcaactcctgtagcttgagtatcactgtagtgtctggtggaggcaaacatcgagtggttcgcaggagaggaaggggtcgagtcgattcggtaatcagaagcagaggtcgaatggaggggtctggccgcaaagtcggcgagacgagcggtagaatttcggatggaggattgggtagcgctataggacgctggagcaaggacgggtgggtgggtcgaatgggtagtagagaacctatagacgatggtcgaaagatttacatgatcagaaaggcaagatggaggaagagatgtgttagcaaactacacgagttccaacatgatcatgaaacgtgaagacagtgagaccgtcgatcgaggttgttgtcttgacggaagacgagtcagtgaggatacgttggttgtagagaggtacgcgattgagcgcaagaagaccattaggatcgcgtgacggaactcgtattagatgagaggttggagaccgtatccggtgtcttggtctttcgctcttctttttcttacgactctttccctcaagagcagaagaagcggacgggcgagagaagaagacagagagagaacgagaacgagagagaaggatcagaagatgaactgggaaactaaccgtctcgctccagaggcaggaacttcagagggtgttccgctaccagactcccgttgccttcccagatgcgatccgttgtgggatactagatcgccgctagtagagctaaagagactgtactgactagctccttcgtcatctgcaccttcgtcttgaagagcctgcagggcaggatgttgaaagtgaggccgttcgctcgacgcggaagaaaaggtccgacccgtcttggacattgttcgtgttggatggactgataagaagagagtaagacccggagaaggcgtgagagcaagagtgtatgagtgcgtgagaaagacacggtctggtgtgcttgtcctgacttgacaagataaaagacctagattcctttgattcccttctcgaaagaagaaccaagactgagtttaaagaccactgaaggaagaaagacgacaagacgaaagaaagagatggagattgccgtccgttcggtcggctcgagataaagcggccgaaaaaaatgacggaatagcgcaagagaggaaaaaaaaagggaaaaaaaaagggaaataaaataaaataaaataaaaagaaagaagatagataacgatttcgatagataacgttcaacgttctctttgttttccagtcttcttagtcggtcacgtctttccgaaacaatcacttccagacaacgacgacaacgacaacgacaacgacaacgacaacgacaacgacaacgacaacgacaacgacaacgacaacgacaacgacaacgacaacgacaacgacaagagacacataggaattaggatatagaatgcgctcttcccgcaaggcaggtatcactttcacaaacaaacacacacacatatacagagataggctttctataattaaccgaccggagatagttgggaataaagacaacgtatagacactgatggtatctacgagcctcgtcagcccgttagcaggctgaatcgatctaacaaagaccgagagaaagaacgaggtttttggaataattatgtaaagcggacaggtacatatgctacatcgggaaccgtgaaagaaacgcgttcgcgaactcagagggcagggggaaacatgccaaggtcgagattattcaggcagttatgagaaaacgaggcgatcagagcttgagttcagtcaatattcgcttagccaggatgtggtactgccacgtatttccaccgactcgtcggaactgaactccatgaagcggaagccatggaacctatttaaaatgaaataaaagggcagaccaaacacaacgagacaatataagcaaagcgagcggtaagggcgggacaggcacaagagaagaaacgaaccttgataaccataatctcgaaccggacgagcagctcgctcagattcgagtcatctccgtcgcctaacatccataactctccccctccttcccctcccggacttttccctgcatccggcacaccaggcgtctgcaacctccgcgcgagcactccaggcgtcgctaccggagatgcgggtggagagaagattccttgttgtggtccaggcgtcgacggagcgttctctcctcccacaccaagcggctggtgaatttcctgctgaggggatccctgagacgaagacggtggaagcgaagacgtgccgttcccgtcatcacctccgtagatcactgaaggctcagccgatgactccttctccctttctttgacgggccgaccaccattcatgacgagggaaagcttggatgatttctgcttgatactccctcgctttttcaacgaccctccgcccgatgaatcggtgatcggtgagaacatcggtgtctgtttcgacggctgctggccgccattcgcgttcatagaagaaaggtcgatcgatgggctatacacacattcaaacccacccttaatttgccggtgccgaattccaaatcgatccagaactttacgaatatcagtcgagagagcggtagccgactttgttgatgtcgtagccacacttgacaagatacacacacgagatgaagagaaaaattgattgattgcttcgtcagtctttcgacaacgttcgcgaaagaagttcaagcaaacatcgacttacctgaatagtcccttcatataaatcggcttaaaatcaggctctgcctgcagattcccctgttccgccgcaagcccggccgccttttctgttgcctttttctcctcgccattctcttcattgccaaattctccgggcgagctccaatcattgccgttagatttgacatgtgctgatgcccgcctcgacccagccgtcatcgttgacgatctaacgacagacgctcccatcgacgttcgccgatctgagggcttcgggtttcctccggctcctattccaaggccagcatattccaggacagtcgaagcccgtctgtagttgctaggtaatggggctgattgggatgccgaaaaggaggagccatcttgagcctctgtcatctcagtcaaaacatttggttcgatctcggccatcggctgagaattctgtctcgagaatgacctgggtagattcaagttttgacgcttgtgggctgactttgttgcatcatcaggcgaccgggagagcatcgatccaaatcgacgagctagcccaccaggggaaccgaacccacctgaatgctgatcggcgactggcggaggagtcgtccggccggactggatctggtgatgaggaagtgtcggaggagatccagacgatatttcctcgtcctcggctgtcgcaggcaacgccatcgacggctctccttgagtagacggccgagtttcgaacgcagacctctgccggtgcgaatgaccggtttgctgagggataaatgactcggagagcggtctggcaggaggtgttggcgctgagtagg

SEQ ID NO: 660 - DNA, 7721 bp, Xanthophyllomyces dendrorhous
ggagagagattgacttctccggtgggtagcaggaccgggcgctcggggaagagtcgtctgagtgccggcaagcttggttgttgcatcgtcggcactgggatgagccatgacagaagctggatcacccaagcctggctcatctgtggctcgcggccgtggggtcgcccctgatcgggaggcgaagtcttgggattgaatgggaggaactcgactgttaggtgaggagagagcggatgcaggtgctggtagtcgaggaagagccatagtataatctggaccaacactagaaggagctcgagcatgaagagaagcggacggggcgatgggggtgagaggcagttgggttggagtatcgacagcgttagggataaccgagatctccgacgatgcaaagtggcctggcccatacaccctttctcgttccattttttctcgaacgagaaaatatatcgagatcaaagggtggaaccctcgcgtcgggtccaaaggctccttctgcaattcggccatcggcgctccaagtcctgcggtcccgttagtataatttgaatcatttagtgccccttgatgactcattttttctttcttaggagaagaggagaacaatttttttttgtagaagtcgaaaccagaaaaccgtttgttgtgcttcttggaatcttttccaagaggagaggccatggtagaggctgcttggtgatcgttagcatcctggttcggctcgctgaagttcatcaatgatgaacttgtcgggctcttccaccctgctttcccggaccgctgggcatctcgtcgatactcccagttagcgacgcaagagcgatatgcatcgctccggagaacagcccgaagacgtcgctcgatatcgtcggccaatccaaattcgaatcctaccatcccctcgacgatccgagggttaatctcctcaattcgaagaggttcgcgattgagtaggaaggtctctggtggaccttcaaacccttttgtcatccaggggtgggacataacctcagtcaaaggagctcggtaggtagggttggtgacgagcatacgcatgagaatctgtttacactctatggatgcatgaaggaacaaggaaggatttgaacacacgtccatcaccgcatacaacgattagagaacgagacattgatgagttgacggacctaaacttaaccatggttgatattccacaacgccacgcttgatttttgcgtgcagtgccggcatgttttggtcgtcgaacgggacctttccacaaaccagcacgtaaagaacaattccaaaactccaaacatcgacttcgggacctgtatacggtttagcgttgagcaattctggagcggcaaaatacaaggatccacagaaagttgataactgcgattctggagcgaataggtttgagagtccaaaatcaatgattttgatattgccggtattagaaataagaatgttttcaattttgagatctggaagaaagagcatgaacccaacaagaaagttcatcgatgagtcaaacgcaaactcgggcgtagagaaaacaaccaagcaagtcaacaatccagagaagcagcgtacctcgatgaacgatggagtttcgatgacagtattctagcgcacttccaatctgccttgcaaacttccttgcggcacgctcccttagccggccatggctgatgatataatccagcatttgtccacccgaaacgtactcaaacatcatatagtaatgatttgtgtgagtgatcatctctttcattccgcatatatgaggatgatggagtagaagcacgatggctgcctctcggacggtccggacttctttggactgctctttggcaattgcccgagcaataaacgagtctgtgggtgagggagcccgagggaggggtgttccgtccggtgcgtgagtccgggcttgagcctgtagagctagtggtcgatgtgccgatggcggagttcgagggataattttgatggcaaccttggcaccagtctggacatgggttcccaactttaccttacccatcgaaccagctcctagagtcttgcccagtgagtagtctccaatttgtcgggactgttttttagccggaggaggcggtggtggtagttgtggcagttgggatgagggcccaggagttgaaggcagtgaaccggcagggtaggacgatgaggtcccatttgactgttgaacttgcgggaagagagctgtagggccaggagacggaggccggcggatggaggatgaccgagcgggtggcgaggatgaaatgggaaccatatgtgatggaagccgcgagtgtgtactcgacctggaggatgatctatctaggccggaatcttggtttttgagtgcggacacccccttggataaaggttgtcttgactcgacctccccgtttgtttccacctcatccctcggcggtttagggctgccttgggctagacactgactgtctcgtctgatctcggacgttaggggtagagagtcctggtcgtacctgtgaagatcgtcatcgtccgttccagtagagacagggtcatgagggttgtcgaatggttgagatgggtaagatgagcggtggcgagacacataagttcgagagtgttgacgaggggtaggaatttgggtttcacgtagagaagtatacagcggccgagggatcgttggggcagaagcggaagaggacattggccgagtcagggaatccgttggtcgagaccgaacgtgaggatgagaaggtaggttggaagtacacgtttgtgagaaaagtgggacgtcaggggaagcagaggtgttcgatgaagcgtggatgacggatgcgggagaggatgagaaagacgcagggacaaaaacagagtcgatcagctcgaccttttcagaaggatgtaaaggtgacgacgacagaggcagcttgggtttctttgttcttgacaacaaggtccatcgctgaggtcgtctaacctcatgatcggcctcgcccttgtccggccgttccgctaccgcgacccgctgagcaccgacggaacggctgatggacagacgacaagcatcaacacatcgaaggaagcttattctaggactagatgctgataactagatatgggtgtgatcatggactgacgacccaatagcaggactagagtcagaagatggaagagatctccgagagatgacttcgttttatgaggatggaacgaagcttgattcacttcgaagacgttccatctggagctgctgaaggacgcgtatgcttcctctcgagcaaaggaggagagaagacgtggagtccgataaagagaggtacagatctctggaagaagaaagagaagcgaagcgagaacgataggagagggacaaagcgggaaagcgagatagaaactccaacaaaggatggaaacagagcatggtctctcgtcgtccaagcggggtagcttctgttcgtttctcgtccatctcttctgcctcttatcagctctatatctaactttcaacgtttctcgacgtgtgtacttgtctcaagaagagatagacgccaggttttctagcaacagacgaaggtgaagattacactgttcgcttccctatctggtcctccgcaaggaaaacgcccagggatctctcgagacgaggcagaacgcaacccaaacgtagacacggctctcatgaagaaaccggaagtgcgagaattgagaaaagaaaaacacaaacctgacagctccgttctcggtctctgaaaaggtggatgtgatgatgggcccagcgtccatctctctgaggtaagtagggaacagaagatgaggggaaggagaagtgtgaaccaagaaaggacaagacaagggacagattcaaggtttcgtctgtccagtcagatgaaggtcaaattcggtgacttgagatgagttgacttctcaattttgagtgcgtgtcgggttgaaggagttctttgttgtcttcttcttcgtcgtcgtcggtgtgtttggagatgggctgaaagaaataatggtgattgaattacaaccgcacagcaaatcatttatcctgtacaacccactcaaaaatgctcttgctcctctctcaacacttatcatctgaatcatcttaaatgagcacaatgtcatctgccagaaaggatgttttcctcgatccgcgcatcatgccaggtcggcacgtattttacaaacaatggttgagagccaatttaaaatattcacatcaatcggcttccggtcgtccgactttactccatacaaactccaacactcttttctgctctctgcctcccaacccttcgatctgctcaggggtctggtcatctgtattaggctagtgtcaatatccagatcgatagtaatagaccacctcattagctcagactcgtttccaaacagagataagcctcttggagcttacccgttctcggtccgcaccggcctcgataagtatcaccgctgtcgagccatgaccgctttccaaggctaggtgtaacggagtgtttcctataatccaaaacgtgagcccaaacaatattccgcaaggagggcagataagtgtaacgcttcaaggaaaagtggcattcatgaagcatggactgaccgatccggtcttgagtattcaatctagttcgctttccatcttttcctccggctagaagcaattgtacaaatccatcagatccagtcgaagccgcccgatggagtggatgttgattcgctcggtccttgatattaatctaagcgtatgatgaaaccgattttggtaaaaggagcagcttagacacggacatatagatgcagatatgaatcagtgcactgacatcagctcccttttgaatgagccgacgtccaatctaccaaacgtggacaggaacaaagtcaatctagctatctctctggatgctacaccagctaactctacattagggaatgtcttacttctatacgagcttttgaagcagcgtagaatctattacagggcaagtttaaacgcgatctatcttcatgggcactatttcagggctatgagtgagaagaaagacctacagcgcgctctgacccttgtcgtttgtcgagttagggtttgctccagctccaagaagggcaacaacattagcttcctgtcccgatgagactgccaaacgaaggcataggccaggtgattgagtagaaatcggtgagtcagtaagcctgcaaagcgtatctacagaagcaaccgcaaaccagattcatagagggacgaaccggcaatgatcaaaggggtgcttcctcctgcgtcttgagcctctaagtcaggtgcaggagtgtttttgagaaggatctcgagagcctcaagcgaggtcgacgacgcggcccagtgaaggggtgtcctaccgtcctgttcgttccgatcgatttgagcagttgaagctcagaaaacattttctcggacaaaacgaaaaacgcagtctaggcaagcgaccatgacctacagtatctttagagtggatgacctgaggctctccgttcagtagagaccgtataagacccggttgacctagttgagtttcaaattgtacgatcgattttcaagagtgatgtaccacgttgactttgattcagtttttactcgtatatagcattgattccatcgacgagctaggaatattaccatccatcgccgctttgtgaatacttaagccagctaaaaggataggagcacagcaatcagtaacgtcctcaacgagcgaatagccttacaagcgacttgagatacattataacccaacgcttacaagacatgacgacaacaaaacagtagattgacggatacgataagtcgagatgaagtttgttagcctggcgactgtcgtcgtttgtgtagatgatgatgtggaggacgacggccatctaggatgatgtaagctgcgcctgacgctcagctcccacataggtctgagccttctctcagcctaacacgaatttcttgcccatcttgattgttcaactttccatccagatgttagcgagcagcccaatctctcatcttccaccttctcgtcggtccaacatcagtcgcttctcgctttgaaagtcttgtgcaccacacgttaaatcgacatcgtaaacatggtcagtaaaatttgttgttcgacattggcttcgtcctcctagccagctctcgagcaggtccatcttttcaaaacaaatgaggaacatggcctagttgagattgagtcatacacctttcccatctttaaagtcatgaatcgagtttatatctcactttccattccagataaaggaaccagatattgactttttggtttaaattatcgtctctctgctctcccaatacgaattctgctccgtgataatcaaccattttgtaggctactccaaacgattgggaagttcggttctcgaagtccaagtcgcttccttacttttactccccctcgaccggaacgtctgtctgggaggcaccagctcatttgtcccacaatcagattgctggtctgcctggagctgcgaattatctgcgaggcgcaactagcagaccaactgcccagccgtccggaagttcagaaagctctgggccagaaaaggtcagggctagccatctgctgatcaagcataggggtagcagaagggcaagcagttggaaagaagtttgtcccaatctcacttgaaatcagaggtttctttttacacattggtcttgcaacgatcatgctgagactccgattgtatttcctattgttgatccttgtcttatgttttaggcgaacatcacgcgatccaaagaggaggccatcgctattttgagggaatacagagacatcttggccaaagatccgtctcagttcccttcgctaggcaagttccctttcccaaggactccttattctgtaccaacgtcttgctttctactatcataagagaccgacacttactcctcaagtttcttcctcgcatatatatgaacatggtgctgatgactttccccatcaacaacgtacgattggcatccacagccgctgccgaatcacactgctcatcccacgccaagtcaggcgatcttggatacttctcccgtgggcagatgcagaagccttttgaggacgccgtctaccgactgaacgtaggcgagattagtggaatcgtcgacacggagagtggcgtgcacctgatccttagaactgcttaacatgtcgatctaacggtacatgcgcgcatatccgacaccaataaaggagacctctctctcctccttctaagtcttcttcctcttcttcgtatctcatttttaattgtatctgtttcttttcaaggtctttctctctttcgacccttctaccacatcgatatcgacagacattctggacgacccgcagtagccgcctatcgagcttgagagttgtagcgcagcatcagtttattcagcatgaaagatcgtatggacggcgaccataatattccgagtgagtctagacagacgctacattttatatcattagaaaaacaaggggggtaggtgaagcagtcagaagtctcaatgactagaagattgaaaagggtagagagtaaagataaagaaagaaagaaacagagcgaatggatccggagaatgaagaaagagaaaacaagtggtcgaaaggatcgtgcaagaaaaaggcaaggtaagaagaaaacaagggcttcgatctctttcaactaacaagaagaaagaaagagttgag

SEQ ID NO: 661 - DNA, 34712 bp, Xanthophyllomyces dendrorhous
gtccctaggtcgggcgaacgcatcctccttcctcacaagcctctcccactccgtcctcctcttcatccggtctgctccgaaagaggggaggcaacagacatatcagatgtcgctgtaatcaaggacgaccggggaacaatcagcaactcgccgtttagtcttttctcccacatgcatcaacaaaaatatgaaggcaaataacgaacctgtctgagctgtgatcagagtcgtagaactcgtcctcatcctcatcatccaaatcacctaggttcgacatgtccaccttgtatctacacattccaagaagtttcacaagcgaccagaacagaaatactgatcagctactgaaactctgactctggcgcaagaatgtgggaggtttcgttcgatgtcactaacctgagaagaccaccgatacctccgaatcccttgcagaactggtttccttcctgtgatcggttcgtaacaaattctaaggcggctccgaagtccttgtacttgtcggcaagccactcgagcaaagactgtggttcctgaacattctccatctcaaggccggttgacttgtcgagccacttggttcggtctttggcctgctcggcattggcatggataatgatctcctctgtaaagggcaaatcacgataattaaaagaagttaacagtggagagaagatatacgcatgagcgcaatgttgataaaggaggctcagaaaacatcagaagaatttaggaaggacaaacctccggcagcgtttctcagcacgtatcgcatcacatccaagttctcccaaacgatcagtgtctcgactgcacccatctccaaacccttgagactgtcttcaataccaaacacgaatcgtccagtatcgagagcaatctcgtcgaagtacttctgaataagcttcttctcttggacgaacttgacattagaaagcgaatcggaagcgagatcgatggcctgatgtgtcgcagagtaaccccaacatcaccgtaggtatcatatcagaatggactcatgaatggtagaatgcatgacgcgagagtagatacctacctgagagaatccctgcagtccaccgtaagaaacatcgacgacggcaatgaccttagcgaccaacctctgatcgaacatatcagacaggttgagctcagacttgaagtcggctgatccagcaaggacgataccctggacgttgaccttgtcgtcggtgatgaaatgctggacagagtgttcggcgacctttcggacgtagttgtgtcgggcctccatacgaagacgggagaatcgaagagcagactgtcctcctcgtcctattgggtgcagagaggagtaggaaagacgattgtgatgagcgcgcatgaaacggcgccaaagatgaaaacatgaaaacaaatacttaccgtgcttctttgggaggtcaacagagaacttgtgaagaatctgtcgggtgtttccagaaagggtaccgaaaagctaccagatgatcgagaagcagatgtaagcgactctgagagacagaaaaaaggatatgagttgaaaaataaattgctcacagttccagaaccatccataatgatgaaaccgaacttagaatccgaatcaagcaactcggaaagagcagcagtttggaacttgttgtcacatcggtacaaggtgctgtaaccaggacaagcataagttcatgctaactttgtacgtttatttcgagtcacttgcagagacagacttacgtgttgataggcttatgaggctcgaaatcgaacgaaaccttcttctccttaccctcatcagtcaagatagttccaacgtagaggacaagtccgttgggaggaactatataacgttgacaagcaagaggcaaagataagtaagtaggtatcacaactgtaggttatgcttgtgtaaaccctaagaattagcgccaagaaacaaattggaggctgacctctgttgtagagcttaagcctggcctgagcagaagaaatagcagaaagaacggaaagtcgattgactcgagatttaatgttggatgccgtcccgtactcgtgcgttaacatggcttgggaatcagagatggtggactaaaggtttcgaatgatacgtcaaaagttctaatttagtattgctgatcccgaaatattatgatccaattaggaaaaagggtgggggtggagaaattatctgctaggtaaagcgagagcttggaaggagagaagaaattgaggtctcaccccgggcttcatgatgagcgaaatcatggaagttccgtttcctcgagcgctgtcgagcgacttgatgagctttcgcatcttccagctatttgtggagagagacaaaggagaagaggaataagctcggcgtgcataagattggctatggtaatttgcctagagtgatattcttgaggtcagggacgtacatctacagaacgatttcccagattcaagggtatggagaaaataattcaaacggtaccagtcggatggcttgtcagtttcgatacttgagatgaaccccgattgagctgctcagatagatgtcggaagagattgtgtacaagtggaagaggcaaaagtaagaaggaagaaaagctcctagagcggacgaacggcgatattctgctcagccacgtcgacagtcgaagcagcactagtgaattgactctgaacgggtgttctctccatcttgtctaagggatgatcctatacggggaagagaggaaagaagaggaaaagaaaagaaagaaagcaaagaaagcaggaggttaatgggataaagtaagaaagttgggagagaggcaaaaaaagacaaaagatgcttaccgatatagatgaataacacagatgttatctaagtcgttttgtaaggttggtcttacacgtctcgtcctagttggacgctcccactccgtcctacactcaacacacgcatccattcacacactcacaaacacccatcatcaatataatgtctgagcagccagagcctaagccagagggagagggaggacccaaaggagagcctattaacatcaaggtcagtctaacgtttgcatcgtgttctgtttttatcatactttgcttcgtcaactaggcagccaacccatcgcgatgttgacctgtttaaacgcgcttggtggtttgcggtttttttttctctttctcttcttgtgatgccgtgggtacctcctttaggttgcttcctctgatggaaccgacgttcactttaagatcaagacaaccacaaaattttccaagctcaagtcggcttacgctcaacgagtaggaaagtcggtgtccactatccggtcagtttccgtgttcttcttatcaagtcttgtcaatctcgtggtgaagagaaggctcacgcttcaatcattgtttttgtttttgtttttgttttgtaaaaaaaaatcttatctggcagattcctcttcgatggaaccgctgttggagatgatgacacccctgcatcgttgtcaatggaggatcaggattctatcgatgtgatgatcgagcgttcgtttcttctcttttaaatatactgctttcctcttttctccgaactgacagaaattatctgtttacctttgcatttttcacagagatcggtggctgtagacgaccgtcactataggctatatcagaaactgaaagagttttttgtctgtttttgctataactaactttgctcaggagagagtaaagcacgcctggtcatgaatgaaatgtatattttcgacatgtgttcttgcaagattgatcaatcagcacgccgtcatgacaattgtttgagtagttcatccagattttagggtattggtcgctatctttacctgaaaaatgactgaccctctatggaacgatagataagagagtttctcagaagagtgcgttggaagatgattctccgttctgaatgatatttttctttgtacgcacagacatccacctatgaatgatgggaagaccattacgctcatggcattctcccactttgtttctatcataagatctgtatggctaagagacggcatctagacttggtagtagatcgcattatcatgaaaaagatccgtcttggtctctatctacagttgattgttttcctatagaactactcttcagcctctactcgttcatttctcttctcatgatctcactcctaactctattgctgctattcctttgtcttgtaatctgcgttttactccacaggtttcattcaaataggctgatgacggacacaaaatcaacatagaataatggtaaatcccatagcatatacatcggttcctcctcattgtgcttaattctcgagtatagacacacagccatctattcaccggtcgacctcaacgcctaaccctagctccttgcccctcctaaagacaagattggagatagcgctgagtgaacaaacaggtcaaagtacttgagttgagcggatcatccaaacgtgcgcgaaaaagctaaaaggaattgtaacatacacatcttgagttgccagaccaacctaagccagcgtcaaaataaaatccgaaaagaaagtcaagattagtctgaatgttgcttcaaggcaggaagactaatcaaagattaaacgaaccgatttccagacagtcaggtcaccttttgtctgttcccaaagctctctgccctttcccggtgttttaagaacactcccgacctcgcatacttgcccttcgaatccctgtagctcccctgcctctattttggtctccttctcgccatcgacgaacacgatgccagctcgagtggaaagcagactcggctcaacctctagcatgaatggtttataggagccaatgagagagatatgcgtcccagtctgaggctgagtagatgggaagagaggggccgtcgacggagtactaaccaaccagtatgaattgatcaaaatacgtttatatcagaagctgaacaaatcgagttcgacttggatcagaagatgacaaaccagcaaagaatgatgtttgcgttgtgaacagcctgaccccgatcatagttctcagtactggaatgctccaactgaacatttggatgaaggtctcgaatatctgatatcagcttcttcaaccgatcgttcggctctgtagagccaggccgagcaaggaaggcaacatgcttgatcgacggaaagagtagcaggtggaaatgagtgtgccctgatcgagtttacgagaagaacgtagatattgatctatgggatcagaacttctataggtatcccttgtaacgacgaagaatcaagatggaatctcacagaatgcttgaaccccagttccaaagactaccatcttttctcttcctagtccttcccccaataacatctgactgacgacagcgctacccgcagccgttctcactcctgtgagctgacctgctccaattaccgcgctgacctcccctgtgtcttcatccagcagcacgttcgatgctggcaagccttggccgttgtcttttccttcttttggaacagacacaatcttgcatgcggtgccccctaaagcagatgctcgggaaggcataaacaaagtcgtatggttgggcaaagaaagagctagtctagcaggtgtctgaacgtcatcatttgagttcgatggagaggacgaggaaaacgcttggaaagcgtctgattgagaggaaagaaagtctgaaagcgagagcgagagaaggatctgatccacatctttagacgataagaacgtgatcttgctggtcggcttggacgataccggaagagtggacgacgccgcaggcttgctatcgtgagaagaaatagtctcccaatcactcgataaaatcggctttagttcagtcatcgttcgtaccagttgatgtagccgaataaagaagagagatgtaggcaagtggagaagagtgataaaagtgggaaagagtagtgagagtggaacggtgagatgagagatagtcgatgagacaatcagctgataaagttgagataaggaaattggaattttgaaatacgtagcttcctcgcagccgcttgaacataacgtccaacctgatatgtttcatatctcatttctccggcattatatacattgtgttcattcatagatattcagaattgaagaggaaaagatgggtcgtatcgattgtatcaacatcgatgtctgcagtgccgtggccctcattaatacattgaggagatctagaaaccaagcttgcccaattgtccagtaattccacccacgctacctcctgaaggtgaggaaagagaggaaagaacagcgtaagcaagacgttgaaatttgtgctcgctggctcagagggaggaacataccagtagcttcccaaatcaccaatcgtccgtccactccactgctagagaacttgacaacctctccctgctcattccattcatagggtttgagagaggtgatagtgttctggtgtacagtcttcagctcggttccccctccgtttccaccttgagaacctcctgcacctggcccggctccacttgaagaggacgcgcccctcgagtcggccgaccggaatgtcttgaatgcttctgagttcaatctacctactcctccggaaggagttagaactccggatctgtttcctcctccagcagacgaaccgtcgtcaagagaccgctctgatttccatccgccgtcagccgatccggtcaaaaggaagggctggcaatcatgacctgctgcgacgagagaggactcggacaaccacagaagggaagtgtagggaaggttagtcgatcgaatcgtgtggactgcaaggggaggagagtcaggctgatcagcgtaaatgatggtgaccgtggaatcgtggcctgaagagaattgaaggagaggaaggagaggtaccccgaaatcggctctttttcagcaatgtttgtttgcgagagatataacggtatgctctgatggaagacgtactacagaatgcaaccgcatctccgcttggagagaatgcgatgtcgtgaacccatccaccactcattgagccccattctccacacacggcattgaaaggtaacttggccccccagatattggccgagggcctgataagattgagcaaataatcaaggttcgcatgctgatttagaatccttcttagatgcaactcagatgagaataagaaaccgagagaaccgacctagactcaacatccttgatccaagcggagaatactctggccttcatgtccgcacttcccgaagctagcaagatgttgttcgggtgccagtcgatcgaaagcaccgttgaccgaattggtttctttaggtgcttggctacccaccagttgttttccgcatcgaacgagcaaaccgcaatgatccttgcaccggaaccgacagcgaacttatcctcgttgggactccatttgacacatgtcgctgcccggttgattcggagaaggaccaaagtcggcttccagacaccctccaatgtttgggaccaaacgtacgcgtttcggtcctgagagcaggtcacaattcgatttgttcgaggagcccaatcgatagaagtgatcaacttgtcgtgctgtttagatcggtggaagcgtctttgatatcagtattgagactgaatgaacctcaaagttgggatggaataccagagaggacgcgaacctctgagagtgtgtcctggagctcgaatccgcctgaagaagatcgactgtaaatcttggcgttgttgtcgttctcacaaataacaacctctagagaaaagaaacgtccaatctacgtttagggatccgtaccaatgtttgttctttccatgttatattcaagaagagacgtaggaaactaacgagatctatcgggagagaacgaatgagcggtaataggtccactggagagatggaagctgttgtagattagatggcaaaggtgatcgaagcagagaagatgtgtatcagcatgacagcacttctcaacctacacttgtctacatcatggccagaatcacttcaatcagattctcagacatctctatagaatgatcttcactcccaactcttcaggactgtaacctgtgtgattcgaaacatgataaagatgcgaacataaaaacacctacgcttcgggaggagacatcgttgggtgcgagcaaactatgattttatgggtttttatatcagactattgattagaggactctatcagtcgactcttcaagtatcttgcttggctgtgctgagaagaatgatggtgaggagacggagagactgaaagaaaagagagatggctgggataagatgagtgatggatgtgagcgacggatcagaaactcctggtcacaaataattacatcgaaggttacatgacgaacccacatgcaccgcctagacgacgtgctgccccaaccctaacattggccacccctcgttccttatgtttccaactcaatctttcgagaaatataccttccgcccctccatcacctaatcctcattatgtccgagcctcttgccggtctcaaatctctttctctatctgatgagtctggaggacccaacaatcaactgctatctgatgctgctgctgctcaagttgacaagacgagcgatgtaaaagattctgaaagggaggtcgtacagcaacagaatcaaccgagagccaggttggtaggaccggagattgtccagctaccaccaggttggagtgatgacgagtcggaaccggaggaagagggtggagatgaaggtgccaggaccgaggacaggaatatgctgacgagtctggacgataacacagatgtctgtcttttcttccgttgttggtttgttcagtagtatctttactgacttctgtttcattaaacgcaacgccgtcttctcttcatggtgaaacctccatcaggatctagagcttacccattcgtctctcgactccgagaaactactcgagcttgaactgcctcggtttggaccgtatctgaagagactctgtctgcgtcaaaaccggatcacctcgctagacgaatcaatctttcaccatctgactgagctagaggaattagacgcatatgataatcgtgtcggtgttcttaaaggcctcgaaaagtgccctaaattgaggtaagtcaaagcatttgactggcagcgaatacagacccactaacagtatcctcactttgtcacaatcagaatactggacctctcattcaacctaatcaggtctctcaacccttcttcgaccgaccctcctcctctttctgcattcaccaagctagagactgtgtacttcattcagaacaagatctcattgatagagggtctcgagggtctgggtcactccttacgcagtttggagctgggtggaaacaggatcagagtgagtcataatctatcgctacggtacttgttagaaatcattatccaacttacatgcgcgtgatgggtcacaggaaattagagggcttgataaacttgtcaatctggaagaactctggcttggcaaaaacaagatccgaaagctagaggtacgcctcgtttcctttctttggaagacttgttgtatccctttctctcgatccccttcctctctaacatttactcctatcgattttgcttgcagaaccttgaaactctgaccaaactcaagatcctctctctccaatcgaaccgaatcatcaaacttgagaacctttcgtctttgaaggacttagaggagatctacctgtcgcacaacggcgtgctgcagatcgagggcttaggagataataaaaaattgagagtgttggacttagggaacaacaggattgaaaagatacagggcttagagaactgcaccgagctagaggagttctgggtaagttcctcctcttgatacatatgaactcaatactctgggtgtcaatgaatccccatcccgtctgtgttcggctaatggcaattcactttaccaggcgaacaacaacaagatacccaatctgtccaccctgtctcatctggaaaaacattcgcacctggagactgtttatttggagcataatccatgtcagactaatgatcaggccggttacaggaggaaggtcagtccggattttctctcttccctcgtggtcattcacgttcttacttgtcgggtattctaacggcgatccgtctgtacaaactaggtcattctgggcctcccacaactcaagcaggtcgatgctacctttgtgcgataatcacagctccaatttaactagaccccacctgagcaatctcctacgtcccgttctacatttctaacacaacgcttaacattcttgtgtcgagcatgtacatatcatctttatctggctctgccacatccatcttggttcagctcaaaatctattgtagattatcatgacccttgtgatttatgagtgatttgacagatctcaagtctgccgcaaaatcaaatatatatatcaaatatattgagctagattgtgcacgtccatctcgactgccgaaatcgcactgtttctccttccttacactcttaccatctctagatttcatctgcccgtcgttccgtccttttatactcaataatggtatgtcatattgttgataggttatctattaaattatatgaagggtaattcgctagtactgatgaacggaaactgggttgacaaaatagtctgctcaacaatctcaaggaatagccacgcttctggaggtttgttcataatttcttcgtctccttgtttcctcatatctttcctccttttcagtagcaaagaggcaatctgcctgtgaatgcatgagatctcaagtgaaataagatagaaaggagactaaagctcatcttccacaatatatggaacttggtctgtacaggctgagaaggaggcttctaaggtcgtccaggccgcccgtcagtgtaagtctttcccttgttcattcagttcaacgcacccctcttcaatcttctcttgaggatcagagcgggttgcatccccttcatgctcttctcttatttctcctatagctactaacccaatatgagttgcaatggcgtcccggtgcagaccgaactcaaaagctaaaggatgctcgaaccgaggccgcgaaggagatcgaggcatacaaggctaagaaggagagcgaatacaagacatttgagcaggaggtaagtaatccgttcgatcattatcatttttatttctttcagaagagttttgcaagagtcttcccgacagatgagggagagcaaggattgttgtcaatctcttgaatctgaccggtgcttgaggaccgagcatctatgcaattcgaagagggttgagggatctttactatcatactgttcgaggtagtcccaaactaagcagatggaatgcactggaggttgagcaaaatcctatcacgataccacgggctgaccagtctgcttcactcgtcggcacatccaatagcactccggcagcaccacgacatcacagtccactatcgatagctcaaccgagtcagtatcttcgccttttccatcattcactgacaaaaatagcgtttgcttcaagctgactgtcttgttattaccttgatgcatttgaaaatgtttctttcaatctaatatccatctcccccttttatttctttcatcatcgatctctctaaatcaaaacctctcacggctatcacatgcaggcaatcgcttaaagacctcgaagagtcgttcaagaagaaccgagaggccgtagtggaaaagttgcttgaccgagtcgttctcgtcaagcctgagctccacaaaaacttgaagaaggtcgaggcatagatagacagatcgataaacgatcaggctcgcacgttcctcttctttggctcctttcctttccccccctttttttgtatcctttttccttccatcatccacttctctgctatcgatgggccctctcctagtattctgatttatttgctgttttgacgagggccttcggctgttgacctagtcgttgtaagagtaccacggtttatttacaactgacggtatgtctagatcatagaagagctagaaaaatgctcttgttgtcgtcctttgtagtgcgacgaaccaccagatgattcaacgaccgtctacaagtcggaagagaaaagagtcgaaacactgatttacatgtcggatggataattgtcgtgccgtgtatgaataataacacaatgtgaacatcaaacagagatgagaatggtagactgagaacacaatggtccgaaaacaggtacgcacacgcagaacgcgcgaagtacagagagagaagaaagaggaaaagagtatatggaaagcagtgatgtccttatatatagtccaacatgatgaggtgaagtgaataaggaaagaccggcagcagcggaaagaacaacgagtccaaggataagcatagaactgagcgaacagaagcatttatgagaaggaagatggcgaagcgatagtgatgaatgagagcatgtctttctcttgaaggatttatgattggtggtgagggatttgctctcgaaccaatctgttacaatgagatgtaccgaacagaggaagaggatccattcaaaaccgttagttagcttggtcctgacatcagaacttgaaactagaattggtgaagcgagatacgtacttgagccagacgctacccctggtagatttggatccaacaatctcccatggatgtcgatttgcgaaaggactactatttccttcgggcgtgatcctattgagtatctcgtcccggcccttgatgattgcacagccataatagaacaaaagatatgagcatttcaaacagcatggagatataaacaacaacaaagtgaaagaagaactcaagtaacaaacctcttttgttccgtcggcttctaaagtgaccatcgtcccgttccatgggtttccggcttcgccctggtctcctgccgcctttcttttccccatttcactctctctccactctccaacaccgtcgtcctcattatacttgctttctccaatataaaatcctgcctcgtggatccacaagtcaacgaataacgtttgaccagatgtactgctcaactcgtttcgttgatgggcgagtctcaaagaagctcgaactgcttgctcgaacggagagatatctagaaacacgatatagggcgcaggaagaacggcgtggaagtatgttggtggaagaagaaacatgtccagtgttggaggaaggtggcaaggtcggaaggggggaagcccttgcgattgagcaggagagagagccatcgacctggagatcgtcaaagtactatgagcggaggagagaggttgtaagaaaggaggaacaaagaccatggtgccagtcgtccacccgctagggtgggtcgtccgcctaggatgactgatcgctagattctcaaccagatccccaagtttcatcttgcttaatagtccggatctagctagggcctgatgacacaacttgagtgctgatccggacggccatcgcacacctgtcggaagagggactacaatctccaccacaggagctcggttgtatctgtagggagatgtagctgagagaaacaatggttcgactggttgaggtgtcgacgcccgggaagaaggcgaaagatacctccgtccgacaacaaagctaccactttctagagaacttgaagatgagggggagctcatgaagtccggtcgaggtactccgccaaggaaggacgagttggatccaaagggactcccttcggccatggcttgagatagatcgtttatcgaactatcaggagattgaatgagtccattagatgcattgctccatgcgagattcataaggctaggcacgggtggagcatttggatctggatagaacgttgagtgcgatgagggaattccatcattaccgaacgagggatttcgttgacgctgtagaactgacggtgagcctccactggagtatactgaaccagcatcggataatccggcaagatctcgtcgggttggtcttcgagggaacacaggttgctgggagaactcatatcgtctgggttggggatgaatcgaagggggaggggccactcgaatggatgaatcaatagaaaagattgaggcagaagaggaaactacccgaggtgagccaaccgatgtaggcgacagatgagcctggccaccactctccttgccaggaccaagtttcggtcgactcgcccaagaagcaacgctggacatgctactccttctgttgattcttcgtttttccaaagcaggaaattggttccagcctccgaacgggtccaatgccgactgcgaaccgtttgctggcaaaaacatgggtagtagtgcaggagggggagccggtggttggatagaagtagcaagtggctgggggaaaacaagctcttttccgttgcgaagtgtccgagacgaaggaggaagagacgtatgcgcagggaccaccggttcgatgatgcaatcctcctcttcgaatgggattagatgacggccaggtgggggaaggcaggcatgcgatgcacgaagaaggagggtgacgagtgatgtgcaaaacacttgacgaggagatagctgggtgttgggagggagaaggagcgtggacactacgtgtgtcgagccaagccaagccagtcaagccatacaagccatttagtatatacatatataaacgacttcaatctgacaccagaactagcagtaaacttacaaaaatctacaatgattccatttcccactccatcccacccatccctctgttcaacctcagtcagagctcctctgatatagcctgcccatccaaggccccagactctgatctcctctctagcttcaggggtttggtcgagctgagctctcgtgctatcctctagagcatcccacaggctgaccatcgatcggatgttaagactgggtagaaatgcgcgaaggaaccatggttccgtgactacacttagaaaagatccgggcagaacaaaaccatcagacaatttagaattttcctccccttctccattttcatcgccatgttttatgccgtttccatgggcatcaaaggtcaaaaagttcatgtccgaagacagtgactgggggatagaggcaactgtcagcggtgcaaactcattctttgatgcgatatattgaccatctatgtgtgcaggctgagccgatggttgatgcagcggtaaaccagagacctcagtaagagcgtgagatataggcgacaacgtataattgaatgttgggccgttctcttgatccggtctcgaaggaagagggcgattgtgagaagagccaaacccaatagacagcgggggcagttgactagtggacatcctctcagtgggtttcaaacgttgaggggaatcaagggaaggggaatagagcgacggctgggcgaatggttgagatgttgggtgaggaaaagctggagtagttgagggatagtgggatgcaggaggagacatcaaaggtggaggcacgactagctttccgatctgactatccagtcttttgtcatcctccgtattctcaaccctatcgtcttcgtctccgctaacatcagatccatcgtactcttcatctctaaagctagatccatctgaggagacggagtcgtcgatcagcgaagactgcgcgcctgctggaaatattctaggattcatcagcgagggagctccaggaagagcattctgcagcgaccgaggggcgccgctctgatcaagagccgtcttgaccggtgtgttgccgagtatagacgagtcgtcttggctgagaggagatgggtgtcgagatgagttggtttgattcggaggcgaggcgcgctgtccctggcgagaaggttgagaaacgggaagcgagggggttcggaaagacgaagggggcgacgaggaagggagggaacgggaggatgcgatgacaacggcctcaaatcgtttgctaggaggaggagtggtcttgggttactttgttggtgagttattgtgatgaagccgagttgttgttgcaggaaacatgtctggtcaacccagatagacaagaacagaagtctgtttcagccggtccgtcaacgtagacattgagggaatgttgatggtttgatgagaaggcaatgagaagagaaagaaaaagcatgcctattgaagtatcttcagacgataccaaggttgaacatacctttgttaagttgaataacgatgagagtcgagagatatgctctcgtctcactttttaaccgaaaagaaagttgacaaaagaaagtatgaggaggatgctatatcattcggacagccagacggtcaagacctaaaacgggatgtttggaggatggacgcgacagaggattctcagcaatgttcagccagacatccggacgagaaagttaagcagaggattctactagatggaacctaccaattctattctcgttccagagaatgaagctaactcaaccgagcgagacagggaacaagcgaagaagggagatggaatgaaggttagaaggcgaacgagaccgacagggttgaaggaacaagggcggtactcgtgcctggtcaggaacggaaaaggaaatcaggggcaaggggtaaaaacattggtcaccactggttacggcatgtgcatggattcacgtgcttttatcagacttaggtagttctacctaaggtcgcctccccctcgctctgatccctccacgcagacagatcgttcgtccatctcatcatcaacgccaacacccacacccacactctcatatactcgcccatcatggatcactttcctctctcctggggcagaccccgtaatgaaaactctcaggacatgttcaacgctgcaccgatgtacaaacctcaagactgggaggccaaggcgtttggtcttgatggaggatctcacggccagatggatgaaatttcacatacccagtaagtaagcctgttttggctgtcggcacataacatctttctcgccctccctctttccggccggaagttcttctctgtgtctcggtgcgctcgtaagctctagtgcaaagcctcctttgcctggtttcttcgagtgttctatatcgagtctttcagagaatcgaatctggagtcgccgagcgtgttcctttccgaaacaccactctattctgcctctagccgaatcttctctcttgttcactctttcaagaaagagcgagacagatcttggttaagaagtagaaagagcggtgctagggcaagaagcttggtgtcggcaacaagaaatatacattggtggttgaatgtggtagagagccggttgcgagattgacatcggaaggagccataccatatcatccctccctctactccgttcttctactgctgctttctctctacagaaagaccaattttcagggctattcaggtagttcagaaggagtcaggttgagaggcggattagagtggctcttactgttcccatcttacattttcctttgcctttttcattcttgttcttctttcttccttagcctgtgccttaaatcatctgctcagaggctcaacagcttactcttctttccttgctaacttcgtggacgggcaggcaaccgatagtaactggaacatccgtcctcgcgctcaagtacaaggatggaattatgttggcggccgacactcttgcctcgtacggctccctcgctcgcttcaaagatatcgaaaggcttaaaccgattggggactatactgtcattggtgctggaggagatatgagtgactttcagttcttggaaaagacgctcgaaggcttagtgtacgtcttttcatttctcattttttgcttgtaataacaagacgatttgcgtccagacctactactctttgtattaatcatttaaaaggatagtgctaaactgcatccttttaactcttttggatgtgctcaatgaaaacatcgctggcttgcagtatagaggaagctaatacatccgatggacataatcttggcccaaaggaggtatattcgtatctgtccaaatatatgtacgccaggcgaacaaagatgaatccattgtggaattcattgctggtgggaggtgtcaagaacggagagcggtatgttggacactccttaccatttaccatttttttaaatttaaatttatatcttcaattcctgtcgctttggtctcctcagctcaacttataacatcactctttctttgctcccatcattgtctaaactagttttctcggatatgttgacttgattggaacaacttacacggcttccaccttggcgaccgggtatggatcatacatgtcagttgttcttcgtgttcctgtcgttctccaaatgtgccccacatccagctgattgaattaagtctatacacatctcacttcttcatttaaatcagcgctcaacccttactccggaaagccgtcgaaggaaacgaagacacgttgacgagggaacaggccgagcaggtgatgattgaatgtatgaaagtgctctactaccgagacgcccgatcgctcaacaaggtgcgacctctctttccaaccgttctcttgatctttcttatgatgtcaagctcatcgtctgatctgggctcttcctcctcttttgattaacagttccaaattgctaccgttacttcggccggagtggaaatctcggagaccatgagcgcaaagaccgaatgggcgttcgcggagaagctaagagggtacggtgctcagacacagtaggtagccagatcgagacggtagtaacagtattagaactagcaccaatcagagaatatgactctcttgaattctatctcccttgttcgaggaagaagattcccatgtatgtttccatttgtttgttcagactgtacttgtcatgaaagtaaccatcagaaaatcagacggacgaatcaaacataaggagctagaaaacataagaggccaaccataaagtatatatgcatcagtctagattacaggacaattaagaacgcgaaacgatcagatgtacaaaaagccgtggaagcgcatcactaagggagaaattgagagaagaaagatgaggacaaagaaaattatagagaaagcaagtcggaaacacgttgtttcttaatacaagggtatcaagcactctgaagttatgcagcctgatgaacggcgagcctagtctctaagttccggagactttcctccttggcaagctgtcattgaacatacgttgaagagatggtaggcaagcgattcagcctctaccaagaaatcagacagaaaataagacaacaaaagatgagattcgtaccagctcttgccttctttcagcaatctccctctgtactttgatttcgatctctcggagcttttcttcttcaatccgaagctgctcttccttgagtcgaacggattgagaagccatatcctctggcaacatagatgagtcactaccaaagtcgataaaaacagatcgatacggaaacagaagtagagttaacgatgactttgttcttagaatcttacaaaaagtgtaaatagagatttacgtacccagtatccccaccctctgcggttcgacttagcttctccgttcggtagttttcataaagccagtcatgtgaaagctccttcagttcgttcaaatgagatccaaacaaggccgatctaagtctagagaagtctgtatgttctggattatcgatcctgttgtatccatgattcaacgatccacggacggaaggataaagaaacaagtggtcaggaaacagttccttttgtgtcatgttttgcaacagggaactcatactctacgacgccccaagggtatctccgaacccgaacaagttctccatcgatcctcatctcttcttcgcccccgacgatagaaaacggcaagagcttctgaagtgcgccatcaccaggaacaaattgttacaaggagttagaagagcaatcgatattggtcatgactcgggcgcaggatggacaaactcgaagctctctgttctcctgcacagtatattcgtcgtcttcttcagcatcgtagggaaagttgtatatcggaatagagtaatattcaatatcttccatgcactgttcggcatgtatcaatatcaagaaacagcgttgaactcgacttgacaattacagcaccttgaagtgaaaacaaagagacaaacccgctttttgaaagcccgcagctcagaaggagttagcgaatcagcccgaccaatgactgtcgataatttccaaatagataagcagaggccaagtaataccagtctaaaggtaattaatttcgagagacgagggattcaataacatacctggaatgatattaactctagagctaagctttctcatcagctcgatgtcgatctctcttaatctgatacatgtcataagcccgttccagatgatatacatcagtacgtaatgatatgttcggttccctaaggaagaaagacctcacgcatgactgaagaaacatctagttagtaccaacaactggatttgacatatacgcggatgtaagccgttcagaagaggaggcttacccagtaggttcgatgaaatagatcaaggcatgaactcgatcgtctctaaatcttggatttcgtttgatttgggactccatagccaaaactaaatggcattcatgaatgaggttcaacgaaaaaaagagaccgatgtcaattaggagcaagagactgaacttagacaaaacaagaggcttagagagacctcggacctactctcatcaaactgtttctccagataagatagtatctcttggaagctatgtcaaccagaccaaacgaagtttcaaatagctaggtctcagaagaaagctcaggcgcatataaccacagctgaatgagagacaaacttgtcttggttgtcaatgttgtccccaaatccaggggtatcgaccacggtcaacatgatctttataccgtcttcttcaagctctacaagcgcaattcgacaagtagaatagatgcatctctgaccgacttgagtttttgaccgaccgaaccatatgatgtaaggctgacgtaccaatctggtgttgtttgagtctaaccttggtctcaaggtgagcttcgttggcaggtccgatgtctttgtgagcctatatgcacgaatatgatcatcatttgaggtcgtgcgattcaaagcaaggtcagttccatcaagacagctggccatagaaacgggagaatcgacaaaccaagacggcgctttcacaaagtgtgttgatgactggttgaaaatgtggttgcaggatgagattcaatcaggcacataaggaagccgtcgtcacttcggatacaagtatcgactcaattaagttcaaacactgcttacaagtcgtccttcctgtacccgactgtgtgtttgtttcaggacaagaaagataatgttaccaataagatatgtcagttgcgaatgagttccctgtctggctcatcgcaatgtgcagggagaccaggaacgctatcagggagaacgaacggcaccgcagaccatgatggtcaaccctatccctttcttgactgatttccgtcctctagatcgactggccatggacatatcgctattaaagagctgagagaaaggttgattgaggtatgaaaggcgaaagaggggtgtatgggattgagttgggagttggtagtcaggacagaatcgactcgaggacaaggtgagatggccagctgaaataggaaaaaaggggctcgaggtttgagctcaggcacaccgcgcagctgtttggacccctgaatctcatccggacctgtcaacaaatcctcttctatacaatcaaagcacttatcgcatcgtgtctgtatatcttgaacgacaggaaacaccgctttgtaataaagatacctagaacatgagagaatcaaagctgttaaacatattcgagccatgtatattgttggcttcacttgcgccttggtgacactaaatatctccctcatcatccgttcctatcacaaacagatccatcatgcctcctcctccttcgtcttcttcttcatcgggaacaccaacaacaatccctccaaacaatccttttcctccgaaccttgcctgtccatgttggaattctgggatgaggccggaagaacgcacatgccgaggcggggtctctcccataaattctggggagtctggagcgaacgttggctgagatgaaggctgagtcaggctgtgagctgaatgagacgccgaagcaacaggttttgtgggcgttgcaggaacaagagtttgcggctgagactgcgactggctatttccttgattgaaagaggcattgagtgagggaccggaacgggagggaagcgtagacgtagacgagctgaaggaagttgaagccatcagcgtcctgcctccgaccgaatttgttctctccatcttcttcttcccatttacctcgaccttgtcaccagatcctatccctgttcccatttcagcgtcactactaccttttcttccaacagatacgcctctcgagaaactaacactacgtctcatcaatttctctgccttagtctcgggtccgacgctatttgctctgctcactgaactattcatagcgcctgttgtagatgaggttgaacctgaccgaacgaagcctgcacgaggaccgaatgatgccgatgtggaagacaacgaggatgaaagagagatgttggaggcagaccgggtcaaacccagagtattgtgagaagatgaatgcgtgcgtctgggaagagagtcttgagtgaggtgttgactggaattggttgaagaagatagagaaattgaggcggaagagcggagagggaattttgatcgcgcaagatccaaacgaacactggcgttggcgctcgagggcagttgccgtgctaacggttttgtgcgagattttccagttaccaaagtcgaaccatccccggtaaggattaattctgcagaagaactagaagcgagtgctacagatgaagacttattacttctagaggagggtattatacaatccatactcgtcgtggcaggttgaggcaggaatttcggccgcgatagatctgtttttgccagaggaggaaaactgagtttcgaacggagaagaggaatgatataattatgggtttgagagaagctagaatacacccagaagaaaggagaaagaagaacaaaaaacagaaaaccagagagtctcagcttttgtcgatcttaacgatgtcaaactgaagtctcactacttctccacgacgtcctcccaaaaaatcctgatccaatctctctcttccttgacttctcttcccttcatttgaggatcctctttcacttttctcacatcttgctgccggtctttctcagcttctccagtccctgcttcttcaacacctagagagtcaagcgcttgccaaacacttaatcgatcggtaagttggtccaaagacttggaaatgggatctactttcttggacgagagccttgatgatttgggatcggagcgagagcgcttttttggttttgagcgtgaaccagactgatcgttatgcggttctgtttgattacatataggagggggtggagagcttggaagaggaaggagaagaagatgaacaagaatttgtaggagagtcctgatagaggacgaagagagagaggctgttgatcaggacctgatacatggcttcagactgtatggggtcaaaacatactctctcctttccagtctttccagccattttttccccttctcgatccacctctcctccttctccctttctattcgtcttctctcttcctcctcctcttcttccttgtggtccatttccttctcaccctcttcgacgtctttctccttttcttttcttcttcgactctccttctctttttcaccttgagagccaaggaacagaccgaatccagatttcagagcgctccattctttcattcctaagccgctctctccatgcggtattttcgaagaagggttgactagagagggaagcagtggaggaagtattcgtttgtatttttggctcaagtccggaattgttcgcacaagcgcagacaagggcgatgatacatttctgcaggactcggtcgaggtttttgaagcgacagcaggaacaagatgttgaagtgtaggaatgatggaagatagagaatatatcatctagcgatgaggtcatgaatcgatcagtcccggacatgtacgaacaacattggaacaggagatgatacatacctcaggcatatagagagcctctctataatgtgacagacaccagtcagataattcatccgaatgtttctcatctccactgtaagaatattggtttatcagtctcaacaatgtgaataggctcaacaacaacgtatgaatagctaaacgatattgaatgaagtaagatactcactcggccgttttcaagtctccccatcctttgcctccaaattcgaacgcgattgtggtctgatctttcagtttttctggccattgaatcaccggatctgtatcgagctcccaaagatgatctgttcccgattgctcagatagacgtttgacaggtgatggtttagatgttatattgccgaaccgtgcctctaaggctgatgtcgagaacgctgttgaaaagacatcaggatcgactatggatgagtttgagttgtgggactgctggctccgttcgatgattctcatcctacccaaagggataagcgagcgcgttgtacggtatcaattgggagatgagtgaatggatggttgggatgaggtgccgtctcgatagggaggaaggtatgttgactgatcgagtgagagtcgattagtcagtttgggcaactttgattaggaaattcacgcgtcttttgtagtttctatagactgagttctttgtaggtttctcctttagccatccctctttctctttctttcgctcacgttcacatcatcagtctcgtctggtaatcttcatccatctctttgagagatctaatccgactctttactataaagatatcggacgctacctaccaatatggcaccaccattggcaccggctccaacgcctctcccagcaccaacagctcggccggcgaccgccatcaatccctctgcacctaccaacgcgacagccccccagcccccgccttcggcaccctcacctcgattacccgagaccgatccagcgtataatgaagtcgtgctttcttttttgagaaagagaggctaccatttggccgaagaaatgcttcgaaaggaaattgcaggtacaacaagttcggcatctggttcaaccgctgcctctgctgttgcctcttcttcgacatccaacccaacaaataattcttctatcaacgctgccacctctgtcacgtcttcaactggaggtggatccttcggaacaggaagtgcacctccacctccgggaggcatagctggcgctcctggatccagaccgatcaatcattccggtccaatgggtacacctacggctggctcgactcctctaaataaatccaacacgaccaacttgccaaatctaatccaacgaaacaatctgaacggaggtccatcaggtcggcctccgacacctggtggtggaaatggtccgcaaggcagatccggcacgcctccgcctgtgatatcgagccaactatttgatgtgatgctccagcatttgccgagttcggcattgacgacactgggtttgacaccgccggctgccactctcgagagagaacgaaaggagaaggaggacaaggagagggcgggacgaatactgaacggaccgatagctgcaaacgctatcagagtgttggagcctggggagaggattgccggatatgatgggctgagagcttgggtagaaagtgggttggaaggttggaaggttcgtttcatctcctcaactttgttctaaattcttcaatcttgacacatgagtagaaaagcggtcaactaagatcatcacatcgtatcccttctatcttgcttctcaggccgagttgagacctctgctgtttccagtgtttgtgcacacgttctttgatctcttaatcacaggcttttcacaagctggtaagtatattgatattccgatgtgcgaggccactgtgttcaaaactgatgctgcaggcttccttcttcgctctgggatttccagctcgggagttctttgccaagcatgccccatcgcataaacctttgcatgcatccaccatctccaccctttccgcaatatcttcctcagctcatatctcggcatctcctttagcgcgtcgatttcgtagtgaaaagtatgtgcttcgtatgagcaaaggtggatttggattgctggtaggctggctcagtagtggcggagttgagggtgagtgggacactggagggaggaaggagagaggcaaagaaagcgtcagaggagtgattaacgaacgcgtacaggtcgatggtaagtctctcagcatttaactatttgaaaacagaataaccatgtcgcatcttggttctcacgttatcctgtcaaatcgtttctctcttcaatctgctcggtgtctctcagtttcccccagtacccagccaatctctccgatggctttgctcacggagactgggctactttcggctcacatcccagcgcaccagtctccaaagtctacttcggcaaatggaactagtcagcaaccccaacaagccgttcggccgtctccggcgacattcaacgcatctcaagcgcctcttaaacttggatttcctgctcttggagagaaactggcggaagaggtgaggaaggtgatcaagatcgaggaggccgaagaagaatcacgtttgaaggaagcaaaaaaggagtcgaatggcatggacgtggatttaccagccgcagaaaacgcaacttccggagcggctacaacgtctggaaacgcgtcaaatcctgcggtccctgttgtcacgaccgctcccggtgcgggaacctctggcgggaacgcgtccacatctgtgggtttgggtgcgaaagataaggagcctgatactgagggactcttgattccgaaagatgatgatctgcttccccttcctgtcaatttccggactttcgacgttaagcgagaagttgaaaaagtgctggattctcgaaaacggatccgtcttggtccattaaactcttcgactacggggtccgcttctgctggtccgacattagctactgctgttgggacggctgatgcgaaatgggaaggaccagaggtagaaggtcgagtagttttaccaagtatctgcgcctatacatttcatgactctggtgaggggatcaccagcacagccttctcggcagacagcagtcttctggcggcggggagcgaagaaagctgtgtcagactgtggagcttgaaaggagagaagctaagagggctgagaaatgatcttgatgtgggaacgtcaacagatggtgagtgctgggttgaggaattgtttttcgctctgttttcttcatcaaggaaatatcggcatgtgttaacaaaactggttgttcgtctcttcgtgcttgatctgtcttatgctgtgtttttttgttcgctttcctgtttgttagcgtctttccttcggaagaatcgggagaaaggtgggttggcgatgcggaagctcatcggtcactctggcccggtgtattctttatcattctccccgatcaacggctctgccgcgccacctcgacatttgctctcatcctcgaaggacggcacggttcgcctctggtcactggatacttactcttcccttgtcgcctacaaaggccacaacgagccagtatgggatgttgagtggggaccgatgggtgcgtactttgcaactggaagtcgggatcggactgccagattgtggagtacggaccgaatctcggctctgagaatgtatgtgggccatttgggggatgtagatgtacgttttctccgactcctgtattggtattccaagcgtttcgtgcaaaggcggaaaagtacaaccgagctggatactcaaatagaatgaatagggtatctaatcgatttattgtttgtttttctgtacacagtgtatcaagttccatcctaactcgctatatctggcgactgggtcgagcgatcgaacatgtagattgtgggatgtccagcggggagcctgcgtccgattgtttgtgggtcaccacgacaatggtatctcgtctttggcgatcagtccggatggcaggtatttggcaagtgcaggtaagttttttcaatctgggtacggaactgacaactcggatgcgtgctcaaagtctgtggtcatatttttgggggacgcaatgatagccgaggactatgcaatcaacatttgggatctcggctcgtctaggctgattaaaaagatgacgggacatagctcgtcgattcactcgctctcgttctcggctgagtcgtcgcttctcgtttctggtagcgcggattgctctgttcgagtatgggacgtgaagagttcggctgtggaggccgagcaaatcgttcaccagccagcgcttgttccggctgccactgtgacctcgaatggggcgggtgagcttccgatgggcgggttgaaggtgccagcaaaggcagctccggtgggtatcccggatatcaggtttgttctttaccgtgtttgatcattcatttcctttccccttacctgttgtgttcgttctgtttctgacgtgtgtgtgtgtgcgtgtgaatgaacggtattagtcgatcattgctgtcaacgtatccgacgaaaagaatacctgtgctcaatgttcaattcacccctcggaacctttgtatgattgcaggggtgtatagtccgtttgatcgacactgaaggggggtgtgtgtgtgtgtgtgtgtgtgtgtgtgtgttttgggaggaggggacgtcaagagagtttcttggtataccaacttgatatacatcgttatttgcaatacaaagtcatttgtctcattaatcgagattcgtgactgaggaaggtatatcccgcttcatcttttggtgattctctgagagcgacagacaacagatggcctttctgtacttgcccttctcacttggtgtcctctagcacgtgtcaaaagaggaagagaaagagacgaccggctccaagaccagacggagatttgaattctcaatattctctgggttgttcctagaatgtttgtgcctgtgctgctcgttcctaaacccatccatccggatattaggccaaagttcagagataacgtatttgaattggcaaggcgaaatacttgaactgcgccttgaggtgttgctgcgcttactgcgctacgcgatttttgatctctgcgtatgtgagtctcatttgggtgacaggcactggacgagaggggcacatggaaaagaaaaacaccctcggccagctcggccagttcttcctacgttctcctcatcttcgtttcgtcctgtcctcatcgtccatccgattcttctttcctttctctctctgtgttgttcatcgtgctcataaatccggtttctctctgtgctcactggtatgtatctcagtcggtcctagagcagagttattccctagctctgttgcagtttacttctctgacggccaaagttcttattgtcgaaatctaccgaccggtttcgtcattcttctttagcggggtatacatacttccgatcaaaaaaagcgcttcgggcacctttttcttcttcttttctgtgtagaaacttagatctcttctctgtatagagacgatatctctcttgccacctttctcctcttcttctagtctgcttcaagaaaaaaacctcacattttttggtcatgcctaacatcacctagtacgtcttctgactcgatttgcgcgaaacgaggattctgcaaatacaagttgcaggtcgatcaatacgcctcggcatagttgaaatagctgtagcatcatatgcattttctaacacattcgctctttccacttgatcgtatcgtcgcacactcgtctgctttttgaaaccagcggaatcatctctggtgcggatgggtcgatcgacgccggtggaactgttcgtttctacactcatgtttttttccgctgggtgccttcctatgctgtacattgtttcttcacaaagctgaatcttggctgcatcgcaccggtgaaccttggctatcatggtttaaggacttaatcgctactaccgatggagttgcctcatcgtatgaccctggagacattgcttgggtcatgacctgctcagccctcgtctggatgatgattcctgggtacgtgttcccacttgactcttgtgtaattagaacgctggttccgtcaccttgtccaaccgtgtttagtacgatgtgttgaacttcaattgtactttcttcagactcggttatctctattctggactcgtcagaagaaaaaatgcgctcagcctgttattcataacgatctcttgtaagtcatgtatcgctgttccttcagccgcccacaaggtcgctaacttctttatgatggctagctctcgctgttacttcgttccagtggttcttctggggttactccctcaccttctctaagactggaggccttttctgggggaacctccgaaattttgcgttcgttgtctctcttcgactgtctttgactgagccgtccggctgactcatgcatgaccatgtcatcttcgttctctttccgacggtccactttcgacgaaatgaaatttcagtttcatgaaagtcttggagcttcctgtccccgaagccaacaacaaaattccggaaatcgtatgtatctttccttttctatgtccttcatcggtcaacaatagcctcgtcctgatcgtgttccacaccatacgttcttccgcattgttttgtgtaggtgtttgccttttatcaatccctctttgctgccatcgttcccgcgcttgcccttggcgccgccgcagagcgaggtaggttcctgcccgccatggtcttcacttttgtgtggacgactctggtgtacgaccctctggcccactgggtttggagctcgcacggctgggcattcaagtggggcgttttagagtaggtccatgtagctcgactatctgtctctcttggcttcttctttttcttgtttctgtttcatcttctggttttgtcggctgacgactattttccactttctcactcaatataatctttctgtagctatgcaggaggaatacccatcgaggttgcgtccggtacaaccggtctcgcttattctctcttcattggtcctcgacgcgggggcgagaccttgttcaagccacagaacatatcacatgtcgtgttgggaacggtgctcctatgggtaggatggcttggtgcgttttggtcttgcttttgttcattgttgcggccaggaacatgttggctgatcgacttggttgaatttccctcttcattgtaacgggtgaacaactggtaggattcaacggaggcagtacttttgcggctaatctccgagcggccatggcgatctacacaacgaacttggcgggtagtattggaggcattacctgggttgccatggactacagactcgaaaggaaatggaggtgcgtgtattacatggaataatactcgacgatcaagaaaccaatggaacagattttgatatgtgtatttctgttactctagttgcattggtttctgcactggtgcgatttgtggtttggttgcgatcactcccgccgccggctttgtcggtccaccagcggcgcttcttattggtttcgtcgcctcggctctatccaatctttccactcggctaaagacagtgatgaaagtggatgacgcgctcgacatctttgcatgtaagatttcttcgtcttgatttattcccccctcccttttttccttatcttttctcgtatgcccatccggccgttctcaggccggcacatgtactaactcccagctcgaggacttgactgaatctatactcaaaggccacgctctctccggtgcgattggtacgttgatgaccgggatttttgcagaggccaaatttgctgcgttggatggttactcaagcattgccggtgagtcattctttacggcgttccgctcgttcttcttctattttcttgctccgagatggactcttggccgcgcagaaatatttacctgatatcatgttttctcttcgtgtacaaacgttaggtggttggttggacggaaatttccgacaacttggacttcaggtcgcttgggtccttgtcggcttcgggtggtctttcgttgtcactcttgccatcatgtttgtgagtttgcctctgaggagagcctcttccacccgggccatgcttccgttgtcggtcgatcgtgtcgcttacgatgaaggttgtctggacggttgatgaactttcttccaacccttaggtcatcaaccttatccctgggcttcacttccgatcttctgagcaggccgagatccttggtatggacgagaccgagcatgatgaggtatgttttgacaacaagaagaagaaagagatgaggatgatgatggtgatacacgagaagaaggaagcgaatatgtgatctaacgtgtatatggactacccacacctttttcttttcgcagttcgttcaagactacgtgtctttccgtcgagacgccgatctgacggttgccgcgcacaaggctttgtcccgagtagcgtcttcgatccacagaggaccatccgggtcgattcaccggtcaccctcgaacgaccctagatttgacaccaggcacgaaaacgggcttgcgaacggagacgaagagaaggtggggcgtggtcgagattttaggaaacacggcaccgtcatcgaggccacttcttccgatgagggaaaggatctcgagccgagacctgccgggttgcagagcaggggttcagaattgaggctcaggagtcagagtcgagcgagaagcacaaagtcgaatgtgagtctctgatcaagaaagggggagaacaggtgcacttatggctgatgttcgtttcttttttcttctttttgtcaattttcttctttctagggtcctgtggaaaacgtggagatgaaccgacttggcccgtgagacgatgctctctcagccgaatgaagcagtctgactatccgaaaacaaacctaaacaaaacaaaaaggagggccagtacaagagattctacagatgcccaccgtctttctcaacagtcttttcttcatcttttctttcttcacgcgtgatccgaatattccttgtccattcttctgcctacttggcagccgctctttactttttcctcgacaaaagccacgattgtatggttatgagtaaatcactgacagtctaccggtgccaatttgtttgctgtctaattgtatgtccatgtactttatccgatgaatcgtctgaaagagaacgaagagaggaaagaaagaaaaagaaagaaagaaagaaagaaagaaaaaagaaacaaagtgacgttttcacatctcgtgctatcgaacgaccgaccgaagagttctggaacaaagatttgcagggcctggaaaagaaaaacgccccctttatttaattctatctgtaacaatatactatacatctaacgggggacctgcgcgccatgtgtcagaagcgctctcctgcaaatcccacagctcgagaacaggcttaatggtttgagccccctagaaaatgccctagttgagcgcgcgcgcgcacgcacgtacacacacacacacacatctccactcacacactcacatcctccctcttggctaccaccagggtcgatccgctcggacggggccgcttcttgtgatgatcgttcttgtaattctgtttatttctcctgttgcctcgtatacatactcgtatgctgctaaacaagggtttcctccctacgttcgatacattctctccggtcctttctctctccctctctccctctctccctctctctctctattgcttctctccccactcattcttgtcccctttttcttcggtctctctcttctcggctcatctccgtttaggttgatctaataaaaagcctctcctccggtctttcttccatcgaggggtcttccgctggtcgggctcacctccccctcatccttctcctgctctccctgtctctctttcgatttatccttttcttgtttctcttgctgtctatctctctcaaactagttgaacacatatacatacattcacacatgcacatacacatgatttcgacagaagaactcaagagacagcaagcgtacgtcttctttgggtcgctcttatcctgaggccatctgtcgagatctgtactaatcagatcatatctggccttcggaacgtctgtctttcgttcttcttttctctcgctggtcctgggcgaaaacagtggcttggatgctgaaggctcaatgtctacggccgagggacgcaggacgtccacttatgttatttattcgacgtgagttctgagatttttttctctggagattttatctccacttgtagatgtataggtcagatcgaagagttgggaccctgagggaaattggtactaaatctgtgatttttttcatggctgcccttgcccgttctgttcctctattcgatcacgaaagctcaacgctggccgagacgattgaaccttctagcacgtctactcttctcagctcaagttccagtcatgcgtcccctcgtagcatgtgagggctgcttctcta

SEQ ID NO: 662 - DNA, 4289 bp, Xanthophyllomyces dendrorhous
cctacgtcttttcttttttttcctctctctcgctatcgcacaggtcggcagctgcaatcgcaggtggagttcttggcggaataggtttcactctcatctgctccataatcctagcgcttttctttcgttctcgaaggcgcagacaggcatcgagagagctgccgttgcaggacaataaacatgcggcctaccatcccgaaatgttcatggttcctgcacaggcgagtgtgtttgggactaagtcggctgaagtgaatggcgaaaagactctgagatcaatagagaccggtgggcatgctcggaccccgagtgaagttcctctactgacagaaccacccttggctcccatgccctactctgtcccaccgatctcgacgatggcgccggcccgactcattcagggatcggtctctttatcgtctcttcgtccatcaagatccgagcaatcaatctaccctctcttgagttcctctgcttcgtcagacgaacttatgcaagcacacgatcccttcggagcttacgctcctgtctccatcattccaccccgttctatccctcggtcgagttcgaggaccacattggggttctagatctctcttagtcaacgtatcttcttcttccttgttatcaaccatacacatgggggcaggaagatagattcactcttgggtaggttgacataacacgtccttatgtacccttgtgtttcttgaatattatctttcgagaggaaacattccaatggaacagaatcagtgtcgaatatctttctaagggtttccggttaaactggcattgtcggatccttcatcagttgcgctctctcttcctccttttttcttttgcttattcaatccctgataacatcctccccactagaatatagtagtcctctctgctttgatctaccaccttgccttctaatatatctgtgcttttccaatatctctctttgcttttctttcttctttcggattcgtctcatctagcttcacttgctcttttcttatttatcacctcctttccatcatcgcacgttgcttggttcttgacaaagaaagacgcagattattgtgccgataggttcacttaggtctctcggagactgtcaggcttggtcggcatactttgtcttgattaaaagatagaaacagttcgagatatttaattatcatcgggcatgcaaccatcatcgacaggtcgatcgatctgtagcatcgttaaccgagaaccctgggagcaggggatagaagatcctcggattacatccggtccggcctcgttgatgcgtctttcttgttctccttctccttctcgtccccgtgctccactttttcagccactgcattatgggagcttctctgcatctcatgtctgcttatcctccgtcatggtttatttccttcttggctaccgtctcctgaggaaaacctccctcctgctccatgttttttctgtatacaactaattttctatctttccatgaacaaacacgtctctgcacccagtccttttttttccttcttatttgtatccctttcctcaacgacctctgttgcatgttgatctgtaaagacgctttgctcgattcgagattctgaccactgattagggaccagatcgaacacatcgactcttccttcttccttctttcttctttctccctacctctaccctttctttcgttctccctcttcatgaaccgcacgatatgtatacaaacgagttgaagcgacaacaaacgtcagttgagttcgattgttggtgcacgatggcataacagatttcgctgactcactaattgtattgcgcttgatctttgatcttttccttgtgttccactgctttgagaaattaccagtggaacggccgttcctccttcgtaagtgatctctgtcgctctctgtctctattgaggtgtgttgacgatgtgaatgacaaaaggtcgtttcattctcgcaccttgacgttctctcttcttttccctgccttgtattagtccaacacaaggcgcgccatcgggcactccaccttccggtttctcccagtttccttttccttttccttccggtcagccaccgcctccaccgccttctggttttcctcctcctgctggttttcctccccctccttcaacctcgtctgcagggactacgtgagatcgattctcctttctgtcctctgatcgcacccactctctttttcttaccttataggttgattttcgctttggctggttcttcgtatcgttcttgtcgatcagtgcggtagctgctattgtcggtggcgtcgtcggcgggattgctttcatcatcgttctcctcgtgttcctctttttctacttacgttcccgaaggcgaacccagcaaaggcgaacgtcacccgacctaccgttgcagaacaactggctgagcatcaaccaacgtggaacttggttgaaggaacgagatagtgttctggccgtcaagtcacaggaggacgaagacgaccgagctgtaggcaggaacgagaaagacaatagacttccccgctcaatcatcaacggagacgatctatcccgagcgtcgttctttgtcgcgccattcccagtcccagtccctacaggtcctcttgcttctatccaagagatgactgctgtcccctcggcatacaatccgaaggcagagacaccgttctatacgtcacccgccctgcctatgtcgtccggacactttgaacaatcgagtgatctctatcattctaccggttcgtcccctcccggaccggatcagaccgactggagccgatctgatacagtgtttagtcaagtgggttccgatcctacaaatcaagataggtgagttcgttcaggttccgatcagcgtcttttcaataatctgtcggccggtcaaatgggcgaaggtgcatccagcaggaggggacgcattcgtacttcaccgctgaccgatggctctggtccgccttagttctgtatcaaatagacgacaaagcctgaatctgccagatgaaacagccgatggagtgcagtttggaaaggcgttctgagaggtttttttaaaaaaaatcttcaagctttgtttccatctctcgggcctgtcttgctcgttggatgttctctagaatgtcttgatggtccttagtcaatcagaccgtacattcaacccaacctgacgtctctttcatattcttctgtgagattatactgtgcgattatatgttgttgttgttttttttttccttctgttcgaattctttctctacacacaacactctgtacaccaaaaagccggctaccaatctatcttatgtaggatcagatgtaagtcgaatgctgaacagaacgaccttccacaaaccactagtacgtccaaacgcatgacatgagccgacaacacgtatttctggataggcttgtatagatcagaaacagaaggaagtccttgtatggagaaaccgaaataatatagatccaatcgacccatcgggtcgattccaaatagacagcaacaaaagaaaaggtgcgcagaacgaaaaagaagaaagttatgatcgagaactcgactgaatcaagagtcggacggctagagagaggcgggggaggggattcttagaatcccgcgctctctcccttaccctcaagatcatccgttcactcttttcgttcgtatccgactcttttcaaaacattgtcgagtccgaattctttcaacaaccgatcacacccaggcttcatgaagaaatacccgacaaagcccagaccgttgatactaaacttgagtttatcttcgatctcgatctcttcgtcgtcctcatcatcgtctttaccctcctctttctgcttcttctccttttcctcctctgctttctttatcaataaattcttcagatgtgctggcacgggtacctctacatcccgactcttcctggggatcgtgtggagccctcggagcgtgagcaagacattatgggatctcacaccctcggattcaggctgcgctccatgggactcaaactggccgagatgagtctcgtagatctcctgaagggtggccggggtgatctcctgcgagggtgtcgtggtggggtcggaaggcgtagacaaggaagacggtgacgacgacgacgacgacgatgttgaggagctgagagaaggcgtagaacttgaagtagcggtcgaggttgaaggagccggttggtgatgtttcgaggttccgggtaagggggtgaagaaatgcacgtatggtagtggaaggacgtgaggctctgttcgagtacgcaaatgtatacac

SEQ ID NO: 663 - DNA, 18160 bp, Xanthophyllomyces dendrorhous
tgaccttctcggaaagagcttcgatgggcatctgatcttgtccttcaggaatcggaacgacctgaatgtgccgatgaggctgagatgctccactcagcttccccacgctgttgtcggcagatatcatgacgaaggttcagtaagggtgtctcggtagagtacatgtagacaaatcatcggtgtctcgtgcgattgaaccacctacttgacaaagacaaatcctctgcgcccggccttctccatcgccttgagaaccctccaggctgcccaaagatcctctacttcgaggggatcggcctgaacggcccatctatgagagactagcacgaactgctctggcaggaagcagaacttgttaagctgattggtttgtattaaaccacagatgaaagattaggtaaacttgtcagaccgtccaccattcgggagggtagaatatcgataggaaggagtgggaagaaaaaagagaacgataccaaagagtgatagccttcgtctagatcggttaaaaattcggcgggtgcaaaaggctccgcaaatggatcttcgtctggttttgatcttaaatcaggcagctcatccgaaggtggtggcttttctgagagagaggggattacatgaatcctatctgttttaaacgatgccgtgtccacatcagaacatgtatggaaacgcaatgataaactttgaagggatacgaacaggtcacatcacaggtagggacttccactactttctctgtgtcgtagatattgatcttttcaaccttgataccgtggtctgttcgttactcagaaacggagcgtcaatagcttctttgagaatcaatgaatgtggagatctctggaaagaggctgaccatatactttatggagcacgcccatcaagtcatgcagcgaatcttcttttcgatccatagtctaagaactagatggtttctagaggtgaatgtacaatggatgtttgagggtgaacatatcaagcgttcacatttggcgttctcgggtggagggcgtccaaacggagtgctgcgcctcgtttggctatgcttatggcggcttcatttcggagttatttcattatcagacaaagccgttctatcataatgtccggtccaatgcagatatacatacgaagcacatgacgatatacattcaagaaagaagaacggatacgatccaacacaagacaacatttaccaaataagtacaggttctacttctagaaccctacgggagaagagagaatggcattttaaacctgcttggcaagaagcttcatgtaccattcccgggagtaataagaagaaataattgagtcgtcatcagcctcagtctctcttcaaacttgtctgtatagcaatcaaaagaagaagatggcagacttaccagtttgacagtgtcgtaaactttcctctgaccagcaaacaacaaacttgccgtcaggacgctctgcagcaacttggcctgcatgccccggtatagaccttgaacaccctccttgccaaggatttgaagcagggccgacaagatggacgggtaagcatgcgagtttgattgctgtgttggataggcaatgagtttcagagaggctaggcaaatgagacaatgtgaagcgtttaaagacgtacaagccgggacttgaggagaaccagagggtagctcaaagaagtggcaactaagtatagaccaacgattcgggttcagtattccaagtgttgatctaaactaacgctcggtcagtgtaaaatgatttgaacgaacatagtttcgccaacgcgcctagaacaaagatgtcgatatcggaaagttttttaacgggcattccgcgctttcgtctagcggccagaagcaagttctgtagctgttcgaatgcggtatacttttagggtaggaccatgacatagattgtcagtctctttttcttgctaagaacaaaactactgaactagcgacgtacttgaagtacggggttgataaccagcacaagagcagccttgatacctcgccagaaaccctctgggccactctcggccagaatatccttgacagattttggaatggagggcgagggcgagttgggatggaggtgagtgtaggtcgactggtgtgtctctgaagttgtgcagtttccatttgatttaacgaagaagacagactgtcagtttggaggaacgacgtagaagaaccgaacaccaaaggacgaacggatgacccagagtgggttggttaccacagtcgtagcggttcctgttgatccgtccaagaatggaaatagtgatgaaatgagtatttacaagaagaccgccaacaacttgatgtctcgaaaggcaaatgcaggatacaacaaacaaggacaagagcaacgtaccggcaatcacacctgccaatatgctctgtccaacactgaggttccctccattcctcttccgagcagactcagaagataaagaataggcgaagtcttgttcctcgtgatgtacgaacaagtcagaattcaaatcaatcatgaagacgattcattaggggaaaaaagaaatctcacagtataccgcgttggtcactccgattccaaagagagaagaagatagtccagaatagagcccggatacgccctcttgttcgaaaattcgaacgatcgtcgatttctcagtgattgatttctgagttttccattcagattaaagagaagaaattttgatatgttgaagcaaagaagatgttcaggatcagagatcaagatctgcttgatgtcaacatgacaatgaagctcaccagtctattgagcccctcaacctctttggatttggccttctctgtgacagcatcccgggtagaggcaacgactaaaggataggtaatgcacttttcattattgaatcaccacagatatcaacaaatcagttcggtcactaaagtgaacgatagatgaatgtattcatcactaacgagggcacccatcccggctacagatcctgccagagattgaattctatgaatcccagattcccatacatttcagtcagcttccttagtgttcattactagtaaacttcggttcggttgcacaactctgcatgatgatatctgaaagtggagcgttgacaacatataaccatccggcactcacacggactcgctcattctgtgttatatatcctgagttgttttttttgaataagactaataaagctcgaaggtttatggttgatgattgatggttgatggtcgatggtcaacgatggttgctgatgagatcctagagctcaagaagcgttcactcgctcagccaaccggcaaagtagatagccgggcaacttatataaatgaatatcgcgtatggacataggtaattttaactaagctacgcgacgcgtctattagttcttagttctcttcagctcacttacttaccatatcatctcatcaaacatggcccgcaaagagcaagcgaacgctgctgctgtcgctcaacagcagcaatatgaggagataaataatggaatcggttggtttttctcttcccttcgtttctggtggaaagaaagtgctgagaaatctacagtacgtcggcttcttatggaaacaagtaaacttaccttctaaactatctgtttctttctctggtatcgttggtcgcctttgttggatgatattgcagaaaattatgaacttcaacgaagcattttgactcgagtagctaaggaagatgtttgttctcatcggttctttatcgctcagcctgtgtatcgtcttgtcggttgacggtgtatgcgatacgtctgctgataagctgtttgtcgatgtttgctcatcgtcacattggatcggaaccgtgtacagctaccgccgtcagtaaagattcagaaggatgccatgtctgggatcagtaaatcggctaccgtattcatcaactatttaggttcgtccgtagtttctctgtatatatcaatcgcggagggtagacgaaataatcctttgattggtacctgatatcctggcctgcgtgcgattgtttgatgtatgggaaacattctctagcttcaacgttcgtttctttcgtttttaaactctcttcacccctttccattcgctcgctcgcttgaagccgatcgaatggttgacaataacgaatatatttctgttcctttgtagcgcccatgaattatccaccgctcgtggggtcaagactatctctgctgcagatgtgttgaacgcgcttgactcgactggtttctacccagaagagttatcggaagaactcgaacgggaactcgaaggtttgttgttgtcttatccttcttaatctcagtttttttttttcttaaatagtctttttgacttatttgttccaacttttctctttactgtgtctgtttgctaactctctttctcacacatatgtgtgtgcgtgcatttctctaaacctaatgacagcatatcgagcggtcccgaaaaagccaagaccttccaagtcgacgaccgtggcaaagaaggcagtctccgatgcaccttccggttcgcctgtgccttctggttcaccagtagagaacaactctgccgaagtggatgaactagatgatgatgatgacgaggaggacgaaaagatggatcaagaggtggaggatgaagaggaagacgagccagaagatgaggaggacgctgaagaggaggaggacgagatcaaggaaggtgatgaagaaggtgaaggcgatgtaactcatggggaagaggatcaacctatggaggatgtctaaggtttcgattgtttcttgttgttttccgaaagtagcaagacgacatcaccttacctcccctcccctccccccttgtcttctcggtttccctctgttttctgtgcgtggctcctgacgcattcatagagccctttcgtccttcacggctcgcttggctgttcaacgcatgttgatttgaccagttgaacgtgtggctaaactctgaagttgatagaaacaattttttttcaaagtgccacaagtcactggaacatgttggtcgctttggccctacaatcagagaataaagtaaggaagaaaaaaagagataagagatataagatacggaaaaggaaaaagttacaaaagagaatggctgagtggaggtaaggagtagaggtagaggtagaggaagcaatcgataagccacgacgcaagatgataagagcgccacgctctgctaggcagaaggacgaaagagttgagaggattcatcataaggagattagcggccagatcagaagagatgattgtgaaggcgggaagaaggaatagttggtgggttgagataaggtggaagggcgaggaaggaaagagaaacgaaggatggtgggccaaagtgagcccaataaagactatgtatgaaggctgtctctatgcttttaatcagaacaaaagaagaatggataaagaagggatggcaagacgtgtcggtcaagggattaaaacacgtaagccttgaaaccgttccaggcggcggctccaacggccatgacacctgcacctgctaaagcaggccttaatccagctgttctcggtattttccaaacagacaccgcatacacacaacccaacatacacccgttaaccagtttcaaacgcaggttgagtacgtgtcaagaaagaaaacaaagattttcaaagaaatatcagcatttgacttggatttaagaacctttgacggaagcgtatgttgaaagatcacatacacgtcgatttgtataaagctccactaagcgcacccgagatgatggatgtcacctggtccgatgtgtttgggggggagaacttgtagaccgtgttgttgagaatgttgtaaaagatggcttttaaggtggagaaacatcaagaaaactggtgagtacattaactcaagctgagagagtgcttgaaagaattatatgatgcagaaagactatgggactatgacgtctctctgtatcatcaccaagaaaaacggatcgatagacaaagaagagacagatattggccaagagaaagtgaagagaaactcaccaagagtaccagcagtattcgcgtagtaggttcctcgcatgcttccagcgttgagcatggcgttccatcgaagctttccacccattttgccgggtttgcgcaatccatcgaatgctccaagcgcacctccggcaaagagacctataccgatgtggaagggaacagggaagtggagaacaaaagagatgttaatcgacagatcggcacagatcattcaacgtgagagttctggaaagatcaacaggaaaacataaaagaggagagcacaaggtccccatgaaaaagaaagagaaaaagagaaaggagagccgaaggatggacgaaccagtcacataagccgtaccggctccggtctggacatcatccaagaaacctctacttcccaggatagatccctccatatttgtcttgtcctcctcaagaagaaggtagtccatctgttcgtttgtaccgagtccggcgaaaggatgaagctctttgtgggtgatgctgttggtgaacaaagactctgccgtcgggctagcaaacgcatctgttgtcgacgaggacgagctgggggatgacgaaaaggaagtagagggagtagattgggaaaacgagttatcctggaacgaggactggctatggttagagctggcatgggccgagccccgatcgccaaggaaagaagtgaaagacatgctgctgattagagagacagtggaacgaaaagatcaactcgaggatgaaggtggtcagcaagcgagaaaagaagaagagaatgtggaatgcagagaaaaaagacacgagacacttaagtcaatatatgaaacatttatgacgatatccggttacgggtttttgacgcttcttcctcttttttctaatgcttgactacgaaccttctagtgcaactttgtagtctttctgcttttctagcctttttttgctcctacccgcttttttttttccttttactaccatcaccattatcaccatcctacaacacatctggctgtcatgtctctctctagatctgtttctcgggcggctagttctttttctcgcgtccggttggcgtctcgtcctgttactgctcttggccggtccattcggttctctcctatcgttctccctcgaacattctcgacatcaccttggatgcttgctaagggtatgtgtttgtctcttttgatacatgtcttcactctctctctgtctctaccatcataccgatccgtctgtgatctgtccagccagtacttctccttatgcgctgaatcgttttgttctacaaataatactacaaccaactgaaacacacctgcctcaatagctatcgacgacccgttgccggcagagccagatattcctgccgagtatgctgagcatatcgaaggtggaaactcgtatatcgacactggagactacgaaagtgctcgggattcatttgcgaaggccctcgagatttatcgaagtcccgacgtgttattcaacaagggggtcatggagtactgtctgagtacgtccttcctctcactcgtatgaccaatctaatgacgtgtattaagcgaggcatcaaagattactcgtgatcaaatctctgtgtcaaatgctcatgctagtcacttctcaacaaccttctttttttttacctagaggatcattcagccgctatttcttcttggttggagtgcattgcgttggatcctgagaacacggatgcacactcgagtaagccttcgagctcgttgtactaactcagaggcgtctttgactttgagagtctgatgaatgtatgtctggttgtcacgtgcttctctacctagatcttgcctctgcatatgtgctatccgatccgcctaaagcccacctggccatcaagcatcttcggtcagtcgcgcacgagctttaaattatgcatgtacgagagaagaatctgaattgatgttcttccttgtgctttaccgcaatttagtgcggcaattgagatccgaccgttagatggagagatctgctttaatttagcggccgttctggaagctagtacgttatgctttctgcatcagccagtatctgtttgctctcgtagttctggtaacccgtttgaatatgggtttggtctgatttcttcttgcttctcgcagcgaaccaactcaaagagagtttagaaatgtacgagcgctcccgagggttgggtatcgctcgtgcagagcagaacgttcgatccgtatgtagatcatcttttttcccttttatttttgtcttttttctttgaattgagatagctcgcttgatagcaacgatgggtgttgatggttttcggtctgttgacctccgtatattttctcaggttggagccaagatcatggcctctcaggataaagagtgatctatattgagaatttagagagagcgctagggagatcaatagcatgtcgtttcatacgacatttcaggcgtcctgtctttatcacttctctcgcttttaatttcccgtcgagaaccgacaaacatcttggaggaggcggatgtatctttttttatgtctcacgagaaacaagagcggatgattccgtttgtttaagcatcaaacgtataccaatgacgttgcgaagcggaaaataaatccacaataccggtgttgtggttatcatcagagtaaattcatcaagtatgggtgatcgtgaatatgtatgcttaagcgttcgtagtaggtacgtcacagatccggtatgctgtacagcttgtatacgaaaccacgtggacttcggtctgtcacccacagcaacgctcggatcgaagacgatcggcaaaatcgaggcagcacacggataaataatcgtttgttccttcggtacccgagtacccgctctcggtgaaaagatcacatatctatcggcaactattattgcaaaattgatcccggccgatcgtcaggaacagagtggagagaagaggacaagaaaacaaggctgggccgtaagagaagctcgatttctgggcgggccttctctcatcgcggcatagccaacgttgttaatcgccgatccctttttcttgtccacgtcgtatgcccttccatcatctgccgttcgtttttttacccaccgatccccgtcgtccaggagtcattctcttgcgtctgaaaagatcctttcgttgtcgttctctcacagttggcacttgttcctgcgtgctcatgcttgcgcgcgtgaggttccatatgaatgcattcttaattggcctctttcctttccgtcacctccttaatttttttcccggttgtctatctaccttggcctacggagctcgtctcccggtatatacataggtttcggaagggctttttaaaactcgatctcgtttttttccttatttcattcttttctttttcttctgagatttcgctccctttctcttcgatctttgatccctgtccagcatttgctcacctctgtctcgctctgccgtgttctccgtgtttatgcgcaacttgccgctgtttgtctgtcaggtttccgggaaagatcacactgtaatttcaaaagcgctgattcgtccctcgaaccagctttacattttagactcccgccttatttaaaagaccctctgttcggctctcattctcagaatcattctttttaatttcctggtttgctccttgctgctttcttcctttccctttcttcgtcttctttctccctatccggtttactctataatacgtacgttttctcttttttagcaaagcctttcagaacaaatctcctcgattccgtcaccttttcatttccagatccttcttcacactaccaattttaccgaccatgtataacccgatggagccgtcaacaggcatgtccggaagtaacaccggaattggaatcccaccagacgtcaaagcagattccgaggagtcgacagcggggggttctttcgagacgggacaaaaccagagttcaataggatcctactcgagttcgtctacgaggtccagccatgaatcggatagccacaagtttgtttagcccccctcttttttggtccgcgttgctgtgttcccgttcatcattttgtctcgttcgttttccgcgtcacttgttccaaagtcgcgcgtcagtttaacaccccttttttttctttttttttgtcacccttcccccgcgaatgctgacgagaaacttgctttctttctctatatgctcagagtatgttcgctatctgtcgttcagcaaccgggtggagcgtctgaaagtggctccgatatgctctcccggttacctcttaacccggcacttattgtcaaactagatgttcacaatccggagggagattcggtcgatctgtacgtcatctcttttgcaaatcaaaacacctttcccacggctggagcaaaaacatacgcgctcacttcagcatttcattttccatatcaatctttccaaattcttccatcttcttatttctaactcggataacattattttgtctttactcaatcttatttctcttgtatccttcctctgctccatccggtcccagtgaaaacattctccctttcttgatatgtcatctcacccttctccctgcattgcctcgatctgaatctccatcgacaacaccaaacgaatcatcccgagctgcctcaatccctttggatcaggtccgagtgcctgggcccgatcccgccccgcaatcacccacccgaccagaactttcctcgtcgtcgtcgtcatctggctcgagcgatacaaagtcatcctcggcatcttcacccactgaaacaaactactacagagcgctctacggcaatctcgtctcttctgctttcacgctctcgttctcccaagattcgaacggaagacctatctatggccaatactttgtctttccggacgtgagcgtccgattcttgagagggacattccggttaggaatctcactctttaggattcgtggaccaggtcaattgccgtcgtcatcttcggcatcgtcgtcgtcctcctcccaagatatacttgcgtatactacgagccagtcgtttgagattgtctccagtgaagattatcatgcgcctggtgcgtccgtcttttctttctctttcccttgcatctccttgattccctcctcccaagtttaagcgtagattgatgtgatgtctttttatactctcaggtcagacaaccatgacggcgagcgtgattggccaaggtgttcggatgtattctcacgaagttaatctttagaggcaaggggctaagccgagcccaacccattcgacacaaatgagactttttatcaatcttctcagtttgaaccggttcatcggactccctccctccttcttcgaccccttttcttctcggaaagaaaggagacggaatcaaataaatttttccgtttttgatttcatatcaatcaaaaaatgaaatggaatgaaacaggctcgaagataacgacgatgatcaacaatagctccttgttctcctttctcttctttgattttttgctctttactctttatgtttactttttcggtcatgtctagtcctcatcacacttgctcctgcttttttccttctatctttcttggatttctctctgtcttctaaacttccttagcctggtttgtttcggtccgtccagagttcagttttgatataacatcttacattttattatttttctttcggttttcgttcttccttctcatctttctgctttctttcacttcctacttgcttcgcctcgctctgctctcgatatacaagatgtctatccatagtttgtctgtctatcccacctctctcttctcctctccgtctgctcatctctttggttcttgctcgttgacttattcataactttattcatcacgcgcatacacggttcccatcctgttttctttctttctcctattttcttaatttatatcatgatgagtgatctcaacggaagcaagcataggattcgtccgttcaaggcgaaagacacacgcatggacattatcaattatagaagtgaggagtgaggtggacaggcttgttcgaacgaaggacaacaaatggcatggaggaaagactcgaaggaatgaagaaggaaatggacgagtggtagaggttgattaagaattaaacatagagagaaggaataaagacaatagagaaagtcggtaaaaggaaaacatggtgaaagctatactctccgaacgatcgacgagtagctcaaaggttgctgtcctcctccgattccttcttcccctccatcttcacctccacctcctccactgccggtagttccggcactcgctcctgaccctactggaagtggtccgacgaccggaccgaggacattcgctcctgtagctgatttgagggagctcgtcaacccaaggttgatcaatgctagctttgcttcgatcgaagctacctctatcatggatgacccggcgtttccaccttcacctccaccgccactgctggcactgccggccaacgtcgagtttgagcctgcgaccgattggcttgatggatcgtagagcgctgcaggtgatttcaaaactggccgtcgaggctggaagtcatcgtcgtcgtcgtcgtcggcaacggccacatcgacttcaacataatttccgccttgatcaatgacattcgttctctgttcttgttgtcgttgtccttccttatgttccagcgctcgatgagtgtgaggctcgacattggaagaagaggagggatggcttgccggtaaagaagagtggggatgtccagtcggtcgattagaggatggcgcgttgggcgggggggggacagtatggaaagaagactctgctgccgccgtagtttccattgggttcggcatcttttcaatagcagaagatgtctctcgagacgctccgttcccaaagctcagtctctttgatccggcatttgcaacctgtcttcccgtccctccgttccaaattcccgtcctttctccaacccctgctccgttctcgcgcaactcatctgattgttgacgagcaaaggacatccctgccaaaggaggaaagtctgagctacttaactgactcagagaaccactaggaaggattgggtccggccgtctaaggtcgaattctggataattttcggatgaaacacaataaagttagcgtcgaggtcctgctttaggcattgaaagggagtcagacatacgttggttgcctaccgaccaatcaggccgaggaggcagaggatgatccttgggtggcgggatagaagctacatgggatgacgccgtcatcctcgaagcggaggagattgtcgaagactgcatatggagaggaagggaagactttaaatgttagaacacagcaaagaagaacaggcaacaagaaaaacaaaacatacgggtgaagaaggtcgatcattccccgactctctccttctgaatgcctctctggtcgaaccggaaccagaaccagaacccggactatctccccatccacctctgcctcctgcgcttccaagcggaccaccggaccaaccaccttgcctaattccgaaaccactgttccctgttccggagctgagtcgcctacttgaactcgtcgagcctctggagggtggtctgctaagactaccgtcgccgttataggacgacacgctagagcctgatgatcgatgttgggtatagatcgatgagcctgagttcgcactggtgaacgtcggagggatagggttcggtgaaccgttcaggttcggttgatagatataccgatgaggttgagatccgaacgaggggtcttgagagtgaggcggtcccgattgataataagccggccccgagcctgtccggtcacctggataaaacggaccatgtggctgctgttgttgttgttgttgttgttgttgttgctgtgattgataggcgtgttccatcgagctagaccctgaggatgagcctgccgagggcgtcgcgacgtaaccagagaacgatccattggtcaacagcatcggtgattgaacgaacccgcctatcgggttgactggcggacttgggtaaggatgcgcgccgggataaggcgaaggggacccagcggatcctcccaagctctgtcgtctgccaccggacggagggaatgtagatgtctgagggtgggattgtggcagtagagcctggtgttgagattggtgtggttgtgaatgcggatgtttaaggtgcagagattgttgcccggtgtcgtaaggaacagcaggaataaacacataggcctgaccacctcctgggggttgatagaacgcgtgggcagcgacgtacgttccctgagggggcaactgggtttgttgatgctggtgctgatgatgatgctgctgttgttgctgttgctgttgttgctgttgttgttgatactgttgatgttgctggtgttgtggagggggacgaaactgagaaggggtagtagttggcgggtatgtttgttggtgagccggtggtcgataagatggctggtaagacggctgatgggccggtggtctataagcagagcctccggtatttccacgacgatacgactgagcggatggtctgctagaatatccagatctggaggaagacgcgctagagtgagacgagtagtcgctcgagggtcgaaatgacgatggagaaggagaaggggaaggtccggtcctgatggatgcagatgcagacgatacggaggtcgaggagtatgtgattcgggagttggacacgctcgaaccagtggagctgcttaccgatggaaacacgaccgcggaatactctacaccatccgagactggatccggaataggaacagctatctgggagggtgatgtcgttgtcgtcgtcgttcctgatgaagaggaaacggccggattgaatccggtgaaaggatcgaactcgggagccagaggccggagtgaattttgggctatactcgaatgaaaggctggtcgagaaaagatgaccggaacggaatctgttgacgaggtcgacgaacttctcgaccggggtgggacgatagggactgctttggaagctccggcgccttcttcatcttccaccgggtttccaccgtcggttggcggggcgctggtggaggattcgggtgtctcgctgttccttccagacgacccagttgcgttcgataaactgaaaattcgctctctggcctcttcgtactctgcctgtctctcctcaaatgtcttgttccgtctggaagcctcattgggctcactggcaggagactggcctctcattggggatgatgtaccgtttgagggatctctacgcatgattttaaatccagtaggaggaacgttggaaggtgccgaaggaggcgcgagaggagcaatatcaataattcgtcgcgtcctggtgggtcgaattgttgttcccggaagaaacgataccatcagtagtgtgaagcgtggaaagagagagaaacgatgaggacaactcacaaagtcagacacgacccgtctccgggcagacggaccacgataggtttgccagcaccatcgctggtggccagcaagccaaggtactgcgcgcactggtagacgatccgacgatggaatgatgtggaaggattgaatgagactggcggtcggctgaagttttgaacaaaacaaaacaaaccaaaaagatataaaaagatagtgggtttagattacatgactcgtttgattccgagatttttctctttggacaaagagatatgtgactgaagaaggaagaggaaagaaacttcaagacggaagaaaaagaaaggcaatgaagattggacgtacgctgctccggacaatgcctgtgttccaagaaccaagccctccatctcgtctgccactctcaacacatagagcctatccttacctcctagagcttggaccagttgaagatctgccttaatctcacccgactccagtccgggcgatgatcctggtcctggtgttgatgcggagctgactaaggaggacgaaggaacggctgatggagaggatgatgactgggttgaccgagtatgagaagtcgaacccggagacgagaacgagggcggtttggatagaagagtgaaaggagcagaagaggttgacattggtcgcctgtcggaccgaaggttggaaagtataacagggagtgataaagattgatgaatctcttcagaatgggtttctgacgatgagatattaagtattgaccgacagaagaatgatcagtcgttgggctccgatcggtgaggcgacagcaaatcggccgatattcctcttgtcttgaaagtcgttggtcggaaagagtgtttgacgaaagtccttccttcctttcttttgtcctccttttgccctttttattgcctgcgaagaaccaaagaggaaggaaaattcgaaccggtagggcaaccagagtgaaaggaaagaggaaaacgagaaacaaaaaaaaaaggaagatcaacattcttggctcaccgtcggatctgactcgaatccgaacgagcccgcccatcggtcgaagcgagctggctacttggacgaggaataaagggagctagagattacggattggcctactcaccaaggcgtcgttcgtctactctgaactatgcagacagtttctaattctaactgatcctaaacgaacagaacagagtcgatgctcagtctgcgaaagtatgggtgtgagggtcagtgtgagagaaggagactcgagatggaaccgacggggagaaaaggggcgatggcgaaaaacgtgtaaccgtttaccgtaaccatggaccggggtgggggtggaacgatccccagtggtggtctgtcacctataggtagatgccaccagagagcgttagcaggaaagttcagtttcttttctctttccctctgcttctccctgtagctgcagagatcctggggatgaggacagtgagaacagaaggaaagagacagagcgcggatggatgaaggaacggtagcccgtcgaagatctgcttgccgagaagattatgcagaggaaaaacagactacaaccaagactacaggaaagactacaaaatataacgcgctggactagacgaggggccagtgaaacgtgtggaatggttacgccttacagcacagcttttgtgcttagtcattcaatgaatgctagggttactccctcctcttgccctcgccctctttccagaagggcggaaacgtaggtaaagagaagatcccacacaacgattcctggaaatccttcggtttcgaatcgtcccctggtcatggcacctctcaagattagattgaagcttccatctaatccgccatcatcagagccttcgttagttcaaccaactccagtctcagcctcagacgtctccactcctatccctcggcctcgtctgatcctcaagcatcgtccgtctcagcagcctaataagatttcctctagcagtccttacctaaaacatcaccaagacgagagagaagaggacgacaatgacgaggaccaagaaagcgaagaacacagtgaaagcgaaggagatcattcccacccatatcataactcggcatacgaccaagctccctcgtctgacagaactcgatgggaggaacccttggccagtagttcggacgcgtcgagcgaggtagagcctgaaccgatggatgtcgacgaggaggatcaggaacaagattccgacgaaagtaaagagaatgaggaagaggaagatgacgaggatgaagaagatgacgaggacgaggaggaagaagatgaggaagctacatcaagcactcgcgcttacaacgccattcatccttcaagctctcgacttcctctatccggctcatcccctgccttttcccagcaatctacaccggccgtcattccgtcacctatctcacactcaccaacattaaccaccgcatcgtctactactgctccagccgtggcgatgagattgcctaaactcgtcatcagaaacacgtcgaatgtggtccactctgacgcggtcaagacaccgacgtcgatcatcctgtccaggccggacaagccttcagggctgatcaagaaatcatcacgacccgatcaattagcttcatccgaatcgactaagaataccaacgaatcttccgaagaaccttctcgtaaggaagtaaagaaaaagaaaag

SEQ ID NO: 664 - DNA, 3185 bp, Xanthophyllomyces dendrorhous
aaagaaaaagaaaagaaaagaaaaagaagttcgctcgacgttggccccctggccgccaccaacagaaccatcccctgctcccccatctgccgaactatcctcctctttcgccccgtcccccgatccatacgcgcctccaacaccatatctgccttcaacttctcagttttctgaatctcgtcaagtgagcgagactccggaaccaccggaagagattcacagttacatcgcaccgaatggcacgaaggcgtttgtgagagcgaaaggcgtcaatggacgaaagatcgttggcggtcaattacaaaagccactcaaagaagtgtgcgagagactattaaaagagattggtagaagagatgactatcagttttttcttaatcctggttcgtcccaatcttttcttcttctcttcttctttctcttgacatttttcttccattaggagaaagctcgaaaacactcggtctcatattatttaattatccttatccagtctcagagaaagaagtgccaggttatcattctattatcaaaactccgatgtcactctcagtcatggatcggaagctctcccagggattctatcaaaagtttgatctctttgaggcgagtcaatatatttcctcttccccttacgtcattagccttccgacgttctgacttgactatatgcaattcctctatttctttctgcgctttctctttactcaggctgatctccgactaatcttcacgaactgcatcactttcaatccaccatccactatcttctccaccaccgcgctcaaactattgtcgtggttcgagcgccatctaccaacctaccgagagcttatcttacccgagacagacaacagagaagacaatacccttcgatcaaggtctccatcggtatttgacgaacaaggcgagccttctcctgcgccttcgggtttggcggacgaggatggggcgatgacgcctacaggtgggaatggcctaggtcaggctggccgaaaacgtggtccttacaagacaaccggcggctctggttcaacttctgccagcgtcacgggtggagttgcagtagggggagggtcaaccgtaggagtagataaatctcaggcgggctcgtttgatgaagaaggcgtattaaaaggggcagggatgtttggatacgatccggttgtttggggagcaatccactggtgggagactggcggtagaaggttgaagaataagcgagagaccacaaagctggcatctagagggaacgagtatgtaccttgtatgccggacggatctagagatctctctgaatgtacgttggattcttctctcttctgtttcctagcttgtcctccatctaaatctttttgttatgtctgacttactggattgcaatcgaccaatagtggaacatctaactccaagtctcgacgtcttcctacggcgaccgatgtccgtcccccgattagtacccctgcctgctaatttcttagctacggacgctcgaccgatatcggtcaaggatatagcttctttgaatcctcttccaccgacatcggttcctccaccttctgacgaatgttacctcccgctaacgtcagacgagcttccacctgcttttcaagcatggaagtcatcaaaatccatcaccaccaccgctactaccgccgctccacctgaccgaccgtttgtacgacccccgagagatgagtccaggacaagaccgacactcgccacagattacgcgccttttccgttgttcccgctctcggcgtgtacctctcagtccctcaccgaggcttctcgagcgtcgtttatcgagccagtgctggctggtgtgagagcgagaggagggagtcggccggatgtaggcgacaatccggtcgaacaagctgcccggacagcaaaggaggaagactggatcagggatatcgtctacggcggccaactgggtgaggcgtatgctcggagtctcgaacgattcctcgaaggagccatcatccactcaggaaaagatcagcaaggtctgaagcactatagggacgactttctcaccggcaccgtgtgggcgggaggcgggctgaagtacatgcaggacgtcggttcggtcatgagggatctccaaggggttaacagatggacgagagagccaaaatgtcaggaacaggatgacgagagactttccttgaagaccgagattagggtcaagaaagaagagactgaagatagtcttgttaaacaggatagggaggacgccgatcttctgatgggcctctctggtgcttccacttccgcttccgcttccactttcacttctgcctctgatcccaccagcgtcccgacttccaccttcacttccatcactcctcctgagacaaaccctacgctagccagtgtccgctccaagatcgaccgagtgattcgagacattccttcagacagaaaagttcaagcggaactagcactcattcgctccctgccactctccctttcgagcctcctccgcggtccagatgactttatccgagcgatccctcccagggtgccgaagaagcgcaaggcagaggagaacgacgacgacgatgatgatgatgataggaagcaagagataaactggccagagaacacgttgaaggctgtaggggaagaattgatggattggattcaggatggttcgagcctatccgagatagacgatgatcgatcgagccgaatcaggttgttactcgttcgtcttttccaccttggccttctttttgaccgtctctgatatcttgtctcgagtctcaatcatatttcctgtctatttctgtttgcttgtcacacagctctcgttaatcagacgagctccgttgggtacgatcgaacgactcggaccgaaagacctagagatgtttcctcagggatacattcgaactcatttcagtcagattgtcagatagatgtcgttctgtctctcttctttcgtaccgttcagacttttcattgggcacataatcgatcgaatcacagatgtaatcatctatcagtaacaagaaccggatctatattctcatcggtttgcttagggcttatcaacggggggatcaaatagaaggatcggtttgatctcgatccgttctttatcccacttcggcaaagaaagcggcgtcgatggggaagagcgaaaggaaaagaaagtgcgagggaagcgaaag

SEQ ID NO: 665 - DNA, 18688 bp, Xanthophyllomyces dendrorhous
  misc_feature (345)..(354): n is a, c, g, or t
gaaagaacgaaagaacgaaagaacgaaagaacgaaagaacgaaagaacgaaagaacgaaagaacgaaagaacgaaagaacgaaagaacgaaagaagatgagtcatgttcagttttcgtgcgcacatcaagagagctgataagacaatacagactcaccacgttaccggtatagtacgggtcactctctattatcttcctgacctgttccatcgactcgcacttcaatacgaacatactgccattcaagggaaacggtggggaatgagggactgaatgcccgtcgagcgtgcctcctccgaagactgtgcgcatcccccccaaaagaaaagaaaagaaaagaaagnnnnnnnnnncaacagaaaaagtcaggattctcaagcccaacctatttccctagactttcaagctggggctacccacagagacgaacgccaagactagaagagactgaacttaccgaaggagccgttgtctgaattttgcttcgttatcaacagatgttcagttcggacggccatccgacgggaaagggcatgttcatcttgctggtcgggtgcccagatgacaaagttactcagattgggactcattgttcgtagtggttttccaagaaagaataaagctggtcgtgtgatatgcatctatggcagaggcgactactatcactgctgctgctaccaccagaattcactagagatgatcaaccagcacaacacgttatgaaaagtcgagtgtcgtgtacgggccggacggccgatgagtcacgcgcagcacgcgtagcccgttggccacgataaccgaagccctccacattttgcgtaaccagttacgcgaccgttctgcgtcatagatgccggaacgtcaggtacaaaagcttgatctccggccaagttctccttgattagagcaaccactcgccggatcattcttcttgaatctatatcatgtctaactctgtccccgagctcgctaaaggatcaaaggtatcgctcgtttgtggtacttgcactctttgccgttctaagctgattcacctctgtttgctccgagtctaggtccttgtttctggagcttctgggtgaggaattcgtcattttcgtctctttctctacagcttgcgctgactaaccagagtcattcacgaacagcttcatcgccgtccacgtagtcgatgagctcctcaaggatggctttgaagtcgtcggaaccgtccgatctgcggccaagggagattacctcaaggatctcttcaagggaaagccattctcttacgtgatcgtcgaggacatcggaaaggtggggccgttatcttccattgcatggtttgaataggtcgtgattcgatgtctgacacaactattctgactattattgttcaggatggcgcgttcgacgaagccgtcaaaggtgtccagggtgttgcccatacggtaaggccaactatagcacatgacccatgatctaccggctatcagaacaagatctgatctgtttgccttgcgctctttctctcacatgtaggcctcgcccttccatctcaaagccgatgatccggaagagttgatccgacctgctgttgacggaaccattggaatcctcaagtctattaccaagaatggttctgacgtcaagagggttgtagtgtgagttcgagttggagccaacgtctgggcggagatagtatgcctctcgagggtttctctcatgtgctgaaccaactcaatttattctgctttgactatgttcgatctctagaacctcttcggtcgctgccgttgccggagacaaaactgctccttacacctacaccgaagatgactggaacgatgtgtccatcaaaatcgttgaggagaaaggcaaagacgccgatggcggacacaagtaccgaggtttgtctcaactccgttgcctgattttgtcattcggaggcatcctgcttataagtatgtctgtgcatataaagcttccaagacgctcgccgagaaggccgcttgggactactccaaggagaacaatgtttcttacggacttagtactatcaatcctccattcgtctttggcgtatgttcttctttgaatttcttttgcccttttctacatcctggtgtgctcagttgccgatcgctttcttcattctgttcatagcccatcttgcaccaggtcgacaagcctgagtcgctcaacacctcggtcgccaacttttacggtatccttaagggtagcaagaaagaagaggatttacctggacctttcggaaactggattgatgttcgagaggtcgctttagcccatgtcaaggcgcttactgtgcctgaagcagttggcgagaggtttatcatctcggccggacccttctgtattcaaggtcagctggaatttcctataaatattgattggtcttgcgtatactgatgcgactcatcttattctctgtttaatttgactccgacatagacctgaccgagagcatcctctcgatcgcgcccgatacccctggagttcccaagggtaagccaggagcggccaaggaaacgaccgacccttcaaagatgaccgtctgctctggagctaaagccggaaagatcctcggcatcaaataccgatccattgaggactcggccaaggacagtacgtataatcttttgttctttctggtctgttctcatgagatgccagcagtactgatggctgatggttgtcctgttgatgaactctgctcttagtgtatgattctctcaaggctaaaggatggtaatcaggtttcctccttggtggcctgtacaatgtcaggccgtgtacgcatgcgtatgtgtgtgcggacggttgtggaacctctttctctagctatactctgtttctttgtgaattgtatctatcattatggctgtatcctcgtcttgagatctgattgatgtcgaccagcaaagagagatgataaatgacgaccgcggcgagatgtttagatagaattcgagccaggtcagctgcatatctaaatatttagccgacattgccgactttgtcggagagaagaaggcagcggagagagaatcgcaaaacattcatcctcttcaactaccatctccatccctcatcctgcccatcccctgtttagacgcaagccaggacaagaagatagaaatgcctctcatcaagattgaccttatcaggggcgtgcgatccatgccggagatcaagaagatcgccgatgtcgttcaggaggtcggtggactgattatcttttgtctctttttgaccgttcctctgctttggtcttactgaacgagaatcgctgactttgagagtcttctggttatggatgagggaacacagatcatgctcgctaaattcagggcgccgccgcgaggtttgtccccttcgtctcctcaaagtcggcaccttggctctcttgtctaactagatatccctatttcttgaacgttcgggaacaacagaccgataccaggtatgatagttgttcgttttgtgtgaacgaaaggatctaatgaattctgactcgaagcttggtcaaacaaaattacaaaacacccgatggaaaccggaccgccagattatcactcagcacgaagagggcgagattatctttgaggacacggggctcaactttgagcgaaccaataagattgtcttcatccaggttcgtgcactcgattcacaaagagaacgatttgatcgggtacagcttggcgaacgctcattcggaattgtgcatgtgtgtgcgtgatgatgaacgatgggggggtcttcgaactggacgtgaatcgaacgatcggccaaatccgggcgcttagattttccaacaaggacgaacggcagaaatgaagatggccatctataaggatcttgcaaagagattgcatcaggaatgcgagtcagtttttggccttccacttcttttcgtccatttctttcctgtttctctatcttgtttaatccctttcgagcatctgtcgaagaaggatgctcgatcggttattgctggaactcaagaattgaagaagctctcccgctctcccttatccaacagcgtccctcctaccgacttgatggtcagctgcaatgagaacagttcgttcattccttctttgcgcgaaatttgaaaaatcgcaaaagtgtctgcgctcatcaccgctctttccttctcttttcggtgttatcatatagccaaggccgattggtcttttggaatgggacgagctcagttcttggagggagacttgtaaagcaagaagagagacaggctcaagaacaaaagatgattcgcttattgaaggtcatccgggggaagctcgtggtcaacctttgtttcaatttttttgaggaacgtactgtctagaagaggtctcaaggtgtcattattcgtcgatttgaccggcttgctgcattctgcatacttcactttcctcaattataatgctgttcgcttatctcctcggctgtggcctcccgtgtgtatcatattcaaatgaaagaaaaagtttgcgtaggagacatcatggtcgtgttcgacttacaaactacgaactcaacgtccagatatgtattcctgttcgactgatcccaacagtaaactttgcgccatccggactgatgctcacaccgatcaattcttcgccttcggctataatggcgcagtctaagatcgagtacggttcctgcggtttctcaaattgaggtacaggttctattgccgggagaaaagaatcagagaagcgtataagaatgttgtactttcgaccgacaagaaacatctgattgatacagaaggagtcggaagcgcgaagaaaaagcgagcgaacctgtttttagttgcttctgcttcttgaactctttgcctggtcttctgtgaggttctctcactggcgctgaatcatctgaggcaacttctaaatcactatcctccctttcttccttcttttcttggattccttcaacttgtgaactgttcagatcgctcaactgactccttgtttccaattcgttctcttcaagcacctctttattctcagtttcggtggcgactaccggagttccagcgccagaaccagatccaagcggtccagagaccaaacttttcttctgtttcatcgtcagaggcgggataaatccatcggatgctggcgttctatccggatcaaacaggacaagtcgaccgatcagtgggattcctatcaatgagcttgtaatttctgatcccggacgaccggtgggtgaagtactgatgaacggtaggtgtctacccatgagcgatatccaatagggttctggaccgatgaacggatgaggtatgtcggataaagcgactggtgaagttgacggatccgggagggtcctttgaggaccagcctcgatgggagggagatacgttgctaggatattcatggatccttgtcatgacaataaagtgtgttcaacgagaaagttcatcccacaaccagaaagttcgtaagtttactttttctccccgagcctccttctattctctctatcatcctctttcgggagggatataagggaaaattaggcagtacaagaactcactggatttagattccgcatactggctaccgatactctgaaggccagttccattggactctgcgtacctgacgatcggcttttcgtctgtccctagagggaaatgtcgtcttaatcccatccactgccacttgatcgctttcggtgctgggaattgctggtacgagattaatgtgtcttctccgtgccttcagaagacgaaacacaacacaaagtgtttcatgacggttatcatctatcgaacgcgaaaagaagatatctaggttgtcagaaaaaaaagaagagacataccagagaacactattgatgattccatcatgaaggagcttagtggaaaagagtggcgtatagcctataaacaacttgtgcgcgcccttaggaaaaggcgaaggaagcttaggtagaggccaaatcttgataatatagtcgagctagaattcaatcaagcattacatcgtgtgtcagaaaacgaagaaatcagcttcaaacaacatagagcttaaggaagagaagaaaagaaaagaaaacaagaaaacaagagaacagaaaacttgagacatactcctccggttactagcagaggaagcgtaggatgaaagtctaaacacgtcactccttccaaatgacctccaggggcctgtccgatgagaacagctatgagaagtgaaccctcgttgccttgagcgaccgaaggagctctataagccccaacagaaggttctgatccgaaaacattccatagacggatagttgtgtctttcgaagcggaggcaaggacctaaagatacagtatagtcctgggtttcagaagtaggttgagtgtatcgagtactgatagaaagaggacgtacgtggggatgagaagggtggaatactaaagcgtatacttcctatattcattcgaaaggtatgtagccccagatggttcatatcagcacaacatgacgcccctacaggaaaaaaaaacaagaggatccaacagacttctccatgtcctctgagtactctgagtctctccgcaggttctcccggatctacgctcagcctccaaacatatattaaattacttctcccacaaaacgccacgatgggctgtaatctaaccggatcataggaccaggcaaccgtgtagatttcgtcttctggttcctgaatcttgagaaagaccttgtagggcgattgtgctgtgagcctgaggaaaagtacctttgagggagaagatgagaggtagtgagctcttgacgaccggtttagatgtttggtcgacagaaaaagtcgacagaagagagagactcactccgttggattcaacaacagctgctacattagaccattctttcaccaagtcgacccagcgagactgccatggccgaagtgtttgcttgctgatcattgtaggcgtgatatcgaatcgtctgagggtttgagggctccatggcgagaactggacgtgtcgaagtactttctctgttggcggttcgttctatgtcagttaggaacgaagacggatgaatagagaagcagcacggtcggatatcaagaagaagacgaatagcgagaaataattcactgatcagacacatatgattcttaactctctacttccttcagccacacaagctcaaaaagacagagataatcaaggaggacctaccggctgtccatcgactgatggaagcttcttcttccgttccacttgcgcgttgggttttcgaggtgcataccacgctggtctcgagacgtaacggaggttcagtggtcctcttgcccttcggttgacattatgattgacatcaaccggtggtgtcggtaatggtagtagtggtgctaacgaggaaggtatggggtgactgttgtttgacgaagctgtgaaaacaggggtaagggaaggggcagagagagatggtctagacatcctattcgagagatatccagctcttgtttctttcaatctatgaccagcaagagattgagcagttgatgatggcgatgaggacggtttataattgcagtggttgttgagaaagaatagacgcgaccaaaagagaaaaccgacggttctgatcctcttatctaatcagcgttccgtcctaggaaactctcagatacaacttcaacatatgtgttctcttctgtctggtcaagatttagatatgacgatataaaccatgacatgtatattctctacctacaaagcgtaactatcttagcaaaagagcgaatgggggtgttgggtaatggagggaaataaggtgtgaaggggaaaggaaaagtgaagcatcaaatcgagggagatgggagcagctataagataatgatctacctcttggcggccctcttctcctcgagctccttttggtaggcagcctccatctctcgctgaacattgggcatcaccacagtgtgctcctgcagaatgagattaagaaaaacacacacagttcaatatcaatgtaaacatcaagatacttccttttgatacaacgacgatcgtatcgacaaagaaagacgaaccttgtactccatgctgaactctccctttccttgggtcattcctcggagggcggcagagtatccaaacatgtcattcaaactgacgtcaaccagggcagtgaactcttcgtctcgagtctcggtatcgtggatcgttccctttcgctggttcaagttaccgataacgtttcctgcgaggaaaaggagaagaaagagagtttaatgcgccgctcttgattgacgttgctctctgctcaggtctccccaaaagaagaagaacaaagaaacagttaacgcataccttggaattcggtgggggcgatcacctcgaccttcatcattggctccaaaatagcgggctttgcctgcttgaaggcctctcgaacggatccaatggcagcagtgacgaaagcaagctcggaagaatcgacagcgtggaagccaccatcctcgagcacgtatcgaacacccgtgatgaccgaaccacaaagaggtcccttctgacaggcttgcttgaaaccctgatagatatgaaacgtatacagcgagacgtattcagtttctcgctttctattcgtttgaaagatgaaacctatttgatgaaatatgcaaaacgcaccttctcgatagcaggcaggaacccgttggggatagagccagcgatgatctgagactcaaactcaatatccttgctcgtttctggatctctctccattggctcgagataacccttgaccttggcatactgtccagatcctccggtctgcttcttgtgaatgtactcgaaaggagcacgctcagtgattgtctctctgaaagcgaccctgggtttaccagtggtgcactctacgttgtactctcgcttgagtcgctcgacgtaaatctcgaggtgaagctctcccattccagaaatgatggtctctccactctccttgtcgacgtgtactcggaatgtagggtcttcctttgtgaacttgttgagagccttagaaaactgaggagtctcttttccagtaggggtcaaagcgagggagacgacgggctcgggaacgaacatcgaggtaagagagtacgaggtctgcccgtcgttgaaggtatctccggacgagcaatcgactccgaacattgcacaaatctctcctgaaccgaccgaatcgacttcctccatatcagcactgtgcatcctgaccaatcgggggaccttgatcttcttgcccgttcgggcattcacgatcgttcctcctcgcctcaaagtaccctggtagatcctcatgtacgtcaactgaccaaatcttccctcctccaacttgaaggccagaccgaccaggtttgcatcggctgcagggacaagcttaactgggggagcgttagcaggcaaactgacatcgagggcctggttatggacctcggatgggttgggaagatacgagatgattccgtcaagcatcggctgaacaccggtgttggccaaggcggaaccgaggaatactggggtgaaggaaaggttgatggtggctcgtcggatggcgccagtgatgtcggtagaagagattggcttttcgtcaaggaaaagatccgaaatggtctcatcaacctcggcgagctgctcgatcaactcgtttcgcttctctttagcaaattcaaggatatcagcaggaatttcgtccgtctcacgaacatttatcctgaacacaataaatacaaaagggtaagtgttaaagggaggaagagatatgagcgcgcgcgcacacccgcacacccacacacccacacacaacaacggcgaaaaccaaagaatgaagctagacaaaccctttgtgaccctcgttatagattgccttccacctaatcagatcgaccacccccttcagctcactctccgaaccgattgggacttgaacagcggcagcaggcttcttgagcttgtttctgatctgctcgatcactcgccacgggttagctccttgtcgatccatcttgttgatgaacgagattcgaggcacgttgtatcggcgcatttgtcgatcaaccgtgatggtttgactctgttatgagggtgttttttttgaggaattgttcagtacaaattactggacaggaaggataagccagtaagactgagaagacggaatgctgctcacctgaacacctgacactgcgcacaataccaaaactgctccgtccaacactctgagcgctcgctcaacctcgatcgtgaaatcgacgtgaccaggggtatcaatgatgttgatgttgaagttttccctcttctcgccttccggagagtcttttccgaagtgctcgggtggcacggcatcccagtcgcagaaggtggccgcggactgaatagtgattcctttctctcgctcgagatccatagagtccatcttagctccaacagagtctcgccctcggacctgtttgcagagaagttgagaacaaagtgattcatgtatccatgaggttctgtacagtcgagtcgtgattcaaggaagttcgatgcgctgatgagcgggaacaagaagaaaggatatacacacttcgtgaatatctcgaatacgaccagtgtagtagagcactcgctctgtcagagtggtctttccggaatcgatgtgggccgagcttcacgagtggatgaagaaaaaagaaacatgagtgcgtaagttctgatgaaagcagatacctacacacatacggaacggaacgggccgattcgattggcagataaaatcaaggcaaggaagcccaaattcccactcacattccgacgttccgctgcctcgagcagaaagcttcatccttcgcggtcatattgggtagaacaggttctggccagacgacctcttccttttctccatttgcggcctcggtagtggccagtctcttttggaacgaggaggctccgatccgagaaatggaagaagagagcctggatgtgaaaagaggcgctcgaattcctgtggaaacgagacgaacggaaggaacaactacaggccgagagacctgagatgggatccggagagaccttgttggcaatcgtctagcgaaggtggacatagcactgcacactctgtatctaatgaacccaagggatgaagagcaactctttctggacgagtgggatgggaagaaaactaggaaggaaaaagcggatgcgggggagacttgggcaaatcgggggtaaacacgtgacatataaacacgtgacacttaaccgaatagatgaatcgatagctgatagataagcttatcttgggaccgaggaccgcgtttggcaagtcacactccatttggccatttaagacaacgttgagcgatctcttggactcttcccgttcttccccttcttgtctcccacccatccactcattcacccacccacacacacacacacacactctgatacacacacatattatgctcctttccacacttcttacttcatcactcatccttcctctttctgctgtagctcattctcattcccactctcacgcaaactcgagaaagaccttctcgttcggtccccaccactcccacgcaaagttccagctcagcgcttcgccttccaacgggccactcggtggactcgtcggtagagatgttagatcgcctaccgatgtggctagagttcttctcgaaaaggaacgaggaaaggagggtgtcgattggttcctcagagatgatgtaagtgggcacacgaggacggctgtgtcgtttattggctcttatcgcatcatatcaatcggtcacctccgctgatccgttcctgacattgtctatccttgtttctcgtatctcctctctctttcatcagtcctacaccgaccggaatactctgatcactcatatttatgctcgacaacttcttcatggccttgaggtcgtcgatggagatatcaacatcaacgttgatgcatccggaaagatcatctcttctggaacttcggtaagtttatatgagacttgtgcttgactcgacggatgacacgcttagctctattcctgttcgtcaacaaccagttctacgaaggatctgctcccactcctgatactcttgatcatatcaagtcgcccgccgatatcaaggccaaagcggcccactgtgcgacgctcacacagaccctccggtccactactgagcacttccgatctctccttgcctccctctctcccgaggaagccgaggaccacttggttcagtacggccatgaccagatttcatttggaacgcctgacgtttatgatgacgagtcctccaccaaggctggtgttgtctccgaaatgggaacattcgaacttgacaaggtttcccagaccgtcaaggagctctcgaggctttatcaaggactctgcccctctcccatcaaggggtctcttctcgagactttccatcaggctacatcgttcgctgacggttctatccagtccggagctggaccagctctcctcaagttcctggcattggtccacccggatcaaagcacaatcgctcagcttcattcgaacccttcgaagatcttgggatccctcgagtcggtgtttgaacatacactcatgccttccggtcactcgaggactaccgagctgctttctggagctccaggagtcaacggtcccgctaaggcttggatgggatggatccaggaggatggcggcaaggacgtccggctcgtatggcgattcgaggtcgatctcgggagctcctggtatgagggagccgtcgaggttgggggcgaccgaaggattctgaccgccatcgactgggcgagagatgctcctgctgttgctaacaagggaaaaaaagggaagactcctggtaagtaacctgtgttgtcgtttccatcttgatacctacagccttactgactctttagcatcgcttccttctttttagccgagccggttgtagccaacgccacatacaacgtctggccctggggagtgaatgatcctgtatctggcaagcgagaattggtcgaatcacctcatgatagtatcgcttcacctgctgggtggcactcgatcccgctcaacagctcgcccttctctgcctcgacgcctggagtgatcaacaaagacggatggacaaacaccacgactacgctcggcaacaatgtcttcgctcaggagaattgggagggagccagcaactgggtgaacaactaccgaccgttgggattgaacggaagcttgctctttgatttcgagtatggagccgaggagggccttagaccgttcgtactgttttgttctggaacaatcctgtttgcttccgctaaaccaagttttcacaatctgtcttcattcgtcatgctctatcagttctgagtacatcgatcttgcggtgactaacttgttctacacctgcaacaagttccacgatctgatgtaccgactcgggtttgacgagctttccggaaacttccaggagtccaactttggaaagggaggccgaggaggcgacgccgtcatcgccatggcccaggacggaagtggaacgaacaacgccaatttcgctactcctcccgatggaacgcacggccgaatgaggatgtacagctgggatgttgctaccccatggagggacggagaccttgaagctggaattgtcatccacgagtttgctcatggaatgtctacccggttaaccggtggtcccgccaactctggttgcttgggttggggagaggctggtggaatgggcgaaggttggggagattacctcgccactcagatcaggcagaccgatgcgaccacggaaggcaagggtaagaacaccgacttccctatgggttcttgggctgcgaaccgggctggaggaattcggaactatccctactcgttgaacgagactgtcaacccgtccacttacaagactttggacaagtcaggctactggggtgtccacgctatcggtgaggtctgggctcagattctgttcgtcatgaccgagtctctcgtctccaagcacggccactccaagacgcttttccctccgacgaacacttctgtgcccaacgactactatgtcaagacggccgagttcaacgctcagggcgagctcatcaaacctttggtgcccaagcacggaaacacattggctgttcagttggtggtcaacggcatgaagcttcagccttgccgaccttcgttcttcgcagctcgagatgctatccttcaagccgatgaaatcctcactggcggtgagaacgggtgtgagatctggagcgcctttgcctcccggggacttggaccagaagcccagatcattggatctaccccttggggtggaggagtcaggaatgaggactacgatgttcccaagggagcatgtgggaagtccaagaagatcaattagtcagattggtgtccttgcctcgtttttttccatagaccttgtttctagatttcctttagactcgttttcgaatgggctgattgttctaggtggtgtgtggactttgtagtatacccttttctttttgttctcactctctcctttcatttttactcaaacatgtagcttctgtgtctgtgtctagtttatggttgtggtttgtgtatcgcttgtgtgttccgttcttttcagcatttgatttttctcatagctttctgtttgtgactgtggttatcgatgaagactatattcgcatcgttttctgccttttgccagccgcgagatgatgcccgaggtctgtcaacacctaacgtgcacttgagtcgctcttgagctttgcgccttcttctttctgcaacatggagtctgatagcacaaatccatgctcagttctcacaaggccaccggagctatcacgaagagctaggtcttcgtccggaccatccctctcttctagactcgtcctcacgcttgcctgggcatgctcgacttgcttggcccagacagtcatcaccaaccagacagtcaaggtttcgatcccttcactcgattcttacctcctctcttcttcgttagacgttccgctactcttatcaacgagcgaatccactgatgtcggaagctctatcaactctaccgaccagcagccagagcgtgtctacctgagcttttctttctgttcggccttctccgagtcagacgctttcccttcgatctttgtgagcaactcttcaggggtgtcggtaccttcatccagctacctcaccaaactgggaagttcggactcgccttcggatgggtggaagagcagctcgacggacggagtgtggtgggtggagttgtcggaaggctatggaaattggacaggttggaggacaggtgtagggctgtcggttgctgtctggtcgaacgtcggcttggctggaacggttgagggtgggtatgtagagataggcgtgagctcatctggtaagtcttttaggctttcggcaggcaagaggtctctttaaaggaaaggagaaaatccagagaaagacaatttgctgagagcgaactgtggatgacttttatctccaaacattcgattttttgaactcaggaatccttcatacaataacggacagtcttccagtactaggcgatacgaccaattcacatgcactagtgttcactcctgcattcgactcagcgaacggtactatagctcaacagacctacccgaactatactcttcctccaccggtctttgataaggatataccaagttcgattccaaatcaaacgctgtatgtgatcccgacttcatctttcaacgtatcctccgggatgtcgctctcggtatgtttcgttcgttcgaactggaattctgtaggagtaaagcttcttgaggacaacaggacaacaacgttgaatgccacagaggacggttggagacagcaagtggtgttgagctcgggtgtaagcacggagaacgcagggctaaaggctggagaaaactacacgctttggtcttttacggatacctcaacttcgcttggtgttgctggttccggccagctgagcgggccgatcatgtttcgaatgaaacaaggtgaggtccttgttgcgtgtgtttctaagtttgttttcacgttcgagactgtttccttgactgacccttttgctttctcttgtgcggtaatgggttctcctctcgttggcagacgggttcccctgtcctttagtacactccattcagggctgtccgacgataagctacgctgcggcaatctcgttcgatggttcggatccaacttcggtggtgacatcgcttccttcgtcctcgaatgacacgttgacggagatgctggctagcttttcggccacattaggaacgatggcttgtggcagagacatgtactcgccaatcagcacttgtcaggactgttactttgtttatcgaaactggctttgtggctctttgtttcctcgggtttggcctctttcttctcctcttgtcatggagtttcctttctatctgagcgctgaaagaatcaacatattcatcttcgttctttcatagtgtggcgagactccgtcggcggatgatcccggttcatcgaccttgattgaacgaacgcccagcaatccacgattaccggcgagcgtattatctccaccttcgtacacttaccaagaacttttgccctgcttggaaacatgtcacatcgtggacaggctttgtccggtgttcctcggctttcgctgtccgttcacccaaggcggtgttacaggaaacggtacagccaatctaagttatggggtcgacttggttgatgggctgcatcaaggtgagctggacgggcttggtccgggtgatctaggaatgagcgccgatcgttggggaaataagcggtgcgctctttgggaaggttggtgggcctaagaaagtgttagatttatcatggcgagtatctcaatgttattcgtcggtgaattctgtttcgagcactgtttgacgaagtttcatcactagggttatccattgaacatcatactaaatgaagaccttcgatgggttcatcttccttctgtcttctacaaagctaccatcttgattgatttttgagtgtgaacactggttgtgcgcccaactcgtcaaacgttgttgaactttcgagaagacatcctgaaagactgaacgaacgttctccgcacgaccgtcgcatagttcttccatctctgcgaacgaaacgcgaagagtggtgcgatttgacgaaacgaaagtagtaacaggcaagatagagaagaatcaactagatcgcttttgggctggctggcttggctaagcttttctaagctgagtctggactagacgagccggaacaacggatgacgatcacgactgcggacgtaaatagacgtacgcgagtcgaaattaggcccttctctcgaaataagatagaagaacctctattctctctgccatgcgaccgaactgtcctatgaacccaaaactctaagtatgtttgcaacgagggagaggaagaacagaacccagaggcactgtataggttgatttgaatttcaatcatctcttcttgagcttaatcagtcgatccttcatacaaaaatatccttattcgatcgtttatggttctgtgcaccaagtctttcatttatacgggtttaacctctcggggttccaacccaggtcgagatttgactgacttttcattattggaggatgaggggtaggaaagcaagatgaaaaactcctgatcacctttgtcaccttctccagattgaacaaggggcaacaagccagaaaaagatcgtctatcaaagggaagctatcaacgggccgattagatgggctgaatgttccgaatttaaaccagatctttctgttccgtccagtaatcttcagacatccgtccttactcactctacttactttacttactcaactaactctctccacacacaaagctcgtcatcgatgactggccgggttctagtgtgtttttaacatctcccttcacagggttaacattctacgagagaaatccgaacgttatgtcaattcgaacgttgtttgtttcctttgacgctgaatcatctcgccatcaccctttctctccctccgagctttgatacaagaaagtcctgaaaaaagtgatatgtcaaccttaacttttttttaagagtgatctatagagaggaaaactgatgggttcagacactcatttcttgctaaccagccaagctttcttcggctcagctgactcttttcctggcttatccgcttgctcactatgcctttcctacaagcttcaatctaagatccgaatgacgatcagaccagattgtttataggtgaatcttcttgtttgggtaaaatcaataaatccgactgaactcctgatgttctctttccctttcccttttcctcttcttcttttctttttccaattagcttctgtttcttgtttcgtttttagtggctcacgctttgacattctagtccccatccgatacgatccgtcgtcacattaccccggcatgatgcagaatggggtgaacctaagcacagaagcggacccccaacgtcgtctgcttgacttcacggacgaatatggtcggttggacgagaacctcatctgatgttgggaaagagcataaataggtagctatagaatgggttgtcctgagtttctttcttcttcatctcatcttcactctcactctcactc

SEQ ID NO: 666 - DNA, 21528 bp, Xanthophyllomyces dendrorhous
tcactctcactctcactctcactcaaacacacacaagcacttactcttaccctcactctccaaacttacccacacaatgctcgtccttcctgccatggccatgttcttcggagcatcctccgtccttgccgctccggcagctgtagttgaagaccgagccctccttggtggtctccttggcggatcgtctacctctacctcttccgctaccagcggtctccagagcttgacttctaacttgctctcgaccgtgaccggtttggtgtccaccatcgagtctaccgtcagcggtaccgacgcggcctccctcctcaatgtcaacggggacgtcagtaccgatggactcacctcgaccgtcaccggtttgaccagcgcattgaccggcgatcagatctccaccatcacctctgctcttgacgatattcctttggtcggtcagcccctccatgatctccttgagaccgtcctcgagctcgtcaaccagctcggcttggccaatgtcgcttccggtgcgctagcttctggcgcctctggttcctcttccggactcggaggtcttcttggtggacttctcggtggaggagcttcctcggctaccaacctccagaacatcatcacccaggtcgtctctggactcagctcggtctcttctggagtgtccggtgcctctggctccaccggcttgaacgctgtcactaccattcttgacaccctcaaggacagcactgagtgagtttccattttgatttcagaataatctgatacgctcgaggatctgatactcatctccctgctcgtttacagcaccaacctctctggccttctcggaaactccaacaaagtgagtgtgtttttatttgtagaatttttctcattcagaaagatgtgcgcttaaagaccgagcttgacctcttttttcgttttctcttcttcagatcgtctccggcttgctctccactgtcaccggacttttgggagccaacggtctcctcggtggtctcctttccggacttggactttcctctggaaccagcggccttaccagccttctctccggactcggacttgactcccttacttccacccttggcctttaaataaccttcatacactccacaatccgaaatgtcttgcctgttttgttcttcctccgatcggctgaagggatagtctttgaaaggtgatgtggtcggtgacgaccggcctatttttctttcttctattgattgttccaaagcgtacatatttgtagccctgtctcctcttctctcctctcctctccttatcgatctgtttgtccgtttatatagcccctaggcttgaatattgtaatacgttcatctgtcttttcatctagtctatccaattattatacattgcagggtacccacaaaatcacgtgttgcttgccagccacatatttgcatccacaagcacagcccactttcgttaccccggcccgtatagaaacgtcatagtagccaatcaattgtatattggatatcttcatcgtgtgttccatcatcgatcgtcgatcgggcccgttctagcctgctttcttcatccctggctttgtcttgccgccagagttcatgccaaagatgacgatggagcatgattcgagatgaaggcagaagggacttgagtttcgggttttgtataaagatacatctgtctctcagtatttctcctcttccttcttttctctcctcttcttgtcaaacaacaagtatctttgacactacttccttacttcgaaaagaaagagacatgcctgaatctgagaaagagtggagaaactcggcaccatacgtgatcgatgaggagaccgggttgaagccaaaagacttcaacgtccatcggggcacatgtttctgtaataaggtcaaatggggattctccatcaaaggttcgtgtcgatcgccttcctccttgtatatcgttgtcctcgtttggttcatttgtacgaaggaagactgattttgttccttgtgactcctctcttcttctcgtcaaccttgaatctaaactcataaatttctacagacgccttagactcaaaggtatgagcttttgatgagcacaacctcctgtagacatagctcgcttacttctctcttggtgtcgttctttcttcttttatttctgttctcctttatctctcccgtcgttcaaaccgaatagtactgtcactgcaccacctgtcagcaacttcatggagctccctaccaatgggctgcgatcttcccaaagaataagatcttgtttgataaggagtcgatcgattatctacagttctgtcagtctgactttgccctgtctgtgttccatccattcatccgtactgaccgggccgggaacctcttcggtttaactttccactgtaacgccttttccccttgggtctatagacaactccaagactcaggaaaacagacatgatatgccttgcaaggtagcttgctcagattgtcactctcccatcatggacgaaggttcgttctcgctcgtccctaaatttgcctgtttcctccccctggtccaccgccttatttcatccgtgtctgatcggattcaggcctacaccccgataaagctaacgtaaatgtcttgcgaattctggactgacatcctacaggtcggaatatgtgcttggtgttcccaacgttggttgaagggattcgaacagacagagaaacggccaaggcgttcgaagtaaagtgtcatatcttttatgacagacgagtcgagttggtccacgacggtaaaccaaaatgggccgaggccaaggtacgtttctaatgcctattctagtcatttgtcttctttttgcgctgttgtcctgatagccacgcttcatcgtttgaaccgtcggaacacggctttttaggaggactctgacttattggacgacgatggcaacaagatccaggatcatcaggatgctccgaggaagaagaagcgcgatgaagaggaggacaaaaaggaggacaaagaggataaggaggaaaaggaggacaagaaggacaaggatgagtagtgggttgagggtcaattttttctttcttttatccaagcaggttgtaaagggttgaagggaatgggtgtcatgggggtttataagacacaaaaaagccatacgattaacaatgtatcgattagcatgtaatctttcagtctttgcgctttccttctctgccttgccatgttgttcacaattagccattgaacgacggccagaataccacccctcatgtgatgagaaagtgcccagtgttctttagcgatctgtcctgtcctacccgtccaccaaacaaggctccattccttatatcttcactcaagctgggtggaactcatctgcatcaaagctttatcagattccgatccagtggatatgaacgagatcaagatcccgccggacgtaggcaattgactccgttcaggaagtggcgcaggcagccgaagtcgtggcgggatctattctcgttgtatttttgagaataatcacgctactggcgtctacgattactaagagcttccactcaacggtctccaagatgtatgtggatgtatatgagtatgtatatgtgtatgagcacacgagtcgtttatattgaccaacgagcaagtttatttaacaaactcacgtggccttcggtcggttgtaaccaatgggagtggatgtaacaacgcccaaacgcgactaaacacaaacgacgatcatctccgtccagcctagagtgagtagtctgttgtgtatgctgagtgtctgtcgaagaccttgaaagatttagtgatggttcggatgaaactgagggagagaggaagagagagtacttgaacggatcctcatattcagatcaatgggcgcgtcaatctcatccatcatcctctctttgacttctgatccaggtttcccgccagctctctcttaaaaaagtctcggttgtattcaacccaaagaatacacgtctgagttcctctcaaggcaatctgttacagatgtcgaccgttactgtccattcatcaaattcaccaatgtcttcagaaccggtttcgaatggtaaagcacaggagtccgccaaatcggccaagaagaggaagaccagtagaggtttgtgcatcattttgaattcgacccaatctctttggggagagggacttctacttttatttggatccattttcatcattgataccgagcgtttcaaaaaagaatctacctatcagctcactctttgttcttttcttcctaatctctcctttgaatttcgtatctgtgttctacagcttgcctaagttgtcagaaaggtaggcagaatcgtggtctacatatccttctctcactttgtgatgggcagatatcattcctagagatgtacttgactgagttaaccgtttgccatccggcattatcttttctctcttgcctttcatagctcatcttacatgctcggatactaggccttgtgtcagatgccataaacgagacgaaccttgtatcgagggagagaagaaaaaagctcgatatttgttcacgccggaagaactcgaagctttgaaactggccaagcaggccgaagcatccaacggaccaaagtcaaagcgagtcactggctcggcaaccacccaccagacagcttctaaacagagaccgaactcgaaatcgagtttgccaaacaaaaagtcgaaagaggccatctcaactacccatggattgtcgacttgtgctaacgtcgcgcagccaccacctctgacggccggcccgtcgtccgtacactctggggatcaacatacaccgtctccttcgtcgtcaacaaacccttcatccatcccaccttcatcttcccgtgcttgtcagtccacggaagattctcatccggacccatccaggattattcaaccatttaccaaccttcaagcgaagccaattccggacgagttcaaggtgtttgtaggcaagaatgaataccagcgtagtccgaatgatgagaatggtgatcaaggttgggaacatggaaaagataacagaccgagtctgagctcgacatcgggagagcttcagtcatcctcgatgaatcctcagctatccccaccgtccctctcggctggattcaacccagcaagttcaactgatgattttcccagagtatctgccaaaccggctcatctttctggtcgctcggcagcaagtgcgctttccccagatccacttacccctggcttcctcgcgacgctctttgctcaacatcaagatcaccaacacacaccgccgcaaccacaaacgggacctcctcctctccagccaccgtctcaccgaccgttgccacaacaacaacagcaacagcagcagcaacaacaacaattactcggttcacattcagcttaccccactcaatcgaatctgttcggtccatctcaagatttcgctcctcagaaacaccagtttgatccgtccgacgtccgatcgatacctccaacagatccacgggaggaacaagagatcgaccgttcttggcctcgaggtggagatccatcgttctggaggagccagatgtctttacatcaacagcggtcatcacatccatccactctttcacagtcacaacagcagcagcagcagcaacagtcactaccgacatcacaatcacagtcacagttacagccatccacatctgcttcgtctgttcaacccgactcgtcacgcatcgacccacaaatgaatagattctcaacttcattggggctcgattctcaacatgcccccgttgaacactcgcagtcaaaccagtccgcaaactttccttttggctcgcagtcacagttatccggccaaaatcaaccagactcaatgggaaataggacaccaccacctacggaaggtgaaagacctttagacctcttgaaacagaagcatggtttgtaccggccaggcaacgaaggagaagacgacgaccgactcaggacgaatataacgaaaggtagatcaggcaaagaacaaagcagaattgtcgacggacagatacgaaaaccagcagataagagagttacccgaccgtaccaggtcagtgtcttcttccttctcttgattatctttcctcttgcggacaaaacactgaaatttgggttttttcgaattcatcttttcgatttgcctgtttcattctccttttctgtttgtttgtcagtacggaaaaacataccggcggatgatcaaatttgctagagaaaggttcgcccgtcgtgttctcgtcttctgtataactgatcgactgtggtttcttctcgaaaggaatattcgaatctgaccggttggtctgtctctttttatcctgtttacttagatatggtgaaatggatgcgatgagattggtacagagcatagccgagttccgaccaaagatgctctccatgtcgtgagttcaccctataaattcttgtcttgatacctcacaattgatccattgaacgtccttcctctccgcttctcgtttgctctgggctgttgggatccagagcgaatcacacaacgttccaggacattcttctcgaagaagctctcctggcctcgttatcagacttgacgagcactttgtttcccctcacaggtacaccgactgccatctggagacggacaggcgaaattgtggctgcgtctccagagctctgcatcctcacagagtgggcggagggagagctcctgtttggggaccgcgaaggtgagccagtgccagaaggaggaagaatattggatgagtgggaaggaaagcacatctgggaaatcatggaaaagcaaaggtttgttcaggctgtccttttctttttctcttctctaaaacttctagatacgaatgactgatcacgatgtgttgatcactttcgatttggtatgatcagttttttggagtatggcgagctgttcacaaagtgcgcatttgaagggacagccccgtcgttcgatttgacgtgcacattggtctctccagatggtcgacccgtaacttgttctgcctgtttttcaatcaagaaagatgtctgtcttacttccttctttcttgctacttctgagctccatgtgttcggaggctaacgcttttcggtcttcacaccacgtgggttattcgttcagatctttgatctaccaagcttgataatcgggtttgtcctttcttgtctcttgatatgcccatagatgtgattctctgttctctaaacaatcgggtttaatttattttcattgttttttctctggggaacgcacaacaggcaatttctcccgctgctgtgatcttcttttcagccttttcttccccctttgttttttcttctttgggtggctttctgtttcaaacatacgttttccttatcttttttcttcctgcggtctttcaattgagtccgtttggtttctgtggcttctcacgccccttgctttttctctggttctcttcttttcctctttcctctctatctcttttcagatgatgttgtaccgatgcatttctctgatactctcctttcttttctttccgtacccatcttcaattttccacttacttcctccctttttttagcttcccttgttacttcatgttcttcctccgagttcacagcccctctcccactcgctccggcacatgtactctcttttcgctcttctccttctctacttgcttcattcgatcttgtttcatttcatctcatttcattccattcccatcccatcccatctcgtcctctcatcgtcttattttaacaccagcgtttctcaagatgtaaccacgttctcgcatccatgcttccgacctgacatagctcaaaccgatccgttgtgatcgcagactaatctctgacctcgacacaaaccaaggagacagcaaacggagagacggcaagcaggaacacgaaggaaaagaaaaagaccgaggggaagaagaggaaaccgaagacgacaacaaagaaaggatcgacagtacatatgagctcgataagaacaacaacctggtctttatctcggatcatcctcttgcgatcgtgtggcatgtcaagagaaagagagaagaaccgagaaaccgagaaccgaaagtgaagttagacattataaaatcaaccacgcgaggccatttccaaggattgagaaagagatatagagaaagagcacacagaggaaacaaagcgtctaaagtgtatgttgaatgcctcccggaggattcgataggttaatttgaacaaataaaaggaagtaatagatatatgaagaatgaacaagatcaagaacagacatacacgagagccgtagaccatcgagggggaaagagaaaatttgaagtacgcagacaagttaattgggaagataccatatgatgtacaattgttgataagaagaagtggagaaaacaagaagcgaaggaaaaagaatagaaaagaacagagaagacaagacaagtcagagagaaggacgaatttggttctagaaggagccttttccttcgttggctgaatccctctatactgtccgatgaacgataagatctggcagtaattacggttagatagagagggaggaatgtctcaagaatgcaaattagaagcaagaaaataacgaatgctagtttcgacgagttagttcatgtcaacgtcttcatcggcaacagcctcaccatccccatcggcatcggcctcgactccttcgtccacgctccacaacatttcttcttcggctcgaataggcgaggggccgtgctgctgttgttgcagtatccgctgctgcaactcgggagccagtgagtttagcggccagtttcctggtcgagcgatcggttggtccgcgttgttcaacgccgaaccagggacggtgcagagtgcagcgagtgaggtgaagccgattgggctctgactctggtttggatttggggaggccgagggggatgaagcggaggaggacggtgtaggtttggaattgccttgtgcactggcacccatggtcgagggtagggttccacctttcgggttaatatgctttccttgttggatcagtgctagtccaattgccccatgagcacctgagggagaagaacggcgtaatcagcatcggatgatcatatcgcaagcacagtagaaaatcaagaatatgacctaccagagttcaggtaatgatacctcaaaccgttcatctgtcggtaacgcttccaacagccgccaccgacctggcactgatacggtctgctcttttcttcggcttgctcttcggacagaccgttctcaacgccgtcccgaacgttgaaatcgcactggccgactttaagatgatatttcagaccgttctgttgttctagtggaggtggaaaaggacgaagatgacagtgagaacgagaacgaaagcaatatgagagaaagagttcagcgtttctttcttcgaaggaaattcgttcggggagacttactgtaagacttgttgcatccgggagtcgggcagtggtacagtttctggttggacgagggtggaggcggagggatagcaagcagcgttgagggtgctgcggtgtttgtttcgtcctgtactttagaatgttgtccttggacggagaacgagtttggggttgatcgtttaccaagctgggttgcggtcgaatggggcgagcttgccggagtctttgtctgctggggcatagacgagaacaacagagtggtatccaagccagcctttccttctgttctagcgtccccagagatggtgggaggcggaaatttgtactcaccctcccaaaggatgtcggcatgaccaagcgtttgatcgtccgaagggtagtgccacctgtctgttctcatggttgagccgcctctaccgccgttgacaaaagccgctctggcggccagagcctgctttgtcttcttctcattgactgagctcgggactggacttgcgtagaacgatggtgagaccgaaggagatgaaaccgaaggcgacaaagcatggctcgagttggatgggaagggagacaggatggaagtctcaaacgcactgtttccggccgaggccagcacgtctgatagctggagaggtgccgatgctgggataggcgtccgcttcttgaaaggaggcgacgcatcctcgagcgagggtgaacgattggtgatcggtgttgtgagcgtgtaggttggagaggtcgtagccgcctgagtggatgacgagccagcggagaaggagctggaggaggaagacgagccggaagagggcgaatcgtcaaactccatatcaagcaggtctctgtgaggtgccgaaggggacgggaggataatgacatggcaatcttcatactgggggacagtgcataagaaccggcaagatggatgagaacgagcaggatgagaatgagcaggatgagaatgagcaggatgagaatgagcaggatgagcgggaacacaatgatgggaaagccaagagaggtgtagagaactcacatgctcaagtagatcatgcatggaacttagctcctgtccgcagcagttgtagttctggcaataatctgcctcccgattgtctagcttggaggaggagtcttgggtggaatctatagaggtcgagaggtgcatcgagaaatcatgtgtactgaaacgaagaacggatgaataagcggaagccattaaggaggatgaaagagtaggagaccatccacccgtcgataggatggcaaagagaacatcaggacttactcgaccccaccagcttgccagggaaagccgacctccgaaccgacgaacttgcctttccagctgcctgtacgatgcatggtctcctcgtagctgcccatgaccgggaagccaaggccgaaggagcctggacggaggcttctggcaaagggagaccgggcggagaacgagttggacagactgtttcttggtccaaaccctggccgttgaggtaaagggatcggtcgggaggacgatgacgacaaggtcgaggtgtttgataacggtgaggcggacggacggccgttcgacctgggcaccggtggataaagatatgtcacttggtcattactttcgtttggcattgtattcatgatggctaccggtgatgtcgtcgacatggatgggaacccaacagacagacacgactaaaggaatggggaaggcagaggaaaccgttggaaggtcagaggggttgatgggggaacgggaaggaagaaaggtacaagaaggggaagaaagtgaacgtgggctgaaagcagggcagagggccagattaaatgaaggaacagggcgagcgggaggggggggagagaaatgggcttaggcaatagacaccagggcattaggcactagggcattaggcactagggcattaggcaccagggcattgtgcgcacagggaagatatgataaacacaggcaccaagcgcaatactggaaatacatcacgtcgccatgcactgcgggtggttcctagaagagaagttaaaacgggcgcccttgaggaaatccaatctagacgggatcaaatggggtatgtggcgcatgctgtgtggagcgctggccaattctgtccgggcctctccacccatgacctatcggccgggatcatgtccggctggctacggtacgggtgggtaccggctctaaatacgatagacaggcactttctttcatagtgtagactacttgcgtgtctctctctctgagaaccagatcgtcaaggttgatggttggctctgtgatcatttctccttactatgagcctgcgcttggtatgacgaagcttcggatcatgtacccggtctgtttgcactcgtgtccttgttgccatatagttcagcccgaatcgtattcattatggcaggcaggcgagcaagatgggaacattcacccagaccaacagaacacctgctatcatctctattggtcattctttcgccacgcctctttatggttgtcatttctctatccgtgtgttgagtggatgtatcggtctgtgcatgtctgtataaatatacccgtcgatatttagtttcttgatcgaatctgcgatcttcctgatccagatactcatcctcttaaacagatagatctagctcatagtccgatatcagtcagaagagaaaacgttaaattggattcatcatttagttgcccatcaaaccccagcctcatagttaatggggcgtcggactgtacaagaaacaggaattagcccgctcgatcggaaccgagcgaacgaccagatctgtagaatatctgtacgggagccgaggacaagcccgaacagagaggcatgacgacagagaaagatatccttgaacagagcctgcgcacgcagaaagcatcgtcccggctcttctccccatccgttcatgtttctgtttgtaatcctgcaaatattcatttctttcacagtcgactatccacataaacgatgtacgcatacacacacactcctatcttctctctgccatggctacacccatcagcccatcgctatggtccttcccgagctccttctttctctatgtaacaagaaaggagtgccccttgtttgcttccactccttctcttctttcctgctatccatattcattaaaaatgtttcatacactaatgacatatgtatggcaagaattgcgataagtatctgatcaggcatgtgtatgtgtgtacgttcagagcccacgagtacacattgcggagttcttcctatctcttgattggagcgttttcttctctctgcaatcagtgatacattctaatctcggctccttttttttcatccttctttatctaaagttcactcatgtttagtttttcagtctctcgtttatcttcttgtatatccttgtgcctttgtgcgcttgtgtccctcataatccttcctggggcgcgtcaaaccgatcgttctcttggtgctcatcaagctagctccctcaccttctcttttctctgcatcacatgtttacaaataactgctctgccatattacgttatcagtccgggatttcccttgtttccctcttttgcctccttcaccctcggaagaaaaaggaaccgaacaaagagctttagaaagggacacaccatagatgactaaacatcgattgactgtcggcgataacggcggccgaggggtaatgaagaagtaagggggtgattagtgtagtcttgttctcttttcagaaaccttatgtttgtccgtttcgattgctttctgccactttccttctgattgttcctgaatatcatcttggtaatctctatcacctctgatggcaaaggaaaaaggctaggaattcttcggaactacatgagtatctcctttccttacgagacgacgagtgatgatgcatcctgaagaaagaaacaaagaaacatctcaagccaaagcctccgactcgccagtggactttttcttcttcttttccttctttccgtctccattggccgtgttcacactcccgtcctccggtcctccttctcggtctcgctttcgtttcttttggagtcgttcctccagtgagacgactgctgattccgttggtgctataaacggcgtctgtcgtttcgccgtctgattcgctagcgaagtttgttcttgctgttgaagtttatttataaggatgcgtttcggttaatcgttcttcctagtcggttcggaacatcaagagtgaaaaataaacgagaaaaaaaaagaatcgtagaagggagaaaccctcctgaacgtacctcttctttctttgccttcttgtccttccattccttgtccttcgctttcaagaagtactctccgctctccaactgaagatccaccttgctgggcatctgtgccggcgggaaaggcgtatacaccttcttctccttcttggttttcataccgggctgtccgatggcattcgcgccggaaggaccgtcccctgtgagagctcgtttcttggatgatttctcggctgacgtcaagtttcgtttcttgaattctacaaagagtgtacaagagggcgttagtttttctgtaccggggaatgagcgcagaaagagctttgcttagtacgcactgggaaggaatcgatcccacgactcgttagccaatgctgggtctttcgcaagttctcttcggatcatcaattccttcagggtaaagagaatataagagtggggggggaggagaggatatatctttcagctgcaaacacaatagacaccgacacaacagccagagacacaaggtagagacccaccttgattcggtagatcggatgaatgttcttcatacagtcaatcacaatccttcggacttccttgagtgacttgaatgggcccatggccgagacggtgtttccttggacaaggacataacagtttgtcaaaagctcaatggcctgtagtgttttctcgaaacacgatcagcgctcctggtcacaactcgagggtaagagaatgtaacgaaccttcaaggtcgaaccattcggcccgacgattcgctgtcgacgcttgatgaaccgctccttgttcctaacgacgtttccgatcttgatgatatcacaggccgtctcatccccgaagatcttcgcagcctgagcaaggttgactcctctcgccaaaagcttcatcaagtctcgcgcgtttaggatggagtatgggtcatatgtttttcgggtcgttcggacggtcatcgaaccttcgatcaagtcgagtgtgcacccgataccctaaaacgttgtgaggttcgactgtgatcagcacacgtcaagcaaaggcagtgccatcttggataaagggaaagtaaaaaccaacctgtccttcgagaaatttggtgacttctccccaattctcccggaggtactgttctcggtacttcgggaacaagatagcgaaggaggactcttcgaggaatgagccggagatattatccgttggtaagaaaggctcgattttccacttccaatattttgaaaaagacagcaacaagattcaaacaacgggacgaaaacgcgcagatttagtcgtctgatacatctctctttgctagcaacaaacgaaatcaatgacttaggctcacgctaaatagaaaaagaaaaatggaagcagagagaaagccattgtttagccacatattggtttgttcaactgacccatttccagaggaccacagacgacgtactggtcaatatcatcagtgtcccatgctgtacaaatcaaacaagatgaatccgagtcagaatatcgagagctttgcaatcccatcctttactccaacctctaccttcatcatacgttctgaacactcacgtttatcctttctgaaacgcttgttcttgttgacgacaggctgctcgacctgctgctcggtgttttcctcggtatccgccatgaaggatgtgtcttcgctaatactagagagtctgtgtttactgctgtaattgaaatatgaagaagaaagcttagagagttgagtggagggaaggtgaggatgagagagtggaatgaatttctttctacccacaggtattagttcgagtgtcttagctatgggggttgggtcacgtgtcgtacaaatttggaaagcggtgctaccatggaccttttctctattctccattacaaattctgtagtcaacgctgtagttcgtttttgtagtcctctctattctaaggccctcgccgaccgcctgcacttcttccgtcctcgcatttcatcccaatctttatctcatcttgagctgatcactgtctacaaggaaaggatggcatggtcaagacgattggcagatgtcgcttttgaaacggttccgatcgttgtatctttcgcccatgtcttcctcgctccacacacaaaagttgaagaatctttctctctacatgccattcatgatctcttgttctacggcccttcactagacaacttgaatttggtttgtttctacctcttcctgctttgttttcgatttattgccgctctactcacagacttgcttctctttgcttctgttgaatctagttcgaccatgtgtcctttccaggcccactccctcgaagtttcatcccttcgctgttgatcgccggagtagcccgaccggtcgcccagatcttatccgtcctaggcctcatttctaccaagtttgacctccagattcttggttcgtattctcatcgtctttgatttttgttgctcatgtactatgcttagatgacacctttgttcttgatcatatacataaagttcgtctggtgatggctgcgatttcatctctctcactcatctacctatcgaggtcaatatccattcgttatggatccatctctggccggttctttctcctcctttgttcgacccagtttcatcttccgttctatatgggccgctcgctaccaaattttctcgctctcccttttggtaagcttgttcaatttttttatatgcacccctcttgttgatcgttcgtcagactgaagatcttttttcaaaaaagtcaacgtcacattggcatggttaatctctaatcgacctggaccagctctggccttgttaacagcgacggcgtcaatcgttagagcggaacttgttcttctccttgcccctctaacgatcatcttgatcttcacaagaaggatctcgataggcggtgcactgggatggggtgccatcggtggtttcggcggaaccggtaagtttttgattgctccttctgagtgatcgtcaacgttctctctctctctctctctctctctctctctctcttctccatgcgcgcgcttacatctcatcgtgtatcctcaatcgtaaacaggggccactttgctcttcgactcgttgtactggcgttggcactttctctggcctgagctctactcgatatactacaacgtcgttctcggtaaatccgccgattggggtgtctctccacgattgtattatctcaaacacctccctctactccttcttctcagtctacccctcctcgtgattacttgtgcccatccagtattacgtagtaaggcaagattggagctgacgctcctcccgccggtcggaatggttatcggaatgagttgcttagggcacaaggagtggagattcgtggcgtatgtggttgtatgggcaaacatgctagcctcggtatcggccgcatatctgttcgccctattccctcttcttctctcctatttatgttcgaaaccggtgataggccagtcatgctgattaaaccatgcctcgtggtttcggctttcaacacagatggaattgccggaaaaaatcctggttggcatcaaccctagcactcggtctcatcggaggaatacttgctaacgtgatggtgacagctgggctgacggtgatctctatcggaaattatcctggaggggatatcatgcgtactctgcatcagattgaagttggaatagatcgtccgggtaggcttgactttgttggcttccatttgtttcattctctcttctctttttcctttctctgctcaaaggggactaattttatgcatttgattctgtggcggggcttccaatgtatagttcatttgtattcgccctcgttacctcttcaaaccggatcgaccctcttccacgccctccgctccccaccgtatctctctttgacctcgactccatccggaccctcatggatctacgaaaagacagagttcgaacctccgtttgtcctaacgccccaatcggctttcaaaaattggacacatgtcgtccttcctgatggtcgggttgatcaagtcgacagctgggtcaaggcagggtgggaggtcgtttccaccaaatctgggtttggaggggttcgacttcagagggacgaatcacgattttctggatcggtgatggatgatggaaacagtctaggggcagaggaagacgacaaatggacgatcaggctgtggggaggaaggaagatcgtttttaagcagagtcaggagcgagtcgtcctcgtccggcggatagggttcggttcagatcatgcgagatgagtatgtgttctcagacgcagccacattgctcatgagaaattgtcatcgatcaccaacgagagcaaacaatcaaaaggaagaagaagaagaagaaaaagagatatatcggccataacaggttacagcagagcatcaattaatcggcttcatggacgtagtgaagaaataagtagattaagtaaaattatcaaaaagtacaatccttgcagttaggctatattgaggactctgaccactattcctcgggatgctcagaagcgaagcaagagaagaaggtcaagagatcaaattagaacttcaaggtggaagtcaaggatccaagaccgagctggttgagcaatccagtgaggttactgatcaaaggcttgagaagggccatgaagccagagatgatctgtggttcattcagaaagaaattgaagagcaaagaaaaaaccattgggaattttttagcgctagaaaatgacacggataagaaagatggaaagtgagagttcaagtggacaaactttggcagagtttgcaacgattgcggcaagagatgcactgatcagaagaaacatcaagaaaagacggaagcttgataaatgttatcgcctttacggaggcaaggtaaagataccaaacaggaggatcttactcggtaggagtcttgagagaggcaaagacttgagcgacggcatcaacaccagcaacggaagtggaggcggtaactcccgagttgattgctggtaacattagagatacaaaacatacagaacatagatgagtttaggaactaaggcgagtgagatttggaggttaaatagagtgaatggatgaatggatggatggatggatggatgatggggacaaactgtcaagagagttgaccacttgggtaataacggactgcaagttggtcaaaactgatgttccaccaagaagactgttcgatgaaagacagagtcttttggaattagtacgattggtaccacagatttttaaaggaagaagacaacctcccacctggcaaggagtccgttagagcccgaagagacgagagaagccgaggatttctgagcggccgcaatttgtttgactacagagatcactttggcaatcaacgtgtacaagtcattgctgatgttggctggcaaattctgaatagcagtcttgatagcgttgaactggtcggccggctgtgtttgttaatccctcaagccatggtcagcatggagtccagccatctctcagacgtacgagagtgagcttacgatgagggtagacaggtcgttgaggagagtgatgagaccggcggtgctgaccgaggcagtggaggtactggaagcgctgctagacaatccggcattgctgaggatattggtcaaaccagatccgctagtggaagtctctgcagggagaaagacgtagaggcatcagatggtgaatacacaagatttgagaacaacgagaaactcttgagaatggtaaaggcttacggatttgagtgagagttggcgcaacactgctcttcaaagtcgaggtaatggcttgaagctggctaaccgttccaagaccgagcaattggtcgaacaacccgcgatcttcgatagcggccctttccacaacggctggagtgggaacagcaagcgcagtggaggcgccgatcaaggcagtgaaggcagtgaaggcggagaagaagaggatgttgatctggtattgattgtgatgtttggaagagtgaggatgagtgtgtgtggagggtatgagtagaagaacatgaatgaggggatcgattggtctccttttatagcctctctaaggtcactttgaggccagtggtagtcagtcgttctcataccatacccacatcgagatggcgtcagtgaacaaaagatgaaaccgagacggcttccattgaacagaaaccaaagatcttgatcagttcgcagagacaagtctgtctgagcagcttgtggcgcgcggagaggcagtgaacagaataaggcatctcgaggaagcggctgatagcccgtggatagtttgcacgaaacgaatggaagaacagaagaaggttctccacacaaagatttcgataatgtattaggaaactaaagtgagatgacaacgacggggattgggatgtgaagagaggtgagtctaaatccaactggttaaactcatcatcaggtggtatactagctaaaggctgaacgggagcaaccatgagtttgataatattgttttatttctgaacaaacaattgaaagaataagtcggctaaactcagtcaagactcataacgatggatcagccgtcagttgtcggtcatcagtcgtcagtcttggtaagaacaagaagagggaagacaaattgaaacaagtctgccgggtctagatggatgacggacgatggatcgatggacggacagagagtcagatgggtgagtacatcagtagctgaacggtcattgggtctcctggtcaaacgaaagagtctttgagaaagccgagtccacagttcgtacactcagacattgagacatccgtgtccccagccggaacaaggattctacagaaccaacgaagcaggacaagtccactattaatgttgtcagtgagggtgataaggaagaataacgttgagatgggaacaacaagatggtccgaacaaacattatgtttttgccatgacttggcgagaactcaaatagaattaaacatcgcatgtctcagagaaggctaaggatcatggctgcctcaagtctagaccggtgggctcgatcagtggtcttgttcagaaaggcaacctattccttacaactgaaagttcgtacagacaaacaacgtggtgataccataccgaagcttcggaagttagccatcgtcagccatcaacgccatgaattccatggacatcgtgtaatgccatgacacggttaggtcttctgttcaggcaggtatacaatggttattccatacaggactagaaagaaaaatacatcgtgttctgaagaccagctctattacgggacttgactatatatgataccacaaagacggatcgggtttctccctcaagttgatgttgttgccgtcgtcggtccatcctcaaacggaggtttcgatttgtccgctcgcctggtggagtttatttatccgagagacatcttcagtcagtcatcactgtacccaccaatgtgtttgcttgtctgcctgaacatgtctgcagacagctgcctgatagacaccaagcgagtgttggatagagcacgtaccatgatacccagtgttcgtactgagcgtccgctagcttttgaacgagcgcatggccttgggtcttgagagcttgtctaaaaagtggtttgagtaagagtcgacggtgatgaagtgcatttgggtatctagagatcccggggttcatccgtattaggaaagaagaatatactgagcaaagacgatcgtcgtacaatacaatacatttgggatgagaagaagaacaaacatgatgaaccgggcaaattcaggtttctcccagtaggcaagatattcaacaaaattcatgaatg

SEQ ID NO: 667 - DNA, 41683 bp, Xanthophyllomyces dendrorhous
tagtgtgggtttgccagcgagagcatcatctgttgaaggaggagcatccattttgaacccagacccagagtgtaccaagtcaagagaaatcaggaagagatgatcagactttatgtgtatgtaacataacatacctcgagctctaactcaaatttgactttgttagcttttcgctccagcgaggatgcatctggtatgtctgatatcgatgtcgatatactcattgttgcttgagatatgatcgacgaggtgctgttggttggttggacggtcttgtcgaacggatggatgattggatcgacctgcgagccgtttgaccccaactcccatccaacttctcatccccacctccaatcatccactcaacatactcactatggcctctgttccttcaattccgataacggtcgggtctgtcgcaccatctgccttccctggagcccaattgttaacagagaaaccagctccgaaaaagtcggagactcctctacacttccagtatgcgccctcgccagacggaaagaaccgcaatctgttgatctttcttcatgggctgggtgagcgcaccgtctgtctttctcttgtgcttttctattcacaagaacggatacatcgatattatgaaagccggtgaaggctgacacatgttcttgctataatcttcccttcttgggtctcttaaccaagacaggtgatactgaagcccctttctatgatcttggtcgaaagttgaaccttcctcggacggccgtgctttctatccgagcacctatccagttcgttgaggcttcttcttgtttctttctctctctaccatcactcacttgttctttatgagatgactgatctttcattgtcaacgcttgaattatttgtctatatagaatccctctgcttgaagaaccggctttcatgttttataactctttcacctttcctgatttcatgcccgagcctaatcccaatccgtccgagatcctgagccagctgagctcctttgtgactcatctaacgaatcctatcgacaagaagggctgtaattggtcgctctccaacatccactttttcggattcggccaaggaggaagcgtcgcttgtgaattagcactgcgtctacaaggatcgtcaccatcaggctcccgtttaggatctctagttaccatcgccggaccgttactctcgttttcgacaagaaaacctaaccagacgcctgtactagccgtccatcgacctagtgttctgttcaagctttctgagctcaatgcgttaaaaaaggcgttcggtcaagttaaagaagtcaaattcaaaacaggcgaaggaatgccgaaagggcaggctgaatggggagtgatcatgaagttctggagtgaggttttaggaggagagcagtcgatcggtgggggtggcgagatgtacgaggtcttgcaaggtggaccgtctataccgagataagtacatgaaatgataaagttgagaatgtatcttcttctcttgccttctttccgaggttgactcggtctttgtcttgcagcagtagcaatgtctacagatcaattcttgctgacagagaagaacaagaaagggttcaaaagagagagagagagagagaaaacgaggtgaaaggctccattgccattttcataatgcattccctatttgagaatacaggcatcttcattcggccggccgatcagtcgtcaacaatgcctttctcctatcaagcaagccttcaatcatcttctcctgttcgtctaatagcgatcgttttctggtgatgagcgcgtcaatttcttgagcggccgatagcggacgcgcgacaacatgggtgtctaacgcttgagatgtctgagcctattttttttattaaagtcaatgacccattaatgatatgagagcagatgtcagtaaagccgaagatagagggatagataaaagagaatatgtatatatatgtgagaatggaaagcaaaaataggaggaaagacagacctggagatcagcttccaatccatcctctaccctctgccagtcgacccagaactttttctgcgctttcgcccactttccttgaccccatctgatacccaatccaattcctaatcctacgaacccgagtccggttccgacctcgcacaaaccttcgaggtagcctaggtaggcaccaacgacggccgatccacttgtcaagtatgagccaaggacagctcgctgagctcggagttgaaagtacgccagcgggcctgtaggggaaagcaactgggcctgacgcgaatgcagaggagaaagaagtaacgttggccggactagcgcagggctaggaatagagttgagtaggacaggagagagaagtgtaggcgaaggaggtgactgaaggagcgcggttgtttgggcgtccagttgagtttggatttggttgagtttaccggtttggaagattaactgaaggggggaaaaaattcatcagaggtgaggttagcgggaagataacaagcgttctagaatggatacagaagagcaccaaactaaccagtcgttctccttctccaccccatccatctctgacagctctctcgagctcccatactaaatcatcaaccttacctgccagaagcaatcgggcccacgtgaaccttgttaacgcagctaccacattcgccctagcttttctaacaacctcgcccgctatactctccggatgcacatggccaacctcgccgactttcggaggcaagaccaacgcgtctcgaaggaatgactccctcgttgtagccgccaacgttcgcaagtccgacgcagccgaagcaaacgcatcgagatgggtagaaagtacgagaagctcatacgaagctgatcgaagggctgactttgcgaggaaaagtgtggaatccaacatcgggtcgacctttggagaagacgaaggggagagagagatggatttggcagagagttcgaggaggtcttgtttgagggccgacatgtttgacgcaacggattcgttctggaagtagtcgatcttgttcacgtcaactgtctctgctgatgtactgcttctatagacatccaccgctcgaaggcttctcttagcggctacaaagacaactctggatttcatggtctccatgatgtgcgcgtctcctccagagaagtgatcgatctcctggaatactcgagcatgacacgccgggtctaggtcagagatcatgttcaccacaattcgaaggtttggatgtcggagaagcgaaggaaggagaggagctagcgaaggctgggagagtagtcggaggttgtcgatgacaagaattgggatggttgagaagagaagctgggaaaacgcttgcttagatgaggttgatgctaagattgagaacaagtttcatcagtcgccatcaaaagaaagtcgtcagtcatggaagacgtatcgtatgaaatccgtcagcaaacgtaacgagaaggaaacacccacaaggaatttctcggatgtagaaccgtcctaaacttaagaaatcagaatcaagaacgagcgacccctccgcttccacaaacggcttttgtccatgtctttttatgtagcggttgccccatcagataatgcatgctcatcagtacatggtgtgtttaaaccagaaactgacaaaaaggaaacacacctgatctggagagactggtttgacggcccagtgattccgttgcgtcggcctcgaaggatttgttctcggacggggtcagtattcaaagggtcttcaaggagtgcggtaatcacatccgatcctccgctaagagacgtcgacaaaactgtattttgatttaggttttcggcgaaaggaacgcgagattcgggtttgtttccattccagagataaagagaagagagaagcaagtgatcaaccacaagagaaaagaaaaggagggagaaagagtaaaagaagaagaaaaagagactctaagcataccagcgatttccatctcttcggacgatccctctaaatctaccgacttggacttgtttcttaacaacgcatggtccagtctagccgaccaaggtccttccttagccactagtctgtcgacctcgacgacggtttgtttaacggagcttaacaggctcgaaactggggtcaagtttgacggaatgagagccgaagtggtcgtaggaaccgagctggaggacgaggcagaagcagagacggtcgatagccttcgaagggaggcgcaagcggccagagatcgggaggcaacaggtccaagaacacggatgggagccgacatgatgatcgtctactgcctatgccgaaagagatgatggatgaagcgagagaaggaatctgaaatggatgcaacaaggaaaaagggagggattggaaaagcgcttatgtaaactagaaatctgattaggaccgaatacaaacatttcctaatcttttttcggtcgtcgcggtctcttttcggtcttctacaccacaccagcagaaaacgacaagaacataacgggaagatggatcatctgatacattataaattcaaagcagagcaagattatggttgtaacgatcgagcaagataggaaaggaaggggatacattgatgaacgtaaagatagattaggcaaacaaaaaaaaattagaatcaaagatacggattaagttctgacataataggatgtgcaaggcattaggaaacgttctaggcatggatgaaccctccacagatgagacataagcagatctacttcatcgtagccagcttctcagcacgctctcggtcatcccgggacttgttttctctcatcaaatcactgaataaggagacatgagattcgtcagtcaaatccacaacacgttggacggaggacgtataagagcacgactcacattcgagcagtctgctcctgaatcagtctcaggtgtgtggcagaagcttcctggttgacctggtgctcagcctccctggatttcaggtcagcggcgacttgatcataccatgcctggacctccaaaagcttggcgtgggcctataggagagaaaacaacatcagagcgcccgtcagtcaaaaatcctttacagagacataacacaggagatcactctcaccttctgctcagctttgacgccctcgaggtggaactttccactcttggcctcgatgatggttgactctttggccgacttctggagtcgggctaactccttgatggcatcatcgagcctcctctgctcctccttggcctcggacttcatcaccttcgcgagtttcttgttgtccttgtctataaaagtatccggtccaaagttaacaagtgtaactttgttgagctatcgactatgataaataaacctatacgtacgttcggccttgttgatcttggccatctcccgggcactaatcaaaacctttggttcctcctcaactactggcacaggaggaggaacgccagtgtaaatgttggtaatcatgggcgctccgttagcagggttaacctgactgaaagtctgaactccattgggtgaggtcgggctggcgacgatcacgctgctgggcgcgggctgggtgttgataggatacaaagcttcttgtctgattgtttggcaaaaaaggaatcgagagaacgtgagataaagatcagtaaatcaaatatgaagaagaacgaaccgaggggcattctcgttcatgaatgtgccaggagcagactgatgcgctccaacaccggcgataccggcctgagtgtagtctgttcggaccgaagcgtttcgctgaaggctgcggttaaggaatcgatttaaaagatacaagtcatggttaatgaaccggttggtgaacacgtgtaaagactgaaaatgctgggaacgtactcgctctgattctcaaagcccctttcctctacagcaacggcggccaccgcaggaacggcgacagcagcggttcgttctcgctctctctcctgctcgagctccatctcccgttgctgctcaatctccttggcttcaacctcacgctgatgctcgtcggcggctagtcgagccttttcctcatgagcaaagactctctccttctcctctcgagcgagttgttcctcgtggatgagtctatcctgctctttcgcatgctccctttcaagggcagccaacctttctcgctccctttcctgctcgagttcaagagctgctaatctctctcgttcttgctcctgttcaagctcaagagcggccaacctctcccgctctcgcttcgcctcagcctccctttgaccgggaagaatgatgtcatcctcgattctgtcagagatgaccccgctcggactagcgtgctggtagatggctccagggtaggtgaccacaacgggctcttcagcgccttcggtagctagcttggggttgtactccatctccttgccgagtccagtcggcccacccccaacaatggcagactgggcaaccggagtctcgttcgactcgagctcgttcttggcaggagaggacgctcgctcaaaagcagaagtaggtgggattgggttggactcgagccgagcatcttcagcagcctgagcagcctctcgttcctcgacagagtgaagcgaaatgtccgatcgaacggaagaagcggtggtatctcgagagataaggttaggagcggtagagggaacgagagattctccggatggtacctctgaccctacggacctttctttgtgaggctcgaccgcgggaacggcctgaacaggtggctcagagtatggtgcctgagaagcaagcaagctatgggcctcagccggctccgtagagtcgtgtccgtccatgtgagaggggacaccggtgttggtaggagcaggaatagcgacgacagagtccaagattccgggcttgacgatctcaggagaagtagcggccgtactgtctctgtctggctgagggttcattccagaggtaacgggagcggacttttcttccgagaccgtggcgggcgcgttgccgttggtggtagcgacagctgtctttgccgccttgttctttttattcaaggaaaactttcggaacatctcgtcgttctcgttttcgttctgttcgccggtaggagtttctggggatggtgaagaatcggtcggtgtgttggcgctggacactgggatatgtgaagtggccaggagagagatgagaccgatctgagcgattttacctgtagaaaagatgacgataaaggaaaagaagtttttttttggttaagacttaaaagttgactcatccaagcgggtcgacgtcatccaagcatcaccaagtccaactcaggacctactaagagattccagtttgacttaggcctctgaggcgacgtacgagagtgtgtgatgcgttgaagcgggagtgacgaagaaggagaagggagggaaacccaaatggaaaaaatgtcctagacagttgagatttatagcgggatgggaacggaaccttcagctagggttgacgtcatgggctgaaggctgcgtaagggcaggcgatcagtcacgtgactgacgcgtcaacgcgtcaacgcctcgacgccacgatgccacgacgcgtcttcgtccactgatctttatggtgtccatctttttccgcttctctcatgtatgacaatcgttgtgtgaaccattgagaatgaggttcgttggactgtgctctggtggttatccattggggtcgtgctttcggctgatttctgtctcttggatctgatgtttctctttatactcaacgcatatctagcaaacttcaagaaatccttcatgaaaaacaacaagaaaccttgctgtacaaacagctcgtcgccgtgtctgcctctctgaccgaacaagcccaacgattggctgactcggccgatatcatggccgatggtggtgtcggtgagctcttttactactcctttactattccttttgcccgttctcttgtgtacgttttcaatacatacacacactgatctgtgtgtatattacatctggctcagccgtcgcctccgtgatggccaactggggccaagtctttcgaatcatcaacgtctgcggttagtcacattcatcgtatcttactcctcatcatgtgcttcgactccaaaaacacagctaagccaacacttcgtcatcccctccctcggcttcttcctttagaccccatctcgaatcctccacccatgcaagacgcctcttcttccaaccaaacaaattcccacctggaggcagacgagtccatagcgaacgaatcgttgaccggtcgacctcggaggacaagcggaagcactggcgaggatgaggaagttgaaccagtcccgatgttggttcggatggaactcgaggcagagggtgttcagggcgaataggtagtcatatgaagtgggcgcgatagagagtcttcgagtctgattgtgtttcatggacgggctgttccgggtttctttctgtttcttttcttaatgtctaacgagattgatgattttgacgatctatgtggaaatcttctacgaatcaagacgaggagttttgtgagacagtatatcccttgatcttatacttctggacagaagaaaaaataccaatgaaagactcacaaccaaccagttccatagtcgaccttgacgatgctcaccattgcactcactctccccactgaacaactccactaacccaatattcctttccaccttccccctgatcgtccacccagccaagtccctccctttcgaccatctcgctctgcagcccggttctgactctgtccgccgtccaaccaagttctctctcgacctgagcgggaatcagtcggcctcccgtgcccaacgccaaggaaatcaacacggagagatctgacggaagcacagaggccgtggaccggagtgcctttgtctgctctcctgatgagagtgagcctccagaacttagattgacaatttcccaaccgtgtccgccaagatgatcgcccatggtgtcgacagctcgtttgatgtcttcttccgagatacctcccgagttcggggcaagccctcggattcgttccagtcgtcggatcaagtctcgaagagggagaagtccgccattgacggatcgtgtggagattgcgatatcgactatctgggtcagtagttcgtacgtccagtctgacaagggaagcaaggaagaaaatagcccggatattgatgtaggtgaaggaccgtgaagtggtccggataggggatcgatcgatagatgagagcacattcgctagagatcatgaatcggaacagaaacaaaacatcaatattggtattcatgcctcctctttttcctcttcttcgataaatgcactgtatattctttctcgactggagaaaaaggcagacgctcataaggaaacgaaacgaacctggaaatgcatcctgaacacaggatccttcctaatctcctctcgatgtttgctcgcaaactctctcaggtttgaccgaaactgatccatctgagctcgtaagctctcgacttgagtctgagatatttgactcgaaagagatgagtatgccttggattggctctgttgagcctggagggaggagatccccacagatcgacgcctggtgtttgagaaatttaagaacgagtcatcagcatcagcagcagtgttttcagaggggaagaaacgcattacattattttctatcagaccaagagaaagaaagaagggagagagacggtgagtcgagtacaaaatgggttgcagcagagatggttggaggatgttgtgtagaaagaactgagcagcggcgatctcctcctgattaaaccggacatacatcatcaccaataaacccaccgagcatcagcaaaccttgtccgtaaactcttggatcgattgaccatccggtatccgttcgagacttttcacctcatccatctcttcacgttctctcttttctatcccacttaactctctgcgtatcaatccaacatgcctcctcgagcagggtttgtcaactttttcgtcgcgtctttgtttgtctcacaacgtcgttgctgacttacaaatgccaacggacgaaacacatacccacaccattctgttcatctatccatccggttgatatcttgggtcccttctgcggaaattaaacttcttcagtacttcttcggatcagatctatgaatcacagaatgacgagcagttgaacgacttacacggcaagctccgagccttaagaggggtacggcctctttctttgcttttctgcttgatagtggcagccttacacgttctaatctcgcccttcttctgcccgtgcttgttctcctctcttacgtttttgtactttggcgtggatgcatgatcctggcctcatctttgggtctgtggcgcatcgatacaggtcacgacagatatctataacgacgctgagcgacagaaccttcaactagatcaaaccgttcgttctctccgtcagttcgggcgagattccctcgaccgatacatatctgaccttgctttctttctttctcatacgtttatcaatcttgcgttttttttgtttttttttgtttttttaacgggctacttacctctccctctccgtgtttggtctttcttccttctttctaacaggctaacactttcgagacattcaccacatctttccttcgaaccaccacaaattccgcccggacattcgccaatagttcaggcgtcaaacagtacaagctcacactctatatcgccggagcctttgtcggggtgttccttctctggaagatgggaatcgcccattggggaagagaacccgagggcccgccatgagtttgaagggaaggggtatagtggggtgggatgaaccgtgaaggtagattcttgggaaagtaagagatgcaggaactgtatggatgtacaatacgatacaatacgacacgatacaatacaatacgatctgacgtggtgtgcctggtgaactgataaatcttttgaagagaatgatctgacctgtctctgggttaaatcgaaaacaagatcaacaccaaaggttttagagaaatatgaggcatgtatttgaaggttctctatatagcacagagtcgcttggatgtcatcaaacagaaaagaaaggataaagagacaaacgacgagacccagatatgaaacaagaaacgcacggaacctaatagtcgggcaaggagggacagaggaaaaattagggaaatacaaatttatacatgtacatgaaggtaatcctatttcaagattgagagagcagaagcggtgattcatcggctaaatgtaagcaactggatgatcccacctaggttttcaacacagccaaacatgatgcggtcgatatggatccaaagaaaaaaagaatcaccctttcaatacgaaagtgggcgagaaatgcccgagactagaacgagcgagacggatagacaagcgcggaaggagatgggacaagacatgatgagaatcaacatttacatatacccagagaatacgtcatgggctgttgtgtattttttccccgtgtattgtcgaggttagctcgatgaactcattcgccaatattgccagccagaccgtccatccgtcttcgaagatcgcgctccaccaactgcagacatttaatcaatgtaggaataaccttgttaatagtagttctctgtaacctcatgcctagaagacaagaaagatgtaagaaagagaaaggcacaaagacttaccagataccaccccgtgaggaaatatcctaccaagtttggccatacacattgcctcaacacgcttccccagttcatccgtctctttgttctcaccatgcccttcaccggggtttctcctccgtttccgccggcaccagatgcaccaccttcggtcgtcccgcctgggaacccgactgagccgtgaccgaaatcttcacctccgatgacggcatccacaagagtgtttcccacctcccgagctctcctcgagaccatgacgacagtttgagcgaagacctgtctggacgatgaattttgcgtgactgacgaagcattcgaggtcgaagaaggtgtaggagtggaacctgaacgaccggtgtgggtcgaattgtatgtggtgatgttactggtgacgtagatcctgatggtgttacacaaactagtgaatgtcccaatggcgacccaggcgacgagcggtcgggaaggcccgagaagtcgaagagtgatggatgtaagaggccaacagatggtttggagagagagtaatcggacgagcgtcgatacaagtgggtagtatgccaaccaacgcctggttagtccagaagtgaggagaaaacattgaagagcagtcaaaagggactgagttatgtagatcgcggacgacacgtaagcatacatgcgtaaggttaatatacacatcaaagcaggagaggaaaaggtgaaatattccaaacacaaaaagacgaacccaaaaacaagccatagcgcactcgacccgactaccttcttccgttccaccaggtctggccgagccaaacccagcgactcggcaaagcagatacagcgtacccgccatacttggcacgacgctaagcaatctgagcatgaacaacacagaaggactggacgcaaaggtctcaaatttggaagtctgtctgaccgcatgggtatgtagtcgagctgtcggaagctaaaaatccacgtccagaaagcatcttgtaagctggtgaggccaaatttcttctgttcttgtctagcagacatgagcacaaagaaagagggaagaagcaaggaaaaggagacaaataatgaaggatgagaagtcttaccggttcctcgccgtcagtgctcaagaagttgacatctattccactttctacaccagtctctacgacgggttctgtgtttatgttgacgagtcctaatatgttccccgcccccatcccctctagagcagtggtcgaacctctagatctcagcccgttgaaaataccgcttcctatcgacctgccaggtgtcctacgccttcttctcggtatgaagcttagctcatcatgtctgtcatctccaagcgtcgtgctggcctcactgtcttcgtcgatgtcattgttctgctccacccggggtgcagataatatctcatccagaggaggagcgaaatgagctccatagtctggcggacgatcctcttgtgcgggcaaagctccagctctggatgttgacggcggtaggggaacatgcaatgacgttagtggactcagaccgttaatgaacgaagctctcggcgaagagggttgagagtgctggcggagtagatgtccagcattggtaagattactatagtgtgaggagggagatgatgaagcggcagcagagggaaaggcagagtagtccgggggcaaacgggtatcaagcacggggcttctagacatgtatgctggtgcatatatcgatggggatgaataggaccgatgggaggagaaatgagaagtaaagtaggacggagaggaaccatcttctggtgattcctccaatcccaaaggtgaattgtttgaagaagacacggttgatcgagtgattcgagaaggcaaactcgtggatgctatgggatggagaggtgtgaaacttgagattgatgaaacagattcggttcttcatttttttgggcatcatcatacatagaaggaggtagtgtcaagtcagtttgtgggcaaagtaagctataggtaggatgaacgaaaagaaaacgtatgcagacaattactgacctttcccggttatgcttgttcttgagaggaagattggtgaatgagcctcttgatggagacctataaagggataggttctctgacgatcctgcttgtgaggagcttccgttggcagtagccgaggtcggaccgcacgggacgagctgggaatctggcctaggcctgagggcagtgaaggggtttatgggtgaaaagttgaaatgatagtgttccggtggagtcgtcggtgtggatgtagatatgccaagagtggatgtatgctgaaatcggtactgtgctgaaggagagagggaggaggaggagtacgacctctgaggaaacgacgttgatgaatcggaggctcgaaaatcaggcgatgaaggatagtttgtcgagttcggagggagcggcgtgagtttgagttgagccgagttgggtggagtgaacggtttgagggcaaatagagggtcgtagaatgtagaggtcgtgtgctgttgagaacctgttgttattgtcgaggatggggaggatggggtcgtggcttgtactctgttcaaagggaattcaatacatgactcgagttagcaccagcacacaatagagactccatgcctatatccagcacctatacatggagatggactatcgagctggctctatttgatggactaggattgtatcggtatcaactttaaattcgacaaacatacctggaactgccagcaacgttgttgaggtctttcgacacgcttggtagacgaccagaacaatcttcaagagagagctgtggcggtgcacgaattgttgatcctgacgctggagaagatacagaaccaagagactgagtcgaatgcctcgaagagaatgatgaaggtctcaaagaatgaggtcgagggggatgagaaggactatcgaatttgggaggagaagcggaggagggcgaaggaggtaacctaggagacgacagagaatgacgtggttagtacccggcaatccccgagatggcaagtatctatggggtgtgtgtgtgtgtgagagagagagataaggagggagtgaagaagatcaagggaacgtacgttgaagaaatataggtcggggagtgagcagtgcagagtgagcacattatacagatgggctttcaaggttggcacgaccttcaagctgggatagatgagataggatggattttattcgtccttctgcctcttcgggcgtgattatatgattttaagctttatcaaaagacttttgttccaggaacgagataggaaggatagctagaaggatcagataaagaaaagggacaagcagactgaacagtgacaagataggaagcgaaagaaagaagaggagcagggagagaagaaggtcgagtcgagaaggatatgtgcaaggtggaaatagggaacgaaggtatagttttgccggcggtcccctccgttctctgggatatatcaacgtatggtttattttcttttcctttttttttaatattctttttctccgttgctcccttttcctagtcgtactactgactgtaccacgttctagtttccaaagatattgaatgtgggcaagaggataactagatgcatacgcttcaggtagatggatgaaatatagtgtcttgccgaatcttacctggctgaagagcatgggagagggaggtgtttcatccgtatgcgcggtaaacattcctgcggaaagcctctctgctcatctctccctctcgtgctctgctcaatcttggtggacttgcactttgccttctctttttttttcttcctttgagatggaatgcgtatgctatcggcgtggagcataaatctcgccgcgaccaaaatcgattagtcagccacctctctctacagatggaggaggtggatctatagatatcaattaaacaaggtttgaatggttgtgtgtaaataaaaggaggtcggcagatagcgaggcgttgtttcgtcagacgtacagtcgctgatgaatgagaacatgtacatccacggactatatccgcttccgccctcccaaggaccaagaacaaaagaaaaaatcactagagggattcagctgttggctgtccatgagagacatgttgctccgagtgatttgcataagctttggctgtgtgttatcagatgaaactaacccaccttgctctcattcccgctctcctttcctcgaatcctgcaacgaacgcacacttggaagacaggtggtgcgctcagatcagatcggttcttgcttagtttgacgatgaatctacgtgtcccgcctctttccgtccaactcgtacagctctgaaaggaaagaacgtttcgcatgtcccgcctcatcttttcgtttgcttcaatcgtctgcttatcttccactcgtcatttatcttccacgaatcgtcatcctgatatcttttaatctggataacatacaatctagaagattctctggctggcagactcggtggatgcaagcttagattgtctgggttttcctagaattacaaatgattttgtcctgttaacctgtagttcgaccgtgaatgaataagatggactcgatcattcagcaggatacgatgatacgtatcgaagaggatgaattctgtatgtcacaccggactcgggcctctgggtacgtgcccaaagtatgcgatccctatcatttagacttttctgctatgtttcgtaaggatgatctgataaacagataggtttatagataggtaaacaaactttgcaatctggccaaagaccacagtcttgtttgtcttgacgaccacatcccgtcatgtagatgggttcaaagatgaaacataaagaagaccgccgtctcgggggtgaggtccaaacgcatttgccagaaacaagtacctcgagaatgattttcttttctcttctctgttcatttagagtgtgactctcgttcatctcagacagtgtcgcttccgccgcagtagatgcaagctccttggccagtcaaacgactcttacacccctctgtcttacccacccagagcagaggttgaccaaagaacagtcgaaagggatatacgaataaacagtaaacagacagacgaaaaatgaatgtggtatatattcaatgtgtattgagaaagggaagaagaaaaaaaagagaaaaacatttgagattaaacaaataaaaggggagaaaagaagaagaaaagcaagaagagaacgggtcgacgaaggttgacgagacatcagaacgttctcatcaaacaagctgagaatacatctatggaatctgtttaagcagccagaactgtcttgatgaaggcctggagaataagtattcaagcgcaaagaaacagtcaggacagatggttccacaagatacaagagaaacttagaggaagaagacaaacctcgtagttgacttggccgtcactatacaagccagatcgggattaaagaaacagtgtgttagggttattctgtgctgcatctgggcgcgcggcaaatggactcgtccaacaacttgcttcgttccgtccgatttggattgctccacacgcaaagggaacccttaaaaagaaagaaagagagaaagagagaaaataactcacggcgtcacactagccatcttcaatagctcctccacctcactctcctccatcttttctccaagctgtgtcaaaatatacttgacctctcctacggcaatacgaccagagtcttccttgtcgaacactttgaatgccttggtaaactcagctggtggagagcagagcatgatagcttcgtgagctgttcgtctcaccggtggtggttggacacagcagaaacaatcaaatcaggtttatagacataccaagagttcctgccggttcccatcctccaggccgattgaggatttgcacaaaggtattgtagtcgactggaagcagacacacattgtgtttcaaacatggccaatgaaaaagtagagtgagcttctttgctgtcaacacaaacagccgttcacaagtgaacccttcctgagaagcattacacaagcccagctcatcacattcctctctagttttcaaagaaaacagtacaagcatactcataggcagcaaagagagcagcaagacacgaagaaagaacgcaaacaaacacaaaaagaaccaacgtaccatcacttcccactcggctcgtcaattgtccgacctccgcctgagtagggttctggcctagtgctcgaagaagatctccaagctggtcagccgagatgaggccccttccctttttatcaaagagaaagaaagcctctttcgttgaatcttgagctaacgtctcaagtcggaccgtcggaacgggtagaacatagtgagctcatagaggaaacagagggaaaataactgatgtatatatgcactcacaagcagactgaacatcaacacagaatcacagaagaacgaataatcaacatgattaattttaaagtgtcaagcaccaccacactagcgaacagtgctcaccatgttttaaagatataatagaaaggacaaaagaacagggggagaggatggctgtgagtgatggaaaatcaagaagagacgacaaaagtgaaaacaagacgcgtgtagaagaaagatagtctgtaaccacacgcgtaaccaatgtaacgatcgttcgccttctaacccattactctcccaattcccggtagaccattttcggttttgtcatattcgtccttcatctttccactcgtcttcttaccgtttgctcttctctggaacaggatgtctgctcaatttatcaactggtcagtccgtctcttggcctgtgaatctaggaatgggtcgacagggtcactgatcttctagctctttgttctctctttcatctctcttttctggatcactcttttttcctgatcttttttcttatcctcatttcttctttttcgtcgtcggacatgaaacccgtgttgggttttcttccatcttatcgtccgacctattgccaattactgttttctatgtctattaccacccaacaggctcaagtcgcctcaaggccgagcttatttcttctctacccacttctgtacgtacttcttcctgaatagagtaaacggagaatccaattcactcaatcttgtctgatctttttggtgtaatcttcatataggggggcccgtaagtcttttcaaagctatcgctctgtgtgccaacgtctcttgagcaaagccagtcgttccttgctctgattctgacggtgaacaccctgattactctcatcttctgggatctatataggttgccaactggggtcttcctcttgccgctttggcagatattcagaaggatgagactatgatctccggagtcatgtctcctgtcatggccggatactcgtacgtctggttctgctattcaccctctgttgaaacgttcggcacactgattgccggcttctgatatctctatctggcagatcaatctttatggcttttgcctggcaggttcagcctagaaattagtacgtatcctcttcaactcttgcctttttccgatctacttcaactgatttcaccgattctatcatacgctcgtggaatccttttcttcactgaattttagccttctgttcgcttgccacatgacaaacgctgccgcccaggccgttcagacttcgcggtttgtcaactactggtacatgggaggtaagttgaaacgctttttctgcagaaatccatatcttgtcttttcagctgctgattgtattgcatgtaaacatttatctgtgaatccactatcataggtcgagagaaaaagcttgctgccgcccctgagtctgccatcctcaacgccctcgaccaggctaaggacgccgccgcttctggaaccgctactgttggttccgccgtttcgaacgaggctgccgccctcaaccgagctgctcagaacgaggccgctcatctccgagaacaagctcgtgtgctctccgtcaaagcccagtctgaggttgcccagcttgctgagaagaccaagagcgaggccgctgctttgctcgctcgggcccagcacatcgattaccagggatctttggaggctgccaagaaccatgcggccgctggcggtgaggatgctctgaggagggcaaaggagatcggaatcgaggccaagagggagttgggagtcgccaaggattacgtggagagcaaggttggagagctgacgggcgaggttgtgaaagaggagaagaaggctaaaggatggttcggatggggcaagtagatgaaattgacagggtcgcgcttcaagcttgctcgtgtcaaacaatcttctcgagaataccatctatcctcttttgtagaaggacggcttgttagacacaaagatccccttgatatatatattcgcgggaacacaagtctttaaaacggtctctctgttcctctttgtcttctatctttgcctatcttacttgatcttaatgtatctaaaaccattcatgtcctctccgtcccttgccccctgtggctttactctctcttcaaagaaaaaagacttcatcttatcacacggcaagtcgtactggcatgtgttgtaaccaaagcgtaaccaaggttacattcgaagttcacccatcatctctaattctgattctattcaaaacgctctatcaaccaaaatcaagtgttcgagacattccttctttgagccctcgacaaacagatacacacgtacatatacacccacatggacgtggcttcttcgtcagcagagccgttccaggcttttgcttccatactgtcatcatgttcgctggcaggaccgtcaggtgctaagcaatcctctccagaactggacgatctattggatgatcaacgaggactcggtatacggtttgcgagcgtgttggaagaaatgtacgtgtttaataccctttctttcttatttgggaatgtgaagctttataagaaaccaggagagtcagcctgtatggatagcgtgacgaatcaggtcatggagaccagatccatacaccagaatgagccgattcttcgtcttgaatcgagacttataaacgctgcttcggtgaacatgagggctgatcaacactcatcggttgcatacggttgatcattgggaattactcttgaaccaaaacagggtagcagcaaagttgtctcctacggctacacaaatcacgacggaggaagagattcaatcgctctcactcgaactatccgcttggaagttgatgcattcgctcctctcgtaagtcctctcttcctccttctctccttccgagtctgttggggctgattcggcgccttcaccggtggtcatttggttctatttcaatgtcatgcaaataaatcaaaaactagggatcgactccgaccaccatcacctacagtgtctccccaagagctcctcaaccacaatccttacacgcccccgctaactgtcatccaacacatcatctctgaagacaccgagctagctgaatgggtactcattcatcgtcatttcatgactcctgatccatggagaagtccgttcgggatggtcgaaagaagagaaggcggttgggttgctagtaaggcggcgctgaagagaggaaaagtcaccgccggcgggcccaggcagaaggacttggtcagggcgttggatccggatgcgcctgttcgacaggttggtgtcagaggaggaggcgagctggcgcctgaagatcatgtaagagctttgttccttcatcgtcgttgtttgtcgtcagtttctgtaggcttctttccgaaaacggctagcttgcgtagctctagacacaccttatcggatatcttgatgcgttagagtgtctgaacgtgatgattcattgccctcgtctgacatcttttgtttttgaacggacgctcggtttgcttgtagaaccacaccctgtcgctccttcctgccttgttcacatacctccgatacggtctatccgatgaatgtgctgctctgtgccgagcaaacgatcagtcatggctgggagctagcttggtgggaggtggctctggatggtgggttagcggcctaagttagtagctcttcttttgatttcgcgtcagaatcgtacatgttcaaacgtcaacgctgattgaatgccactaattcactgtgggggcgtgtctttcggcgtcttggttgaaaagatgaaaaagatgaagccgggatggacgtagaggatcaagagattcagggtgatatgaatgatgctgaagtcggaaaccgaaatagaacattgtggaagaagattggacgcgctgtggctaccaatgtgagtataccgcacaacaatcaaccagagccagtcggttgatcgtcgcactgtcgttgtttctgtctattaggataaactaccggtatatgaacgagctctatatggcatcctgactggttacctgcccgccgttctacccgtgtgtagaagctgggaagaccatgtctgggcacgaattaatgcacgaatcgaggaccggtatgttctgtccacgagtctcttttcttgtttctgtctgctcgtctgcctgctgaccccttactcggcaccgattgttctgttctcgcttacggcgcggcgaacagaattgatcgcaagttgaaggaactgggagggttctgggcggaagagttaggtgtgcccgagtctggcgaaggggagagcgaaggaggaaagtcatcaggattagaggaggttttcaagtctgtcatgcagatagaacgtgatggcgtcgcgtaagctactcttcttttctcttctcttcggtttgatgtctgattctgtgtctgtgtgatatggattaatcaaattcgtggctgttcattcctctgttcatcagcgcggccgcgagggatccttacaggatggctatgatgtacatcatccttggtcggacggacatcttgttctctcagtttgcagattctgttccccgtatcaaacaaagcgtcgctcctcagtaagggatttacttgtctggaacgattcttagtgttgcgagattgtgtgacccaagctgacatctgatatcaaacatgggtttaaaaagcttgtactcccaactacttcggttctttgcccatctcgttctgtaccttcgacttctagataaatcacctccagttgagtttgccaacataatcctccaagcttatctggatgtcttggagaaagaaggccggaccgagctagtggctgtgtatgctggaagtttgggcgagagacacgcggaggagagttatagtcggttcctcaagggtatgtgaccttacgcttgctgtttttctcttccaagggaatttgtcctgctcacatttgttttctttgtttcgtttttgtttgcttttttctgtaaaatagacatgaacccgagggtgtctaaagaagaaaagagtgttgctcttttccgagcgaaagagaatgggctggatctggtcgaggtggcgaagattaccgtcaggctcatcatgggcgaagcattcatagcgcttcccggactggaacatcccgagcccgatatcactgatttcgatacgaatgtcatcgaaggcggccaagattggattttgatccgatcgttggaatggttaacagtcagcgatgagacattccccgaggcgcttatccagtcgaatgcgctcgtccgatacttcttgggtacgttcctctctttctttctttcttttacagttgaagaacttagcgatcttgcacttttgtatcagactgacgctcttgttgtttggtcgttcgttcgcgatagcctctggcaaagtacacgccgcaaaagaacttttacttgagctaccgagaaagcttcttgatttctcgatcaaacacgcatcgtctccttcatcttcgtcatccgtgttaggtgacgaaccggagggagaaagtgagttgtcaagtttcgcaaacgagtacctgcagcacatcgaactgtttgaggttctaggtgcgttgacgaagtgcgtggagatgatgacgacgcggcctcgggcagggtacgtttgtgttttctttccttgtccggatgtgatggatacagaaaggttgactgatgatatttggttctgtcgataacaatgtgatgggggccatacagaactttgaagatcgatcaacttgaatggcagaagaactttacagtgaggatgccttatcgtttcagttctcgagagagattttgtctaaatctgagtatatctgctatgcctctgtctctgtcttcattatagtctttggtggatagggcctatacatcgacacttgatctcctcaaatcggattggctccgccttggactggatgccgagagcgaagaaggtaagagataaccacgtggagtatgtggattcattggaaggaaatgactgatgacttgaaatgtttgtggtcactacagaatcacaacgatccatagagttagctcgagttcgacacttgttcgttccagagcttgtgttcagagtgcataccctgttggttgatacccgagacatcattcctcagtaagtgtttccctttttttaaccctaccgttcgaataaatggcaaagagatcatccgataactcaagtcagttgcttgtaataatctttcatcaaaatttataggaacctcggaaaggcgctggagctgcctgttctattggcgaacgaagagaccaagctctatgttgagtgagtgtgcatccttctgggttcagccatctctcatctgacatgccctacgatttcttaccgtctcgtgtcttactttcaatccgtcttccgtttcaggttcattcctttgccaaattccaacactcgcaaccgattggcagactatctagacttggtaagccagacgagtatggcttgtctgcaagatcaaaagccagacagagaaggacttggtggtccgagaccggacgatccgtttcgcgctccattaagctttgctcaggtcgtcagaggtctttcgtcttgatacaagtatgcaaatggtcaccatccaagacgcagtcgtgcaagaggacggcaagtacgaagcgtggagaagcacgaatggggcggggagtatgaatgggattgagagcattgaatgtacaaagtgaatgtatgcgctcattgtttactgcttagtcagccaaatgagaaaaaactaagaatctcgtgcaatctctcgatgcatatgctcggccgccatcgtgtttttaacattgcccatctcagacatcccgctcttctagttgggtcttgaacatccatcaagcctctttgttttttctataagaaccatcgttagctctaccctaatctctattaccactaccaccaccaccaccaccgccaccacattatttctggaaccaacatgtctactcaacctcagatcgagatcgtatgttttgtcttgtttgtcttgttgttcaggcgatcgaataatcctgaccgatcgattttctgctttgcgttcactcactcttttccccaacaaaaggctaatcctattgccatcgtcaaggctcagtacccttctcctgaggagtacaggaagcgaaaggtcgcgttgatctctggtgagaatcgtttcctcattcttctccttcagatccagctgggttgtgcacataggtagtggtagtcagcagtattctcggattatgtatctcgtaattctgttgaacgagagagagctatcggcctgttcactatcggcaatggggctcaagatgatatttgacgaggtcaagtctggtgaacaacgtagctgactgacgagacgtgtttctatctcccgctggtctttctgatttgtctgggcttgggcaggtatcaccggacaagacgggttggtcaccttctcttcatcattccacccattgtggaggatttgctcattgcgaggcccgtgattgagacaaatcaggccgagaagctgatcttggtttctttgattgttaaacagatcttaccttactgaactcttgctttccaagggatacgaggttcatgggtaggcagcgttcatctttctaccgccggtacagatttatgtcgtgactggcctcatctttttatttccgtttttattttattttatttaaaataccaaagtatcatccgacggtcttcctcgttcaacagtatgttgtgtctctagctcttctttctcggaaattcgctgatatacaaagctaatcgccctgctgtgtatttcactcctttcttctctgttcaaacagccggtcgacttcaccacttgtatgccgatcctcacagcaagccgaagatgatgcttcactacggagatttgaccgacaccactaacctcgtttacgtcatctctcaggtcttggtatgtcgactgcttccattcatctctagattccgtattcgattttacttgccccagtgccttcttcctgacacgtttactacttttctagccgtccgagatctacaacttgggagctcagtctcacgtcaaggtctccttcgagatggcagagtacaccggagatgttgatgggctaggaacccttcgaattctggatgcaatccgaacggctggtttggaaaagcacattcgattctaccaggtatgtctttctgcttgttttggtggcgtgcagatgaagagattgcttcgagtgcttacatatatctcttcctctgtaattcgcttcgagtactaggcatctacctctgagctctacggaaaggttgttgagactccccagaaggagaccactcctttctaccctcgatctccctacggtgttgccaagctggtgagttgacttgaccatcaacctactgggtcgaccagattggctaacgtgtttaaattgatctaaatttgcaacttcttcagtacgcattctggatcgtcaagaactaccgagaatcctacggcatgtagttcgtgtttttgtcgcctgtctttttcttccttctgtctgtcgatcccagccacgcacctattctgatatggtttgttcttcaacttttaatagcgcctgcaacggtatcctgttcaaccacgaatccccgcgtcgaggtcgaacattcgtgactcgaaagatttctcgagcagtggccgagattgccgccggcaagaccgagaccctgtacctcggaaacatcgacagtgtatgtaacctcttcctcctcctttggaaggcctttccaccagtggcctgaccttgattgcgctcgatgggcgattgctagtgccgagactggggacatgccagggattacgtggagggtatgtggcgaatgcttcagcaggacgagcccgaagatttcgttttggccacgaacgagacccacccgatcaaggagttcattgtaaaggctttcaaggtcgtcgggattgagcttcggtacgagttcccatttctctgaatcatagttcggcgaggatctttagaaaatcggacgatataacttatgtgtttttgcttgttgactggggtttgtaccgtcagatgggagggcgagggtatcaatgagattgcttacaacgtcgcgaatgataagccagttgtcaagattgacgagaaatacttccgaccggccgaggtcgatttgctctggggagattgtgcgttcttctgttttcttcttcctttggtctcactgttgtcggtgtatcaccgcgcgcgtctgccctttctgatcatttgagacgtcaaatatcgatactaaatatttcatttgccttcttttcttcttccttttctggaaccgacagccacaaaggccgagcagaagctcggatggaagaggacagtggactttgacactcttgtcaaggagatggtcgaggctgacgttcagggagtggctcatcctatcgaggatcaggtgagaggcatttctccttcttgtttctccattaaacatgttgaacgacgttgattttgaacaatctctttgccgtttatctttctgctctagaactaaacaatcccagaattggcatttcttgcctcggttcactcgacttgaccctttccaaaatatcttttcctctctttgggcttttgtttccctccgattcttccttctggttcaggtaccttagctttcggtctccattcataacaagatgtagcatgtttttttactctgtcttctcatatttccccctccatcgtctctttgtcctctcatcccatcaaggccggtctgtagaggtttcttatccatttttttaaaaaaagaagtcttctttcccttttttccttccattctcttaatcccttttcgaaaggccctgccaatcttgtcgtttgctacctcactctcggacatatcgttataatagatggtctgtctgctcctcacgaaagacgagacgcacgagcttgtttgttctcttgttcagcttttttctacttctttcgaggctgcggtgcagacggatgagaatccaagttcaaggttgggcctgtgcctgaattatattgatgaatacagagtaaagggtctattaatatatatatatatatgtatataaagaagagaataagaagaacagggaacgatatgaagcgaagagtacagacgttgggagaagaatggacacgttcgatatgcaaggttggagtgatgtgggtgatagagtgtgggactgacggagtgatagaaatcgatacagttgagaaagtgaggatgtgggttccagcgaaagaagaggaagacttggatatggaaggaaacacacaaagcaaagaagatatcaagtaggaagaaagaaaacaaaagaaccaggaaacgagaaaaaaaggaggagaaaacgagcgagagtcggatccattcaagcggtcactcctctggagaatgccggaaagtattcttccgcaccatcagacccggatccgcgagggtatggacgggaacgagaataaagttgagggtgtttgggtgaaaagtagatcgagccgtcttctgtaggtcggaggatagaatgtgaggccaactcgagcgagaactgagggcaggtgtatgtgtgtcgatccgtatgctcggtctgtagtcgagaatgggggaacgacgaacacggatctgatggtcctcggtttgggttcgctgaggatgaagggacaaatggactgtttgagcatgaagagttgatttgcgcccagttctggtgtttatttatttgtttatttattcgttgtgattgttgttgtcatccaagagcgagaaagaagaagaagaagaagaagaagaagaagaagaaaaaattgaataatacagcgttaggaacgggaaggcaagagtctctgagagagaaggattctgtattgcaacaaacggaaacgaaccttgacggagacgggcagcgggaacctgccagattcgggtgacgaaggacaggacaaggttgagtcgaggctcgtgtagactgtctttgttcttcggagaggcatctctatgattgagtagggatcaagtgtttcttcacagaactggataagttgaaggaggtggtctgcagaaagacaaaaaaggaaacagaagggaacgtcgctcgcttgttttttataccaaagcggcaaggagacaaaccgacgaggctgaacacaagggaattaccggaaacgggaccgtcggatcgattctgcgggaggtattctattgatgatgtattcactcatgccgtttccccttgcgctcttgtgctaaacaagccggatgtatccgatgtatccgtttcattaatcaacctgatgagttagtccatctgatgttctccttcttggccgtctccaggagctcaaccattaaccgtttacaaccttggttgcatgaacatggcactcaattaacgcctgagttcgatggcgagagccggccggtcggtgaatctccgaatccaaccggtgagcaggatggcgctcgacgcgccttcgcgctttgctcggccgtccggccgcccggcagcagccagttcacacgccccacaggcaccagagtatccatccggatcgagagccgggtctgaccggacggcgttgggtttggctgctgtgcggatgatgaatcgcacgtgtctaacaaagttgctcgagttcacgtctgtttcttcggactgcgcgtctttgtgttagcgacgcagcccgggttacacttgattcgtaagccgtgacctattgacctttcaattccgctttcctttctctcttacttccagtgcattgtactaccagctcatttcacacaatattcatagtgtctgagaactgtatacaagacgggtattctcgaccagttgtagatgagaagaccaagcccgggttctctgttgctttctactttctgctttctccttctagccttgttctgtagtatttccatcaacctcgttttccttgttccaagagtctgaacttctcccttgaaacccgacacccgttgtgtggttactccacttgtaaccctgctgttaccgacccatcctccgcccctgatgacttgccccttttttcccactgtcattctattgtctgttcctggtttcacctttgaccatctcttttgttctccatcagtctttctctccctcaccaacaactttatccgatcgttgtctctttcatgatgctccgtcttctgtatccgtcggcgtcttgtttttgtcttgttttggagaacaacatagactgtctctcctctctttgatcgtcatgaccgttgttttgctttttgttgctgactcaccgtctgtgcgctctttgttgcacaccgcccacctgtccttcctttgatcgaccgagactaatccccgctcttcttctccctttcttagggaaacatcctttcaaatctttatagttgcgttcaacttgctgaccgttttttttcttttttttttctttccttctcttcctcgatcaactctccgtatattcgttaccacctctctctccctcctcatagcctcgtggcttggtcgtgttcttgaacactgttcatcttccttctcgaacattcgcaacatacgattcagttccaagctagtctaaccatgcagtctaccttcattcttcccgcttcatcttctccgtctcctcttgatcatgatagacattccgctggcgaccccaatgttctctcacctattgcttcgccttcaatcaacacgagtccaatccagaacagacgtccagctagccatcgacagccactcactatatctacacgaacccagcccctcaattcctctttcagcccttctttcagtccttctttcagcccttcaagcttccgctcattgggtatacattctgccggtcgaacacgtaccaccgctaggctgaccaaattctcctctcgatctcctggcacgccagcatcaagaaggtcaagcgcggcctctgtcaagagttacggactctctccagtattgaccgacgttcgtcgacgttcagcttcgtcttcagtcaacagatctcctgccggccgaccgagaacacccctgccgatgagttcatacgcatccattgctcagaccagaccgatcaccccagagatcgtcgttctgtacgatgaagagtcctatatggatcgaagggcagctcggaactcggagtgctgcctgtctctagggattgtcgacagtttctctgcacctttcactgtgaatctctggccatcgcctccttgctcgcccaatccatcacccaccaccaccttgtttcccccaatcgtcctctctcagagcggtcattatcggtccagatacaacggatcggacgcctcggtcgattctttagagaaaacatactgtggacagagatatcagacaacggcttccgtgagtagaagtaagtatcaaagttggtcatccaaacgagcaccgaaagaaaccaaggaagaaagagcgaggaggaaggcagcggaagaacgaaggaggcggacagaggccgatagaccattgccgtattcgaagaaactcgagattgacgagtttttcggagatgtagttcgttcctctgttgtttccttcttctgtctttcctcgccgtaccagttcatgtggcctcagttctgacatttcataatcatccgattcaactatagcctgcgaaagaacgaaaatcaaaacgacggacgacgatgatgacaacggtgacggcatcaacgaaaaacagcacggcatggtcaagtaaacaggccgacagaaacgtcggtggcggtttccaagtcgatcacgtttcacaggatgggaccgtttggctagatgttgaggaagaggttcgtcgttcgctttctctctctctctcttgggcgcgatctctgtctcatagtgcatcaacgctcactgccaggaatgaaaatctcatcttggatcttggtgattacagcaagaatgggcttggctcatttcggaaagtgagaagcacggacaggcccttcctagttggccacaaacgttcacctcccatctcttcaccaccaaaaccgagagtggcgcgagcgtgaatgacccagcgtctcctcccatttcacctctttcgactaccttcgagcgtccgtctatcaacccggtgaaaagaacggcaagaaagacccactctcgttcgttttctcaatcgtttacttctctcgcggacccattccggaaggacgatgactggcacacgagcgaacggacgaaaccgaactcaagcccggctttgtttgcaaagatgtttttctcggatcctgtcggaactaaaaacgaaaagacccagtctcggttccattctcaggcttgctcgaggtccaactcaggatcaggatcgactgtgtccgacgaaaggattcagcgatgcaaaaatcgaccgaccgggtcaaaatcatcttcgtcatattcttccagttcgacctctgcctccttgtctgtcaaacttgtccctggtgagattaatgccaccaataaacacattcaagaaccttcttctttgccgatagctagaacgccgacatcgtcttcaacatcaacaacatccacagcaacatcaataacatccacatccacattggctagctcacagaaaaaagtcggacagataacaccatcagatcaatctgatctcaaaaagagcttctcgatcaatatccttgaccttcggctggccgatcaggttcaagtagagaatggtggtgacgataacggtgatgagcatctaggtttgagaaatgaagcaaaggacgagaagcaagtcccggcttcaaagaaagtcacaagatttaacgggacacataaaaagtctgggttcaggagtgctctcaaaagattcctgaaacccaagggaggaactaactcggcttgaagcgatctggtttgagctgagctcaaactgggattgaggttgtaatcaatgtacttttactctattctttccaaccattgcttcttttccgtgatgatgtctccattgtaagagaagaacagaacaaacgaatggagaaggaaacgtcgattgtacaaaacctgtcggtatcttgtgatctgacggagtggaagaagggaaatgaaaggcagatcaagaagacagagagagaaaagagtttataatcatttatcggcttcggcttcttcctcgacatctccgttcgcaagagcctttttctcagccgccaatctttctttctcttcccgttcttccatctctacgacctattcattcatgatggatgaggggaggacgggttaaggcgtaagatcaacaatttacggtgagtgatgatgatacatataaagattgtaaaggtagaaaagagacggaaatcaaatttgaagacggacctctatgtctagtgggaagttcaagatagctgctacacccgttagttgaattaattctgttgggcaagacaagaatcaacgacgtgacgaaaaaaagaaaagatgaataatatcagaactgttggatatgatcaaagcagggaggggggagagacaaaagtaggaaaggaaaggcgtacgttgaccgctttcatgcatactggaaaagatcaaagcttccccagatcgttccctaacatcgtcaaccatggcgacatatcgctttcgttggttcacgtcggatgatctgataaagcaagattttgttatgttttcaaggtcagcaaaaaaaaatagttggttcatcagcatttctttctttggattagacagaaatcagacaagaacaaggaccaagacaaggatggatatatacatacctaaagagctcatcactgatcatcaatgtcccaacagctcctctctcaatcgcgagcgccacatgatcgggtccgtaccacgctcgaagctcatctgttcctagcattttgtggaatctacaacgataatcaagccgaagataagtcagttttggccttgtttctgtgacgtcgatgagatgagaggtacaactcacttgtcaagcatctgaccttctctggcatactttgttccagcaagtaaagcagtaacctaagccaacaaacccaccacgtcacatcagatgagttaatcgacaaattatgacgaagaaaaagtcaagggaaagtatctacttcggcgctccgaagtgcttcaacaagagcgtgaacatgcgaagtcgtggtgtgtacccgaagccacttgcttctactctgcgtcagtgccttgtttgatgcacgaatggcctctgcaaagattgagtcgaatagctatgttgataatcgaaaatgattatagatatgaatcagacgagtatagttcatgtgaaaacaagaaaaacaagatgctcacagcgtccttggtgaaaccaggggaagcgatgacgatcgctttcagtgtcgtaaacggaagatgtcgaaggacagcctgatacactgtttggaaaaacttatccatagcctatgagagatggaaatatttacgtttagaatccgcattcgacgctttcggccaagatagatagaagaagagggcaccttgtcatgcacgcctgactggccttttcgtttacgaggcacgggtacatcaattcgttgtcttaccaccgtcatatgctcggtcaatagacagacggtagccgttccttgataatcaagtatagaggtataaaattcagtagatttcccaaaagtaaaagagatgcttcaacacttgttgagggaatggcaactcggacagacaaaccttcaccgcaaacaatggcgcctacctccgctcctcgtccctcaaccgtggcttcctcaactcgaccaagcgcaacagaatcccaaccatccttcttccaaatatcgaaatctctattggctgtcaggatacatcacgtgcagatcgaattgaaatcaaccggttaagagaattagacaggaaggaaaatcatttcgtcaacgggctctgctacgtatgatcagatgaaaagaagaacatcctcaccctctagatctaaggtatggaatgcgcccatcttgacatgcggattctctcttgttactcttccgctcagatgaagcgcacttgtcggttcggctgatcccgaaccgatggatgttgaagccgccggtgcggctccttggacggagggagagaactcggactaagagaattggattcggtattttactttaagaataggtcttggcttcttggattgatgaaaccacaaagtatgaagacatcaagaggagagaggaaaagaaaaaaaacatactttggtgacttcgagggtcagtgtcgtccggactctatgggacgccgtcgacccagttgaagaaacgttttgcacacgtctgaccgcctgggctctcacttcatctccctttgggtgtgattgtcacacgattcaattttccgacataggccacttcagcttatgtctacctaagatcaaaaatcatcaggttaagaatattctacttacgacagagactagattatagatatgccacatatcctcatcgtcctccggctgaagtcggatgtaaccctgtgtagttccaagaaagatcgccaggcacaagaccacccatagcaagtttcaatgtgaacccatcaatcgtcaatcattccgaaccgatgagtgaaggacgttaggtcccagaaagagaaaaaaagatgagaacggtgggaatgacgtcagatatcctctgccgtcttctcaagactagagaccgcattcgatttgagttttctcaaaatgaatgtagatatggttggatacgtacggatccatccttctcgatttgtttcttgagaagtttcataggtgtaagtgatactttgattgaaacggtggtcgactcagctgaaagggaaatcaaagatggtggttgatccaacaaacacgggattcaaaaataaaataaattcagcaagcggcgattcgatagtcttaaataacagcagttgtgttctcaaaaatcgtatcggaccatgggtctctttatcttcagatacgatgggcagttgtaatggcattataaatctacttggaggacccgagcttcttcctcttctctttctccttcctgtgcctttcttcctcttccaacgctcgttgatcttcgagcctggccagcttagcacttcttctctcttccctagcggcttgagcataggagacttccatatccgagtcgtcatcgtcggagatgacgtccttgccttcgtatcttttgagtacaaggcagagaagagatgcaccacgagagaatgcccatctgtcagtgacacaattttccggctagcacgccccaactgctaggcaatgaggaaattacacttactttctccagtccattcccatcgcctcgtagatcacgctcttcattgactttccacctccacctccgcctcttctttgcctcctataatcatcactatcactctcgctctcactctcgctgtagctcctccttctctttgatccactgctgccacctcctgatcgtcggtctctgtctttgtgccgatttcggtctcgcctacgcttccgatcgtcttcttccgagtccgagtccaattcagaagatgagattgacctatttcggatcctcttggattctgtgtgcacagaggatttggaactttgacttgctttggatgtcgtttttgatgtagtatttgatgagtgagaatacgagttggaagacttggaagaaggcccgtttgatttgtgatcagacccactgataggtcgagaggaggaggcagcggtagatgattttttgagcgaagtagaagacgtagatggtttgacagagggtggcaaaacaactctttctgggctacaacttctcgtcaccgccggtgatggctttagcaacgacggcgccgttggtttctttgaaaaaaatccaaccttgcccacgtcttcttctgaagctactgcctgttccctcttcttccgttcgcggatatctcgatcgatctcgtcgatcgttcgcatatcccgcttttccttattgagcatccgaagtccctcgcccgccatcttgttccttaacgcgtccttagtcaagttatggccagctttgcctcggaacgacttggccgaggttgctagattcaaaggcttggtgattctggaggctggaatagaaaaccgtttagtggagggaaaggaggttgagggtacgggttcgttcattgctcgagccgatttgatcgctcgaagttcctcccgagtaagctcctcctttggcaccttgggagatgtcttccgttctttaacggcggaagatgatgatgaagagggagccttggtcgatcgagagaaggaagatgatctagatgcagaatctgcgaacttttgacgaagattactcatagcactgctgctgtcgcctcgagatgacaccgaagactacccaaagcaagacgcgaggtagatcagctagacgtgtcatgagcatatcatcgacagacgagtcttaccttggtaggcgcagaggctcgcttttcctgatcccgttttcgctgttcttctctctctttggcctctttctcccgcctctctctcgcctttcgaacggcctctgctacttctctagctcgaagatctgcctgtgagggattgaagacaacgcaaacacctccaccagagtcagctcacatcgttccaatacgaagtatcgcagagaaacacgctcctagatgcttgtattccttgtataaacgataattcgaagccaacaagaaacaaagcaagcgacgaaaagggttgccgaaaagaaactaacctggatccgttcttgtttgatcctctcctccttttctttgacggccctcgctgctgcttcgaccttttcagcattctcctttgctgccagctctctttgacgtttgtagtccatcggagctggagttgaaattgaacaggatgtatatgcgagtgaacaggcagtcgggcgtatgagtgtgagtgtgagagatcaggcaaaagaaaacaggaaatctcaacgtcactgctgaatgcctcattaggggtttctacaaaaaaagactacaaatccgttgtaatgagatgctacagaagcgctctgatgtgcaaccaggaaaagactaaagaaacgggttactctctttgtcagatccattagagacttgtctatagagaatctctgaaaacaccagctacttgactacaaacttctgcagcttccattacaaatctcgaggaatcttacgtggaaccgaccccatccgatcgaatgctgattaaccaactgacctccactgaccatctgctcatacataaatcgttcagataacctggtgaaatgatgaccagatgacaaatactcacatcaaatcgtttattcacttgacaaagctcaagtattccgagaaggcgttgcctctgctggagaagatcgcgtcattggtaaggagccatagaggcagtcattccatgctgtagcattgaggtcatcacttctcttgctgatgatgtttctgctttccatcttcctgtactgaaaaggtcaagccaatcatgaataaatatggttgggtattgcccgttctcgcggaagtaggtgtctctctgttcgccacccctttcgtttgctgcattgctgaacgtcgtccgttctggctatactattctcactgcatctggaatgctctcgatctcaagtttcttccggacaacccaagtctattagggctgaatgtcaatggcggccagaagattctcatccgacttagacctcaacacgctcaagacacgtttctcgatctggatgatctcataggtaggtgtattcatccattttccctttactcgcttcgtccttcccatggccagtgcattgactgaataaaccgaacacaggaacgatgctccacgagcttgcgcacaacgttcatgggtctcatgacgctaaattctatgcgtttctcaaagggctcacagatgagttcgatgccctccaagcgagcggatataccggttcgttccagccctttgccctcgtggtacatacattcaaaaattcacagcgctcatctatgtcaactctctcgcttctggtgccgaaggtgaaggattccattctacaggtcaccggttcggcacatcacacaaccttccaccgcacttggcaaaactgaaagctctggccgctgccgaagatcgggcaaagaaggcacgaattatgggacctggagggagactcggaggagctgtcacagtaggaaaatcaatgagggaactcgctttggaggtttgtttggctttatcttctgcatagcttatgttgtcatgaacttatcgagccttcgtgtttgatttcaattaggccgcgaaacaaagactgaaagatgacaagacttgtggctccggaccggactttgacaagacaactgaagtcatccgtgtccaacgagaaggaactgtcgtacctaacacgccatcctctcctcatatttccttcccccctcctgcgcattctccaccttctgcctcctctacctctcctatcaaccttgacgtatctgcgccttctgattcgaacggatcaacaccaagtacagaaccgggggttttgaatgtaggatccaatgatccgaaaaaggaaaaagaacttgacaaagagatcatcaccatcgaagatagcgatgaagatgaaaatcctcctatctcgacgaaaagcattcttcctcctcactcgacacagacggagcagaccacgttgtctgacgatgaaagaccacgtccgacgcctgatcggccggacccagaacccaaacctcaaagacaacctagattacaggccgatggatcccagaagagccggatagagatcaagacccagcaagagacgcaagcacaatggccatgcccggcatgcacatttctcaactctcagattcttccttcttgcgagatgtgcgaaacgcccagatctggctcatacccttatcaccagccacaacttcagaccatgcctggctcatcggatgttgaagcagaaggctggtactgtataacatgcggggcaggtccgatagaattgaattggtggtgttgtacgaacccaggctgttctggtgtccgagggtggagttgagagaggacttctactttttgaatatctactttaatgtatatgtgagtcttcagaatgaccttcgttataatagtcattggaaacattgagtgttgatacagagactaaagagaggggttgtgaggaaagaagaagaacaaagagcaatcgagattgtttacaaaatatatgacaagaacgagaacatgcagcagggaagatctatgaaacgatcctggaaagatatataatagagagaataaaagcaaaagattaaagacatctggactgcaatttaggcagttggaaattaagacgatgagaatgaaaagaaaaagaatatgcaacttgagggccctggaaaatatgaaccaaagaaacgagaagcaaaatcaaacgacagaggtcgataacccagagaaagaaacagagccccaaaccggagagtaaatgaggtaaaacaaggaggcgatcggatcaaacatgaggagaagaagacgtgaacgaaagagtgtgcaatagaattagcgtcgaaaagttgaatggaagacataatcagacaaccgaatggaaattgaaatccagaaagagataaatcctttctaatatataaacgcgcgcgcgcaaaacgaactatcagttcgccaatctctatcgtatattttctgattagacacttactggggcatacactaattcactcctgagtaccaaccatggatactagtgtctgtagccagcttgttttcttcctctagtaagcataccaaccttcattggtaccggagcaggtgccctatcttgagtcggagggctcatcaacccaaacgacatggtcgttgacgtcgacatctcatcattcgcactgcggccgagatgttgattgttttcgaagtttgcgctaggttccatctgactgagtccaaggatgttctttgaatattcaaattcagtcatgtatcgagaaatggcccgtgagattgtcgaagtgtcgatactagtcttcgaatgaatctgcctcagaggcaaggcgtaggtcggctcgttcgatctgcagtcttctcctgtgtaagaagacccggagagtgtagtgaccgacgttgttagagccggaatggtgtttctattgaaaagactaggaatcaagcccgatggatattccgaagaccgttggtctgatccgagagagtaccagtcatcgaacgactgtgtttgcatcgtcgattcttcatctaaagtggagatggggtacttcaagtggcaatctaactggtcatgatggttagaactgtacaattgaaattcatccagctcataaggatcggtccagagatggttctccgatatgggttgtaaacatggttcggcaggattgaaggcaaacgacatctcaggggatgaacccccattggagggaatgagaggagaactggaacatgagctagagggaatatgat
